United States Patent Application Publication US 2018/0305689 A1 - sequence listing, part 65

SEQ ID NO: 915598 - DNA, 4001 bp, Homo sapiens
acaacacggttcgttagataggacgtgacttgtttcaaactactttcatggaagttatcccactggctcctcccaacagtcctgtgaagttgttcttattacctccatctcacaggtaagaatctgaagctcctattagttaagatacttgcccgtggccgccctatgggaacagaatctagccgtcgactcaagtctagcaacccaaatccattattctttctgctataccaacagaaggagcagcagctcctgaaactgggtctctgctagccctcttcacagatgtggggatggtaaaattgaagagctccaactacacacacaagtagaaaagaaggctgaggttctggatttacactgccaactgaaggggccactggctcagtgttatgccacatccctccagcaaaatgtaggtttcaactaagcaaaggatccctggagtgtatgtagcaagaggaataacttcagaagtggaccgtctgaggtccagggccatggagttcacccttgtggaccctcaggccacaaccacgatgtatacatgtactcattttagggagccggaactggggacatggccagtgcttgcattggcaagctgatccgaagttaatcagaatgccccctcattgtttgccagaatacaaaagacattctgttcagaaagttcaagaagaaaaactgaagaaccaggacagcagctgttccctcatcccacagagaaaccaaaggcatttgcaaagttccctgaggccaagaagtgaatttaagacataacatggctcaagtggaagcacaacccctgatgggtctccgttgcaggaagtgtttgctgcattcatcctcctcataatattactgacaaccccactaccctatcacctataaaactgcctttctgggagggtctcctttccaaggccacacagctcaccatgtaccactcctctaggtcagaacaagttttaccaaaacttaggacaatcagtgtaggagtgcacagcgtggacactgcgtgccctgagatttggtcaaaatgtaaccaaaggaatccacccggcacaactacagtgcctcatgttccccagctcttagcagctgctgctgagagctcactctgggacatctggatgagaaacctgtttgcaggccccccaaccccaagccagccccctcctccacctcttaggaaagtctgtgatcgaccttttgatgtgggaggacagcttgattcttaccaagctgcctggaagagagagagtgcaaaaccccagctcaggcatccctgtgacagtccctctgtcctaataaatgctctagagggacttggaactcaccacaggctcctggctgagcttaattagccttttttttttttttttttccattacaggtcagacatagcagcaccaagagacaaaacagacagtgttcactaggacgaacaagcggctcaaaaggcactggagtttccctgtaagaactacaaacaccacgggagtgatgttaactcagatttttccatataaaagattcttcctgtaaaaatatcctgtgcctttgtgctaaataaaagtaaaatgatgctttttagagtgaagtctaaacacctcagattcagcaagagtgagatcagctagatttgcaaagtcaagaaaattggctgtttccctcctccttaagctaatagaatccaactgttggagcatgacatcattcctgagccccaaaccccgagcagagactacagacactcgcctgactcccagaaaacagccggagagaagggccaggaaaggaggccaaatgatcccagcccggagctgcccttacctgaaagtcccgctgctttcctgcccactccattctcacaccgcagccggctagggagcccagggcccccaaatccactggcttaagctccgatacctgctgcgagcttcccacagctccttcctctgacctttcgtggcgctcctcgcagccaagtgagcagagcactgctagccggccaggccggttgtcatggagaccctgtcctcgctaggcgggcgcgcgcacagcggcgcgctcttggcctagcgcgtgcacaagggcgctctctttttctttctttctcactgtctctctctctctctctctctctctctctctctcagttctgggaggcttccatgaaacagcactgtcttttgatcagctcggtttttgcatgcattccactcctcctacctcccttccagtccaacaggggctctgaactgctcctgggaacttgcttgaacagctcagaggggagaagggagaagacagtgagtggacttgttttcttcccctccagtgtctcattttttataacttggaagaatccctgccaggggggagggagctagctgaagcgcttgaaggggacccagcttcctctgggtcctggagctcgggtaggagggaccctgatgcgctgccttgacttgtttgtgcacttgggatttttccgggcagcagttggggcggaaatgcactcacatcccaggagctcgcctggactggcctctctgcttaccttgctgcctgtccaggttgtggcgatggctttaaccagtgcagggactcatggtactagtggtggcgcctaagcagtctctcatcttcctgaaatggagagcaaagacaactcggtcaggaccaggaagaatcctgggcaagtcgagagtcacaacccagacgacaaacctgatacaaatacagccttgtctctctgccctgctaaggatctgcagctaaggtgcaggcttagtgggagctgctgtcacagtcggtaataatattgctcctgtcagaaaatgagcacagtccctgggacacggcagaccccctaagtttagtcccatccccatccccatcctgtcccttcctctcccccctacccagcatacatttctgctttgtaacattctttttacatgtatcattttgtttgatcctcataaccttttgaaatacactgcacagatatttttatgaccattttttcaagtttatttattattcttcttaaatttcttttagagacaggatcttgctccattgcccaagctggaatgcattggtgcaatcatagctcactacatcatcaaactcctgggctcaaacaaccctcctgcctcagcctctgaagtagctgggactacaggcatgcaccaccacgcctggctacttttttaatttttatttttatagagacagggtctcactatgttgcccaggctggttttgaactcctggcttcacgcaatcctcctgcctcagcctctcaaagtgctgggattacaggcgtgagccagcatactggccttatgaccattttatagatggaaaaactgagactcagagagattaaacatttgatctgcacttatacagttaggcagtcaaagaactaagagatcagccaagttcgccctagtccagcacactttcaactaaagtatattgccacctgatttcaaaaactgtcaactttttgataactggttatgagataacgctgggctcccaagggaaggtggagaatccttgtaagttgtggcgagataggctgactaccatcctttcagcctaaagaccttaagacagcatctctaagatgtaaaacgtcctgatgcacagctcggagaaaaagccctaccctacagctatatgtgaccttgcacttttctaaacgactctcaaaatcttggctcgtctgttcaacatgacaggtctgaaagttaggattggcattattatactaatttaacagattttttttttttaattctacaacagaagtaaaattacttgccccaggtcatggaaccaggaaataaaatctagaaacaatccccaagcctttcaagtctcttgagtacattaagcacagtggttgcaacagcaccaggggtcagaagaccttggcagtgcctgactccaccactaacgggccatgtgccatt

SEQ ID NO: 915599 - DNA, 4001 bp, Homo sapiens
aaaaaaaaaaagaggtccttttccttctttagcctcagtttctctggctgaaaaacagaaatgataagtgaaggcccagataattaaatgcttggaggtgaatccaagatccacctccagataattccattgaattatcttggatacctttttgttgttgtgttttgttttgttttgttttgttttgagacggagtttcgttcttgttgcccaggctggagtgcaatggcaccatctcggcccacgacaacctccgcctcctgggttcaagcgattcttctgcctcagcctcccgagtagctgggactaccggcatacaccaccacacctggctaattttttttttttttttttttttttttgagacagagtcttactctgtcagccaggctggagtacagtggcgccatctcggctcaccgcaagctccgtctcccgggttcacgccattctcctgccccagcctcccgagtagctgggactacaggtgcccgccacaacgcccggttaatttttttttttgtatttttagtagagatggagtttctccactttggtcaggctgatctcaacccccaacctcaggtgatccgctcgcctcagcctcccaaagtgctgagattacaggcgtgagccaccgtgcctggcctatctgggatatcttgaaggatcttggatttctatttctacatatacctgcctttcatgacttgcctggggaggcccaatctgtaatgagacctcagggtctcccagcccttcccccaacctacccccaaaacctctaagagcactctagagagaatcagctgcatacagcccagctccaccgctccaagggtcagagaaaagtccccttccctggggttagctgcatgatcctgcaggtgccatggtgtgcctaggtgccacctcgcttcacctggctggggagtggctcctagacctcagctcaatgcgcatcacttccccttctcatcagccaggccagcccaggtatcacctccagctccactgcccccagatggagttacctgagtacccaattcctcccaagctcagaaacagtgtccactgccttcccactcctttccattcagagtctgtccccttagtgctgccccctcatctgtcacacctgggttctttcccttacttgggccactgacctgagaagcagggtctgtacagctccagcaacactctcctcttcctccagaattctccagatcctcctcagcttcttggctctggtgctcatctcaacacagcagggtcttcctccatcaggccaaggtgggggtaggagaagaattgggaacagggactcccctaggttctcagggtacagtcagtcaatctaagcctgtatccaacaaagacactgacccctggggtacaaggaagggctccaggcccaaaggcaggaggattaggctttagctcttgctcacagcctgctgagacctggggcaagcccctgtccctctttgggccctcaggtttgcaatttgcagaatgaggaaatgggttcctcaatctacaatcacctgactataataatattttgcctttatataccgcgtgggtaaattcctgaaagtaaactaagctgttttcacccctggatctcatttgatcctcccaacagcctgtttgcatttacaaatgagaaagctcagttccctaagggaacaaaattacccaaagtcacacagcaagctggaagcagagcctgggtgcagtccttgaatcctgatccttccctggtcctttactctctatgatgctggaaatctgcctgacttcctctaacctgttgtcccatttgtaaaaggactgttgtgaggactgaattaggagaggcgatgaagagggtcattccttgtgaatcataaaagaaaggaccacagaacgatgactggaccgttaggttactatttattacggttatcttcgctcaggcgcccccacgtgtcgatcccgagactctcggcttgcgcaggcgctctttggtgtttacagcggccgcgaagccccgcgtttgcgcgtgcgcttcccgcccgggaccgcccagaggtcccggactaggggcggactaggggccgctctgcctcccgccccctagtggttgtggccgctctgtcaccacggctcccggggcctctgtcggctccactttggttgagacgtctccacagcccaacaacggcggcgatctgaggagaggcaggagaaaatacggcgcgctcggcatcgtccttctgaccggggactccagcatctcagtcatcgcgtcaccaagccccacgtgcaggttctggcatccatcatggcaaactggagaccgcggtgaattccaccggaatggcgcgcgcattgccacatgggaactgtagttcttggctaggacctttctggggctgggccgctggaaaaactacatttctcaggagctcaagagtcaggctgacagaaagggggcccgcggcatgttgggagatggagtttggggggttcgtgctagcagggaaacagtgaagcaatggagccaagtgttctgagcctgggcctgtgggtttgagttgggcaggagttacacagtagctcttataagagaggagtagcattgttgcggcttttagaaagaatgctacttattagttgtgtgatctgagcgatcaagacaaatgcccctttatcttttttatttatttattttttgagacagggtctctgtctgtcaggctggagtgcagtggccccagaactgctggcctcccgcctcaccctcccaaagtgctgggattataggcgtgagccatcaggcctggccagatgcctttttatcaactacgatggaccttaaggttaaggttaaggaaacaaacgttgcctacctcagggctcagctgtcagctggcatggcaacttcttaaatttctactgctgccagaaaaaccacactcttactaaacccctagcaataggagctatcatgcaaattgtcagactcttctttactgagatttacaactcagaccactacaacgctgatcgacagaggacaggccttacaaacattctttcctgataagtaactgcagacctcaggccagtttcagcaagctcatagagactgcacgcaaactgtgtttgtgtcctatagtccaccttatgatgcaaagaaccaaattccacctcactttaacgcaaaaaccccatcccaaagtgaacatggaacatatgttacaggtgtttacccattgtgcatgcactcacatcccctcataaatatgtatagcttttccccaaaacctgctgaatatgtatgattattgtgaaatacagaccctgtgagtcataaaccagcctaggccgggagtggtggctcacgcctgtaatcccagcactttgggaggccaagacgggcggatcacgaggtcagaagattgagaccatcctggctaacatggtgaaaccccgtctctactaaaaatacaaaaaaattagctgggtgtggtggcgggcgcctgtagtcccagctactcgggaggctgaggcaggagaatggcatgaacctgggaggtggaggttgcagtgagccgagatcgcaccactgcattccagcctgggcgactgagcgagactccgtctcaaaaaacaaaaacaaaaaacaaccagcctgccttttccctatacaaagagagagcacctttggtacctacaggagagtgtctcttttcagtttgcaaactgatgtcgctaatgaaactgccctctactatttaggcatcctggtgttctagagggtagcagtctgcacctctcacagggcttcctcttccatcactcctcagagactgtattcacaggggtcacctgtgtgtgagatgcagtttgtcttttttggggggagggcaggggctgttcgtttgtggttttttttttgttttttgtttttttttttgagacggagacttgctctgtcatctaggctg

SEQ ID NO: 915600 - DNA, 4001 bp, Homo sapiens
ctgagccattccctcatttgaacttgcttatgctcagaaacaactcatctataaactctccccacactgcaggtcacagctttgggcagatcacagccaaagggtgagagaaatgggaaaagagaactgatctcgtaagccttatgtaaaatgactggattttaatagagttccttgatgggtacagtggctcacacctgtaatcccagcactttgggagggatccctgcacaacacagagagacagtgtctgttcaaaaaattaaaaatagaaagaaaaaaaaagttagccaggcccagtggctcttgtgtttagtcccagctaccgggaggctgaggcaggaggatcacttgaacccaggagtttgaggctgtagtgagctgtgatcacactactgcattccagcttggacgacagatcaagaccctgtctcaaaaaaacaaaacaaaacataaaagtgttcctttctactgcaaaagtataccagggctcctgctgcctgataagccttcacaactgcataggaaaaaccatgacagatcaaaagtagcatggtttccctagcaagcagactcagggaaaaaaaaaaaaaaacaaaaaaaaaaacctgtagcatggaattcccaccctcatcagtcagaagaaacagaataagtcaacaagtggtcccaggaattatatcatgtctatgtcaagaaaaggccatttaacaccctagttgtaaataggattccatctaagaaaccgcctggatatttcaaatgcgcacagcaaagagacaagactacctaagggaagggtgggactagggttcccacggttgttggaataggcacacctgaacaccaggctttcaggcaacagaggtggcccagccttaactttccctttccaacataagtggccccaacctcccccatgctgctcagtactaaaaccgaataggagcaatgaacttatcatctcaccaggccattcttccagacaagtaggcctaagatggggtctttccttgctgatctaaaaggtcaagttgccccaaaggcttcttcttactgccaacaaaaaaaatcctgagtgcgggggatgaggaaagttgttcaggaaagatacaggcatttgccatgactactgaccagaaagaacttcttgaactacttggaacaggcagtgccatgtgtgaatcctccatgaacctcacatgtacaaacctagatttcaacttgcccacttcgggccactcagtcctgagccaaagcctccagcccagtccagcccgcagcaaggccttacctgctgcagtggactcctcagagttggcccccgagctggttcctgtcgccttctcactgtgactatggctgaggctctggccctggtgcaggaggagtccccagaggagccacagggcaagacggacgcatacatccatgactctaggtctcagtcaacatgcgtctgatgtggacacctcgggatcccagaggcaaagccaggagcccgggagtgcagccgacggtctccaggcaagatgccctcgcggctccgcagctgtccagccacccgcgagcctgccccctccaacagccaaaggtcaagtgctccaagtttgggtgcgggaggagggctggctcctcaggtccaacagtgggtccgccggggctgcggcggcctgagctcgtgccgcttccggagacttcgggcagggtggctgcggggctgctgtcagctccgcagattactacacccctgcggaagggggcggccggagtctccgcgggcacagaagtggaggaggaagagaagagaagagaagagaggcgagaagggggcacctgacctcgccctgccgaagagcggcgagcagcagaagctggggagggcgtgcgacccgcagggtcctgagggcgcgggcgtctccgggatcctgggcctcctaggccgaggtcagcgcccccgcccagtcccgtgcccaggcggctggcggtgcccaggtccagcaggcggacgcacaccggccaggcccaggacagcggcttccaggcgggcgggcggcgcggggcgggcccggggcgggcgggggcgtgcgtctccgcgcccgccccgcgccgcccggtccccagcgaagcccgggccagccccagcgcccagctggatcccggaataaccggtgaagacggctccccggaatccccgcccctagcgggctctcccggacccccggcccgcgctagtctttgccaggatcccgcgcaaaggatcaagtcccagcttccctttccccaccgagagtctccagcgccaaccgcgggccgtcgggcgggtccctgacccgcagttactcaggtaactcaggcctgcggcggcggcgacagcagctgccctgccccgatctccgggccttggtgctgctccactcgcctcagttctagagctgtctaaacagaggcccaggacacgacgttagcctcccaggagctgcctgaggcgacaacagcctgacccggctcggcccgggggcgagctcccagcccccaactcccggccagttcccaggctccgccctcgcgcctcgcctgacaaccaatcggcttccgcctctctgcggcttgggaacccgcgcgcttcgtcgcccatgcgcagcggcccctggtgggaaaatcagcaaactgcagacaggactcggcgctcctgggagggcctgctcttttgcagagggttgccgagtgaagctaagacccgccccgggggaggcccacgagggccactggggcctgcgagtgttttctgaggaaatgatgatgccagaaagcaaaatgaaatgtccaaaccactctagctaaaattcccctacacattccttgagtctgggctaaagggtgccatctgctttcccgaccccgcctcccttcccctccaagctaagtgggatgccctcccttagctctcacagccctttttcctacctgccctcaagctctcagccctttaaggtttttcggtggggcctgtaaatgcttcctccctgcatctcattctcccagctacctctctggtggaggaggtgtcagcgacttgagaatgagtgcgccaaagaagacagagccacgcctgagcctccttcaacaaagcctgcacttcctgttctcttctcaagcgtgctgtcagcagatcttgactgaaacctctgtgccctaccctgtccttggcaccagacgcaggggaaaggatcaggcccagtccctcctctgactgacagtgctaaaccagctacctgttctgagcaaggcccctgaagactgggaacacgaatttgcccaacagctgcctggcttaagggttaggccgttgatataaaaatacatggctaatgtaacctactaccactctcccggctctgttaagctcctgtcacactagccttcgttaagttcctaaccacgtcaaactcagccacctcacagcctttgtatctgctgttgcttctgcatgaaacactctcgcctgctcccagttcctcatgtagctggtctcttactcttccagatacagctcaatgtgtctccttagaaacttttactctgcccaccccttcaaaatcagtctgtggccaaaattggaccattacatctgtctgcccctcccccaacagatagtgattgccacttttcaggtcagagactgtgccttattcatctctgtgacactaggacccagccatagaccctgcacatagtaagttctctgtaaaagctggattacatgagttaattcacttgaacactcagatactaaaaactaataccggaatattggaaaattgaccagaacagttgaaaccctacctaggttctcctagacctattctctgagccaggggtcttaaattcaaatggcaaaatgggcaggtaggtaattcaattaagaaaagtaggtaggagtaatacggagtggtggggactgtggagagcaggcagaaagatgggcctagtattgctgg

SEQ ID NO: 915601 - DNA, 4001 bp, Homo sapiens
ttcttccgatgaatcattacagctcaatgacagcttcaaatcgaacaaaacctctaggcctttcataaccgcaagctactgaggacataaccaagtcactgaaaggaagcagcaaccgcttcaaactcggcccctcaaatgctcagtagaggcccataacttccagcggttgatctctgtaaattgtctacaaccacccccgggtcgtcagaaacccatctttcagacccacctttcggaagtgttggtcctcggtcactcgacaatcacacacacaagcatacaaaaagagggggaggggccgcaatacatttgtaaaacactgtcagagatggaattcgtcccaaggacttttgcggcacccttccctttcccgcatcaggtagagtcggtctgtcgctcctcagacccccgctcaacgctctcccaccctgaccttctcagatgtagaagagtaacatttgccccaactgcatcccaggctgctaagatcctcggctactcccagtgtatccccgtccccgctccctggatccgtccaagttcctcgtggctaagtcccgagcggtttctccgtcggccgtctgagatctcccggagggctacctcgcgggtgcggaccccggcccccggcccacctccaccccgccccctgcggcccgcaccctccccaacatggcccgcagccgccccctcgggacgccttcagggcccggtcgcgacccctcttcccgccgccggccggactcacccaagctgtggcctccgccgggccctcctcgcccaaccagggggcgatgggcgctccccgcggccggcctcgctaaagatcccgctcccgcccgccgcccgcggccctcacctccccgccgccgccccgtccggccccagcgccgagctccggtctcctggatccggcgcccgccccgcccccctaccgcggcctggccaccgccggtccccgagcaggctcggggcctcagcccgcccctcccccttcacctgctccatagcgcagcgcggtccggaaccccgttgaatcgaatccgtccgctccgcgttcccaaccgcacgcgccgccttctggaacctactagaagctaccgggaccccggctcccgccccttcctcgcctgctcactggtcgagttcttctagggggaatgtctgtgctgctctactattggcttgaggtccagcccatcatctccacttccttctcattggacagcggggagtaattccctcaaccctgcctcccccgcacctcaggattgggcgctcctctataaacccacccatctcaggctccacgaatggagggaggagcgaacttctgcgacacggattggtcttttgcactgccaatcgtagccgcgctggccgcgcccattggttctgatcgttctggaaatttccacctctcccattgggctgccggactccatgtcggaaccgccttcagaatgagagcgattccaattgggcggagggttgccaactctttgcgctgattggtttaaatcgctgcccttcaaaaggccgggtttcgccccgcccctgatatatgggagtaccggctgcagtcggggtctgtagctgtgtcgccggcggctgcggggcctctgggttgctttccctctcgctcccgagtgccgcgagttccaggcggtccccgggatcgccagcggcacagggccccagcccttcgcccgcgcatcgggatgggggtcctagccggtgggagctgcctgtccctcgagcgccagctacccgcgttgtccagcgctccggcctcggcccggccctcctgcctcctggctgttaggttctgaatgttccggaaatgccacgtgaccgcgagggcgcttgggcttgggctggacaggccggggatctcaccgcggcgggcccggctgtcccgcttgggcgtcctcagtggaaccgcacaccctttctcagcgcgccggtcgtttggtcctgtagggccgaggggaattcgtgcggtgttgagcacgcgggaagcacttaacgaaagggagctgcccctcagccctcgtgagtccgatgtaaaggagtgaaggagacgaagaactgaatcagtagttgaccgcctgtgagctggcgagctgtgccctggtagggccttaaatcccagccccagaagtcggaggcagggcaggcaccccaaagcgtggaagagatgcacctgcggagtgaaaatgctgctattgcttctagggtcagccttggttcctggaacaaaggagccgcatgactcgggtctggcgatgatgttgggctctgcagtgtcctcatccttccccctctctgggtaatgatatcttcccagggtttaaagtgtgtcctctctgccagtagcttgtctccacagcctcatctttaattccacctgccccacccattttggacactgcagccaagttgcagcagatccgcaaacctggtaatccctcacttgaaagtgctggaggctttaggatggggttcagggcctgtgcaatctaaccgcctgcttttttttttttttttttttttttttttttgagacggagtcgaatctcactgtctcccaggctggagtgcagtggcgccatcacagctcattgcagcctcaacctcctgagctcaagccatcctcccacctcagcctcccaagtacctggggttacaggcaagcaccattacgcctagctaatttttctgggttttttttttttgtttttttttttgtatagatggatttcgccatgttgtccaggctggtcttaaactctcgctctgtctcccaggctagagtgcagtggggcaatctcggctccctgcaacctctgcctcctgggttcaagcaattatcctgcctcagcctaccagttagctgggattacatgtgtgcgccaccgcgcccggctaatttttttatttttagtagaggcggggtttcaccatgttgaccaggctggtctcaagactactgacctcaagtgatccccccccccccccgcctcggcctcccaaagtgctgggattacagacgtgagccaccgtgcccagcggttttgcattttcaattgtggggcacggtgagaaaagacttgaagaaagcaagggagtgagatccatggaaatgtaggggggaaccttgcaggcctatggaacagccagtgcaaagggcctggggtgggagctgcctcagggtagccaggatggcaggaggcacagctgccgagaggaagcaggggccaggtcctgcaaggttagaggccattgctactcctgaacacattggcaggttttgagcagagaagtgacatgattttagttttctcaggatccctctggctgctgtgtggaggaagaggggagggtgagagcagggatacctcttaggaggctgtggtagtaatcccagggagccaggatgggagcagaggaggggacaggaattggattctggatgcattttggagggagcatgaaggaaagcggggtcaaaggttcctctgaggccttggctgcctctcttattcatctacatccattctgtcaaggacacctttcatttcttcttggcactgtctcaaggccaccacgctgctgcccacctgaccagcagtggcctttccaggccttccatcttctccccagcagcttatctctgcgtagccaggtcccatttcccacacacctttttttaaagtgtgttgcactgctctgggtgcaggactgtagcagtgaccagggcagctccagatgaagcttctgctcacaggaaccttttctactgaaacagatgatacctaaactctcagctgtgtgactttaagcaacttgcacaacctctctgtacttcagttgcctccatcttcaaatggggattaaaaagtgttgacatcatagtggttgtgaggattacatgatttgatagtttataaagcacttagaacttgtgaagaagagtgcctggggattgcctaagg

SEQ ID NO: 915602 - DNA, 4001 bp, Homo sapiens
cttggcctcccaaagtgctaggattataagcgtgagccactgcgcccagccgagatccttttttttttttttttttttgagacggagtctcgctctgtggcccaggctggagggagacggagtctcgctctatggcccaggctggagtgcagtggcgcaatctcggctcactgcaagctgcccccagggttcacgtcattctcctgcctcagcctcccgagtagctgggactacaggctcccgccaccacgcccggctaatttttcttctgtatttttagtagagacggggtttcactgtgctagccaggatggtctcgatctcctgacctcgtgatccgcctgcctcggcctcccaaagtgctgggattacaggctgagccacggtgcccggccccagatcctttcttaaaggtaaaagagcaacgtcttattccagaaatcttttcctcacctatactacagcccatttaaccctagatacaactgaaatattatatgggcacaaaaaagtttactaacttcatttccactctttttaatacagcaaggaagctcgagctttgcctaaagcagcaactgctacaagagaccaaaggctcagctctgtagctcacaccaaaaaaaggatggtagtcactagtccatcgagatgtcttatttaaggggagagtgtgggcgatcttagttttatggccctgaagtaagaaccagataccaggtatagtttcagaattgtcacccccaagtgttatgggcccggagcgaagacagtagtactcccgagcgggaggatgatttctcggaggttggtagaggtttcttggaggttgttttgtcctttttcttccgatgaatcattacagctcaatgacagcttcaaatcgaacaaaacctctaggcctttcataaccgcaagctactgaggacataaccaagtcactgaaaggaagcagcaaccgcttcaaactcggcccctcaaatgctcagtagaggcccataacttccagcggttgatctctgtaaattgtctacaaccacccccgggtcgtcagaaacccatctttcagacccacctttcggaagtgttggtcctcggtcactcgacaatcacacacacaagcatacaaaaagagggggaggggccgcaatacatttgtaaaacactgtcagagatggaattcgtcccaaggacttttgcggcacccttccctttcccgcatcaggtagagtcggtctgtcgctcctcagacccccgctcaacgctctcccaccctgaccttctcagatgtagaagagtaacatttgccccaactgcatcccaggctgctaagatcctcggctactcccagtgtatccccgtccccgctccctggatccgtccaagttcctcgtggctaagtcccgagcggtttctccgtcggccgtctgagatctcccggagggctacctcgcgggtgcggaccccggcccccggcccacctccaccccgccccctgcggcccgcaccctccccaacatggcccgcagccgccccctcgggacgccttcagggcccggtcgcgacccctcttcccgccgccggccggactcacccaagctgtggcctccgccgggccctcctcgcccaaccagggggcgatgggcgctccccgcggccggcctcgctaaagatcccgctcccgcccgccgcccgcggccctcacctccccgccgccgccccgtccggccccagcgccgagctccggtctcctggatccggcgcccgccccgcccccctaccgcggcctggccaccgccggtccccgagcaggctcggggcctcagcccgcccctcccccttcacctgctccatagcgcagcgcggtccggaaccccgttgaatcgaatccgtccgctccgcgttcccaaccgcacgcgccgccttctggaacctactagaagctaccgggaccccggctcccgccccttcctcgcctgctcactggtcgagttcttctagggggaatgtctgtgctgctctactattggcttgaggtccagcccatcatctccacttccttctcattggacagcggggagtaattccctcaaccctgcctcccccgcacctcaggattgggcgctcctctataaacccacccatctcaggctccacgaatggagggaggagcgaacttctgcgacacggattggtcttttgcactgccaatcgtagccgcgctggccgcgcccattggttctgatcgttctggaaatttccacctctcccattgggctgccggactccatgtcggaaccgccttcagaatgagagcgattccaattgggcggagggttgccaactctttgcgctgattggtttaaatcgctgcccttcaaaaggccgggtttcgccccgcccctgatatatgggagtaccggctgcagtcggggtctgtagctgtgtcgccggcggctgcggggcctctgggttgctttccctctcgctcccgagtgccgcgagttccaggcggtccccgggatcgccagcggcacagggccccagcccttcgcccgcgcatcgggatgggggtcctagccggtgggagctgcctgtccctcgagcgccagctacccgcgttgtccagcgctccggcctcggcccggccctcctgcctcctggctgttaggttctgaatgttccggaaatgccacgtgaccgcgagggcgcttgggcttgggctggacaggccggggatctcaccgcggcgggcccggctgtcccgcttgggcgtcctcagtggaaccgcacaccctttctcagcgcgccggtcgtttggtcctgtagggccgaggggaattcgtgcggtgttgagcacgcgggaagcacttaacgaaagggagctgcccctcagccctcgtgagtccgatgtaaaggagtgaaggagacgaagaactgaatcagtagttgaccgcctgtgagctggcgagctgtgccctggtagggccttaaatcccagccccagaagtcggaggcagggcaggcaccccaaagcgtggaagagatgcacctgcggagtgaaaatgctgctattgcttctagggtcagccttggttcctggaacaaaggagccgcatgactcgggtctggcgatgatgttgggctctgcagtgtcctcatccttccccctctctgggtaatgatatcttcccagggtttaaagtgtgtcctctctgccagtagcttgtctccacagcctcatctttaattccacctgccccacccattttggacactgcagccaagttgcagcagatccgcaaacctggtaatccctcacttgaaagtgctggaggctttaggatggggttcagggcctgtgcaatctaaccgcctgcttttttttttttttttttttttttttttttgagacggagtcgaatctcactgtctcccaggctggagtgcagtggcgccatcacagctcattgcagcctcaacctcctgagctcaagccatcctcccacctcagcctcccaagtacctggggttacaggcaagcaccattacgcctagctaatttttctgggttttttttttttgtttttttttttgtatagatggatttcgccatgttgtccaggctggtcttaaactctcgctctgtctcccaggctagagtgcagtggggcaatctcggctccctgcaacctctgcctcctgggttcaagcaattatcctgcctcagcctaccagttagctgggattacatgtgtgcgccaccgcgcccggctaatttttttatttttagtagaggcggggtttcaccatgttgaccaggctggtctcaagactactgacctcaagtgatccccccccccccccgcctcggcctcccaaagtgctgggattacagacgtgagccaccgtgcccagcggttttgcattttcaattgtggggcacggtgagaaaagacttgaagaaagcaagggagtgagatccatggaaatgtaggggg

SEQ ID NO: 915603 - DNA, 4001 bp, Homo sapiens
aacaattaaacaactggtaagaaaaaactaagactccaatacaaaaaccatcaaaaagcttttgctaatagctaacaataagatttcacttaaaacatattaataatgacagatgtgagttaaaataaggaggtgccatttttatctgtgaaattagcaaagtttttaaaataataatgctaatatgggtgtcataaaactgacggtggcaatgtaaattggcataatctttctgaaaaacagtatggcaatgtttcgatgttttgagagcattcacaatgttcctgccctttgacctccctataatttcatttttgggaactgtttttttatttttttttgagacagggtctcactccattgcccaggctggaatgcagtggcaagttcactgcagcctcgaactctcaaaaatatcttggtctggatggtcatgtacatggtcacccaactttttggccacattaagagttttgtctttattctaagaataatgagaagccatgatggattttgagctagaggaggttggggggtagcataatcaaattttagttgtgaaaatactactcctgctgcagggcaaagaatggatgggaatattgaaaggaaaggataaatacctttagattagttaagaggctactactggacaacagatcatggtagattggtctagggtaatagtagcagagacagagatactcaaatggatttgagatttggtttgaagataaaatgaatagaacttgatgattgtttggatatggaaaggaagaaagtgcgaggtgtcaaggatgaggccaagatttctgatttgcaaactagaggttggtatgacccattgagatagcaacagagatttacacgagctaaaaatttaaatgcgcgatatatctgcatatccatcactgtctaaaggcacgggcctggagaacaaggaaagagtttgggttcaaaacttgttgatgttcctttccattcacagagccctctttcaaggcaggactatcctattttctggttggatattggagtcatttggtggtcaggcaaaaaagaaggtccttcttagctggtgatatgggacggggagcaccagaccactcttagcatgcaaatatcccttactaacgctcaagtgcttttcacatgtactgttcacaaaacagcttcacatataggttcactgaaacccacgaccttgtgagaaattataatctacatttaggaagctgagggagagttcttaaattacctgtccacagagccagtacggggctgctttatgtcatcctttcacctcctatgtgcagcctctaggtgcaagagactatcttaagggcaacaggaaacctaccatataatggggtcccactaggtaccaggctctagcagtttaaaaaaaagaaacacaacttcagaacttctaaggatgtttcccacacacttaccccacagtaagttcgcttctaaactttcaaaaagtttcacgtcccaagatggggtgaaggtgagacggtggagatgaaccggggcagacagagaccaccccaaataccggacccgggggaaatggggtaccaacggctgggccccaggagacactcggaggggtccgcgggctcggcccggtccctccgctggggggttaccagccggccggcagcgagatacccagaggcccgtttttccaccgcgttgccatagcaacggcctggccggctgcgccccgggccgcccgccccatcccgcgggcccgccctgagccagtgactccagggaccactcaccgcggccggcggactggcgggtctccgacaggtgcgcacactcggcgcaggctgtcgctgagcccggaattctgcaccgggagaaacttttcagcccgcagagcaaccgcagggcagtggacgggggccgcgcgaggacaaacagcggcggcgggtgcaaagccccttctccaagccgcggggttggccgggaggtgccggctgcacaacggcgcccacgtgacccaggtgcagccccaggcgcgcccaagggcagctcgccttagagaaggacctaaaaccccgtctggggcacagaggagcagccacgtgttacgtaaaataaagctttgtagcaggaatatcacagtactgaggtgattgatgctcaggccactcttctcactcggagtcaagcccatcaagccccagccagttggagcaagggctgcaagccttgaactgcagtgagtggggagctggcctaaaaagacgggaaaatgctggggggagggtgtttgtccccacgcaggggctgagaagactcctgacagatcaaatgacgattctcagggatatgttttagctacaaacctatgagaaccatctgaatgcctgccccatgcaacagagggtccagctgtatgctaatgtatttactggcctgaactaagaatggcttctgtggtcctgggtcctactctctagcagtgtggggaagaaattcaactctcctaatactagcctaattatttgaggcagatgttctctaaaattagctgattgatagccagtaacttgatacggcaggtggattcattgtattgcttcgggggaggctacatttggcaactagttcatccagtccttttcatcaaaaaactcaaaatggtcataatgggtgactggtaacttcaaacttcaaaccactggactaggccgggcgcagtggctcacaccgataatctcagcactttgggaggccaaggcaggaggattgctagaacccagaagttcaagaccagcctgggtaacactgggaggcccccatctctacaaaattaaaaactacctggccaccaaagggctgcaagaaacctaccatataatgacgtcctactaggtaccaggctctaggagattaaaaaagatctcctaggataatctcccgcatcttaaggtccttaatcacatctgtaaagtgccctttgcatataaggtaacatattcacaggttccagcctgggcgacatagccagccctgcctctaaaaacaaaagcaaccactggactgcgttttgccctggattaaaccagaccaccaaaaaactgtatgtttgtaccattttgtcttcaccgttggcaacattgcatgaaccaagtcatgtttagcactatgccatttgcttatattaagagatgctgtttaaaaaaattcatgatacctctgcatttactagagggattactttaagaatgttgtttattacatctttgtagcagaatcctaccagcttgtccagcgcagagcttttcaaacttttttgagcacaatccatcaaaataaatatgttttacattatcactcaatacacaggtactcatatatttagtaaatgaaacaagttttataaaacattacccacatcacatgctatgcaccctgatacttttaatctctttttaaggctagtttctacccactaatggtttcttgaccttcaatgcaagttgcatttcaaaaacagcagtataaccagatgtctttttctggaaactagacctggatcctcagacaaggtaaccaggccacctgactacagttgattgctccaatagtagggacctgactcaagataaggcaatcatatccctctcccaggaatttggaattaggacagagagattgcaatctttctctaggaagctaatgtggaaacacagaacatctttaaaatagaaaatcagaagccttcaacagacatactttcccaccatgtggccaaaagcaatgtagaaagccaggctgcagggaaaatgggaaaagaagaggaaggctgaaaaagatatacagaaagaagagaccaaaagagttctgacggctttccattcctagtcatggtattttctgaaatgaattgtattcctgcctttgaattccatatagtatttccaactctttggagttgggaggaggggcctaccacactaatataatcacctatatgc

SEQ ID NO: 915604 - DNA, 4001 bp, Homo sapiens
ttactctgcctttccttgtctgtcttggtctttgcctcctacctggatgctctctttcttccaagccctgtttgactcaaagttcagaaaaacaagcaatcagcccagtcttgattccagtttttgccccaggaaacagactatgaaacagttttctgccttgccctgtagcctgcagggaagtaacaactcgccccaggctccagggataacttattcaactaattccagccaaagcccagcatagtggttcctgcctgggctggggaagataaaaatcaaacaattaaacaactggtaagaaaaaactaagactccaatacaaaaaccatcaaaaagcttttgctaatagctaacaataagatttcacttaaaacatattaataatgacagatgtgagttaaaataaggaggtgccatttttatctgtgaaattagcaaagtttttaaaataataatgctaatatgggtgtcataaaactgacggtggcaatgtaaattggcataatctttctgaaaaacagtatggcaatgtttcgatgttttgagagcattcacaatgttcctgccctttgacctccctataatttcatttttgggaactgtttttttatttttttttgagacagggtctcactccattgcccaggctggaatgcagtggcaagttcactgcagcctcgaactctcaaaaatatcttggtctggatggtcatgtacatggtcacccaactttttggccacattaagagttttgtctttattctaagaataatgagaagccatgatggattttgagctagaggaggttggggggtagcataatcaaattttagttgtgaaaatactactcctgctgcagggcaaagaatggatgggaatattgaaaggaaaggataaatacctttagattagttaagaggctactactggacaacagatcatggtagattggtctagggtaatagtagcagagacagagatactcaaatggatttgagatttggtttgaagataaaatgaatagaacttgatgattgtttggatatggaaaggaagaaagtgcgaggtgtcaaggatgaggccaagatttctgatttgcaaactagaggttggtatgacccattgagatagcaacagagatttacacgagctaaaaatttaaatgcgcgatatatctgcatatccatcactgtctaaaggcacgggcctggagaacaaggaaagagtttgggttcaaaacttgttgatgttcctttccattcacagagccctctttcaaggcaggactatcctattttctggttggatattggagtcatttggtggtcaggcaaaaaagaaggtccttcttagctggtgatatgggacggggagcaccagaccactcttagcatgcaaatatcccttactaacgctcaagtgcttttcacatgtactgttcacaaaacagcttcacatataggttcactgaaacccacgaccttgtgagaaattataatctacatttaggaagctgagggagagttcttaaattacctgtccacagagccagtacggggctgctttatgtcatcctttcacctcctatgtgcagcctctaggtgcaagagactatcttaagggcaacaggaaacctaccatataatggggtcccactaggtaccaggctctagcagtttaaaaaaaagaaacacaacttcagaacttctaaggatgtttcccacacacttaccccacagtaagttcgcttctaaactttcaaaaagtttcacgtcccaagatggggtgaaggtgagacggtggagatgaaccggggcagacagagaccaccccaaataccggacccgggggaaatggggtaccaacggctgggccccaggagacactcggaggggtccgcgggctcggcccggtccctccgctggggggttaccagccggccggcagcgagatacccagaggcccgtttttccaccgcgttgccatagcaacggcctggccggctgcgccccgggccgcccgccccatcccgcgggcccgccctgagccagtgactccagggaccactcaccgcggccggcggactggcgggtctccgacaggtgcgcacactcggcgcaggctgtcgctgagcccggaattctgcaccgggagaaacttttcagcccgcagagcaaccgcagggcagtggacgggggccgcgcgaggacaaacagcggcggcgggtgcaaagccccttctccaagccgcggggttggccgggaggtgccggctgcacaacggcgcccacgtgacccaggtgcagccccaggcgcgcccaagggcagctcgccttagagaaggacctaaaaccccgtctggggcacagaggagcagccacgtgttacgtaaaataaagctttgtagcaggaatatcacagtactgaggtgattgatgctcaggccactcttctcactcggagtcaagcccatcaagccccagccagttggagcaagggctgcaagccttgaactgcagtgagtggggagctggcctaaaaagacgggaaaatgctggggggagggtgtttgtccccacgcaggggctgagaagactcctgacagatcaaatgacgattctcagggatatgttttagctacaaacctatgagaaccatctgaatgcctgccccatgcaacagagggtccagctgtatgctaatgtatttactggcctgaactaagaatggcttctgtggtcctgggtcctactctctagcagtgtggggaagaaattcaactctcctaatactagcctaattatttgaggcagatgttctctaaaattagctgattgatagccagtaacttgatacggcaggtggattcattgtattgcttcgggggaggctacatttggcaactagttcatccagtccttttcatcaaaaaactcaaaatggtcataatgggtgactggtaacttcaaacttcaaaccactggactaggccgggcgcagtggctcacaccgataatctcagcactttgggaggccaaggcaggaggattgctagaacccagaagttcaagaccagcctgggtaacactgggaggcccccatctctacaaaattaaaaactacctggccaccaaagggctgcaagaaacctaccatataatgacgtcctactaggtaccaggctctaggagattaaaaaagatctcctaggataatctcccgcatcttaaggtccttaatcacatctgtaaagtgccctttgcatataaggtaacatattcacaggttccagcctgggcgacatagccagccctgcctctaaaaacaaaagcaaccactggactgcgttttgccctggattaaaccagaccaccaaaaaactgtatgtttgtaccattttgtcttcaccgttggcaacattgcatgaaccaagtcatgtttagcactatgccatttgcttatattaagagatgctgtttaaaaaaattcatgatacctctgcatttactagagggattactttaagaatgttgtttattacatctttgtagcagaatcctaccagcttgtccagcgcagagcttttcaaacttttttgagcacaatccatcaaaataaatatgttttacattatcactcaatacacaggtactcatatatttagtaaatgaaacaagttttataaaacattacccacatcacatgctatgcaccctgatacttttaatctctttttaaggctagtttctacccactaatggtttcttgaccttcaatgcaagttgcatttcaaaaacagcagtataaccagatgtctttttctggaaactagacctggatcctcagacaaggtaaccaggccacctgactacagttgattgctccaatagtagggacctgactcaagataaggcaatcatatccctctcccaggaatttggaattaggacagagagattgcaatctttctctaggaagctaatgtggaaacacagaaca

SEQ ID NO: 915605 - DNA, 4001 bp, Homo sapiens
gggaaagaaaacgaatttttcctactgaagcagaagagtcgggggattaaaaaaagtagattaaaatgttgagggacactatctgtaggcagttcaaaatggaaatcacatgacagatatgaattatttatatagcaatatagcactaatctaccataggttagttattcttgtataagacagtactactatcttttttttttttttttttttgagacggagtcttgctctgtcgccaggctagagtgcagtggtgccatctcggctcactgcaacctccatccacctcctgggttcaagcgattcttctgcctcagcctcatgagaagctgggactacaggtgtgcgccaccacgcccagctaatttttgtatttttagtagagacggggtttcaccatgttggccagggtggtctggatctcttgacctcatgatctgcccacctcagcctcccaaagtgctgggattacaggcgtgagctaccacgcccagacctacttttttaaattacaaggtgatcaagagctaagttataacgactataacaaaggatatgcaacaccattcaagatgttttgcttttattctttttgactgacacataattgtacatatttatggagtacagtgtgacattttggtacatgtatataatgtgtaatgatcaagtcgggaaataattagtagattcatcaccttattttttttgtcttaggaatattcaaaatccactcttctagctatctgaaaatatacaacaaattgtgtatttttgttgttaattatactcctaataatagttatcctatagaacactagaatttattcctatctagttgtacttgtgtatcccttaacaaacgtttgtctatcctcctccatgaatcttttttcccactattattggaataaaggagaaaaacaaaacaacaacaacactggactaggtggaaggcatatagaatgctagccccaacactgagaagtcaagcatgttctccataattaactgtcccagaagagcagtttagaaatgtgtttaagtatagtcccaaagggaaagcttactttgcaactaaaaataaaggcctaactactccaggaggtcaacaatccagccatatctctcagggtttgcagctgttttctggaatgcctgaaataggaacaaacttaacaccactgcgttgatacgagccacacaccaaaatgagactgctaggatctctacttgaaaacttgagtaaacgagctagtcattgagggcagggccgtaagggagatttcatctcgtgctctttggtcactttcgcacaccgccaagcaaataagagcaaagacacctttcttaaaacacttaccaacctgctctcctcaactgtgccctgcaagctgtggcatctcctgccaccctgcctctagtttcccagactgcaatttccccagccccgttttcctacacacgtttccacaccctctcacgatcttttactctcttctcccttccggtcgttccagcgggtcccacctccctcttcttcccaccctcaaagaactgaccacctctgatacccctcagcgcgggacactcatcaccccagcatcctacgcgccttcccctccataactagtcccaggacccagtctttcccacgctctgttctcaagacccaccttaccctccctccctagaccttcgcatccttccatccaggaagcccccacaccacgccccacgccccctcctctgcaaggccctaagctctgctctccacccccatttagagttttgcctcctgcacttcgttcagccccatcaacgccatggactgcacctgccgctgattttcaagttacgttctacggccttctcacctggccggctttcctaaacgatccgcggggctccctcagccatccgttcagcggcgcacccaaccctggcaggagccgggtccgcctcccggaccgctcccccgttggctggctccaggccaataggacgcttctggagagcgatagggtctcggaactgtctgtcaaatccggaggcgtaaaccgggccgcgattcaagtttttaattggtcattacagctatcacttagcagtctagaggcaggtctgtatgctcccgccgagctgtcataggccggcgcgtaggagtcaagagcgcggaaagaacgtgccccaagcagtttggttgagggccgaggagtgacgtgtcggtttgcggacccacggggagtcgcagtgggaaggcgcggcccactgactcccgtcatgtgacaagaagcggaaactacgctgaaataggcccttgctccaagtcccagtaactcggaatgcggagccgctcgtctcccgtcttttttaaggtagaaattgttacctaatacaaggtgaaaggagaggagggaagcattttctacctatttattctcaattaaaactcaaacgcggactggtccagacagttcgtcttttgcaggatgtgcctgatagttgactcgagcttttactgtgccttggtaactgcgatggacctgggaaccttgacagagttcacagcccctggttttgtgaaagagcgtgcctaggcctaaaggggttgtcggggctaagctggaagcatttctactgccagctgagacagccaccgccgcggaggcacagccctccccagcagcaagcgggcttcctcgggagaccgggaggcagcccggccatgcttagtcagttcagccctttgttaaaataccggccagagagccgctctccctatcctaacttgcctctcttctctcgcaccccacgcgctccccgacccccaataagtttgctgagggcagagaaggggacgaagtttgagcagcaattccatcatctcagactcgcacgtgtacacctttatcctcaggcacttccactccctgcgcgcctcggtgagccaaggctacaccagagagagtgggaacgtctcgcagctcttcgaacttgttgcctctaccactcacgcagtttcctattctcccatgaacggaacccaccacttattgaaaggtcattatttaaatcactgcttcagaatcacatgcatttttttcaaaatccacatgaccaggctcgccccaggacgttatgattcaatagatctgcttttttttggttttgtttttagtagtaagtgttcgatgtaattttactttaacaaaaggaaactgaagctgagcctgaaggaattacagaacttggagtaaatgcttcttcaaaatacgagttttggtcgggcgcggtggctcacccctgtaatcccagcactttgggaggccaaggcgggcggatcacgaggtcaggaggtagagaccatcctggccaacatggtgaaacccgtctctactaaaaatagaaaaattagctgggcgtggtggcgcgtgcctgtaatcccagctactcgggaggctgacacagaatcacttgaaccagggagtcggaggttgcagtgagccgagatcgtgccactgcactccagcctggcgacagagctggactccgtctcaaaaagaagttttttctctttaaaaataaaaaagcggggaggggggcattaaaattagaaagattgtgttcaagtttcttttgtttttttttaagtattaacctaagaatattaaggccggtcgcggtggctcacgcctgtaatcccagcactttgggaggccgaggcgggtgaatcacctgaggtcaggagtttgagaacagcctcaccaacatggtgaaaccccatctctactaaaaatacaaaaattagctgggcttggtgtcaggatcctgtaatcccagctacttgggaggctgaggcaggagaatcgcttaaacccaggagttggaggttgcagtgagccaagatcgcgccattgcacttcagtctgggcagcaagagcgaaactccgtctcaaaaaaagaaaaagaatattaagatgttagagtttttattaatt

SEQ ID NO: 915606 - DNA, 4001 bp, Homo sapiens
ctgaggcagagaggccactcccacaataggcaactgtccctttgcttctctcacttccccagctacctgcctcctccgcagccctgctacacagaacaggtgaaacaggaatgaaggtctcatccaagcaagggagaaaaaggataaactcttgtaacatcatcccagcagtccctgacatctgcattttcccaagagcactcacagttattagcatatttcaccatttattaagtcccccgtgccatgcaccctaaaagtgttcttaagcatcttctgttgcatttcgaccttacaactacccattttacaaatgacaaaacttaggctgggattttaagggatcaccagtaagcagtggagccaggagacaaccccagttctaatccagtccagtgcttcccaaactgtaatgtgcccatgaatcacctggggaaatggatgaataattagattctgattctgcggggctagactcaggcctaagctgctacacttgtaacaagctccaaagtagatggactaaactcttgagtgtcaagggctagattttaattctattaaggtagaacctgtgccactgaatctccaaggcttagcactggacctccccatagaatacactcaataattatgtactgaatgagtcaatgaatatctggcttaaaaccctatgcgttaacccttttctgtatcaagttccattgtatcagctgatcctcccaacaaattcctagggtatgatcattcccatttgatagataaggaaacagagactcacagtaagtaacctaaggctttacagcttttgcgcagccaaggctggaggtagtctaccttcagatcctttgacctaaccacagctgttccaaaagatacggcgggggagggggggacaatgacacccggggataacaattacagaccaccggttggagaggagctgacccatcccagcatgtgaccggctcacagctccagaggtcaccagagagctctgagctgctccctgggggaaggggcagccaggcctgtagcacctcaggagagaaacaggaaagggagaaggaggctggtcctgggcatagtgccaggcagcagtgggcaggtggtgaagggacccctgacctcccgggcccaagcacccgcttcgggaaccagctctggacagacactgtccagcttgcggggtgggagagttagaggcgttcaggaaaatcattgcctagcgatgaatcaccgggcacatgaccccgcaggggaggggaggggagggtgcggaaccggcgcgggaagcggtgggggcttggggagggcaagcctccggctcgggcccccctccagcctcgacttggggagcaaagggaagcccctctcccatgcagcacccctcctggcagcaccccgcctgcggcgaaactcacggccttcagctgctccagacggtccttcatcctgaagcccaggcgcccggaggcaggtagcgcgtcccaggtgagcgcgtcccaggtgagcgcttcccaggtgagctgccggaagcggcggccgggcccgccggggcgaaggagctggaggcgcaggcggcggcgggcggcggccgctagctaggaggagcgtccgaggccacgggagcctccgccgcgcagccccctccgcccccaccggcgcctcgcgctccaaatccggctcccgggccggcgccggcgcagcgctgatccgccctggacccgcccctacctggccgcgcccctcgctccttcttaaagggcccgcgtcccgccaccgcccggccgcccggggcgtctccaaagcccccttccctaacccgagagccctccagacacgcgtggagtccggggagaggcccctgcaccggcggatcctgccgcagggccgaggaagagcaagagcgactgtctggctgcggtcattcgctgtctgtgccgggctcctcgctaggatccagttcttagccgactccttgctaggcggggacaagctcccgaaaacaaataagacaatgtgatgtgggctacattgggtggcagtcgagtgttctaaaaatatcccgccaggaggaaggcattccgagtagcgggatcccgcgcagcctcagggctgctggcagtgaaagtggggggatggaggaggtgtccagaggaaagacctggagatctggagatacaggacggtcagggtggtcagagaatttggatcttttgcttgttggaaatcgggaccgctccgagaaacgtaagcagctcgatgttgttagtgccagtggagacacttggcactcacaatttgcagacgtttgggaaagcatcgtttctcaagaggaccccgttcccgtgtctgtaaatcagagatggtacccacttcgtagttcgctgtgaagcctgtgagcgaggaggggctttaaaatacagaactttgcactggagcgctccccgtcctcgcagcctgcttggtgtgcaggtggttcccaggcggcttctgcttccgaaaagcagatcgtccctttatctcgagtcttctccccgcctctccctcttctccctaccctatttgtcttcttgggaacaaatggcacattcatcagagtggagatccataaacgggactggcgagccgaagatttaattctgaagaataggatctgctctgtgctttcaggttaaaaagctgtaaatatctttgtaattctagcagtactttgccctcttctgccatctgaacgcgtgctccctgctgacctcatcggctcccataaagatacggtgcgtatggcagaggtcgggctttgagccggccccgcgggtctcggccgtagttctctctcgcgtccggcacacttccttctgcccgctgtgctcgctgggcaggttgtccccgccttagtaccaggagggcttccgcgccccctggtggtcatactaggaaaggcgagtagatcagaaatacacactgtcccacctccttcccctaacacatttttggggagtttgggggttgtttgtttgtttgtttgtttgtttgtttgttttttagacagagtctcattctgttgcgcaagttgagtgcagtggcgcgatcaccgctctctgcagcctcgatcccctgggcccaacccatcctcccatctcagcctcccaagtagctgggattacaggcgtgcgccactacgcccggctaatttttgtgtttttttcgtagagatagggtttcgccatgttgcccaggctggtctggaactcctgtattcaagccatccgcccgcctcggcctctcgaagggctgggattacaggcgtgcgccactgcgccctgccccttaacagatttttgttagtgggaatacgtagttccccgcgcttcaagaaaatagagtcttccgcgagaggccgagatatgaacaacccttcacgttaggaatctgaaaaggaccattggggtctggagtaaaaaattctctttccacagcaggaatcaagggtggcctgtctgcctctgctcagagggttcctgttacaggataattgttttgaaaagagtaaaatcatgactcctctacaaatataaaatgcacacacatcaaagactttaattcattaatgaatgaggagaccagtaaagctagccctgtccagaggaaaacacaaagtgtacacacatatataggcaatcaggaatgctgaaacgaacatgttaataaatgcacaactggccgggtgcagtggctcatgcctgtaatcccagcactgtgggaggctgaggcgggcagatcacttgaagttaggagttcaagaccagcctggccaacatcttgaaacctcatctctactaaaaatacaaaaaattagccgggcgtgatagtgcacgcctacaaatcccagctactcgggaggctgcggcagaagaatctctggaacctgggaagcagaggttgcagtgaactgagatcacaccactgcactccagcctggaccacagagcaaaact

SEQ ID NO: 915607 - DNA, 4001 bp, Homo sapiens
agaggaagagactgggcctcgctcagccttctaagtagctgggactacaggcacatgccaccacgtccagcttttttttttttttttcctgtagaaacagggtcttgctttgttgctcctgctggtctctaactcctggcctcaagtcatcctctggcctaggcctcccaaagtgctggaattacaggtatgagccaccacatccaaccctaagtgattttgatacaaattactgatctagggccaggtgtggtgtccagaccaacctgggcaacatagtgagacactgcctgtacgaaaaaattttaaaattagctgagtggtgcatccatgtagtcccagctgctcaggaggctgaggaaagaggatcccttgagtctaggagttcaagactgcaagtgagctatcatcacaccactacactccagcctgttgacagagttgaaaaacagatctcaaaacaaaacaaaaacaacaaattacttatctagaaaatgtccttaatcttacagagataaaaactaatatgtaactagattaactaattttctcatggttacagagcaaacttatggtagaagtatattggaaaattcaaggtgcatgtttctcagctaaaggctcttcctagaacttgttccttattcacaccaattatattgcagccaagtactctctgaagtactccctccagaatagcaatcctgccctccaaaggattcctcacaaaaaaaagtctaagtccttgcccctagttagccagccgacctcttctctgttgcttatagcagaccctacaggccccatccaagcctatcagttccatcaggtaccccccaaaattacttcggttaacagtggtggagcacagtccttcctagatttgagtaaggctcactcctcgccttttccactccaggtccttacctgacgggtctgcagcgacttgcaggcagacagaaactcctgggtccgatcccggcaggacatggtgtcgggagggggagggacgagggtcactggggggggcagaggggcgatgtcgctgctgctactgccagcagttgcaggggacaggacctgtgtctttgagagacccaggtagacaccctgatccgtgttcttagacccgtagcgtttccgcgggatcattgagacgcataacctcggactgttgtggaggggagagtgtcattccccaggcaacttctttacccaaactcccccgccccaccccaatcaacaaatccccgagccccttctgcacttctcgtggactttcgcgcccaggacgctcgcaaatcctggggcggaccagcagcggaaagggccccgcttttcccctgtcccaagtcgaacccgcttcagactcttcttccaacttggctctggcggccagagcgcgggccggggaccctgaagcagagacagggccagagccaaccccgtggtcctgagactccggcccggcccgtgtaactgccccgggccctaacccagccctttcgtttccgcggtttccttcggcccctccgggagggccagtgacggacctccaaagactgacacacttcggtgggcggagggggaaaacctctgggtgtttatttgaaacaggaagtcccaccccccgcccaaggtccgccttctggaagacttcaaccactcattagctaaggccgacgtctctctcaacagaggctttcctgattggacggcaaggaattcgctcacccggagccgggccggcaggacttgcccgctcgcccctgattcccttccccccgccagtcgtcgcccccgtaaaaccactgccccagagctgacacggcggccagatcccctcttaaagcgaatcttacctcccctctgccgcctgccgccgccgccacttccaatctcaccggccgtcactgcctcctccccgagcactgaagccgccgaaacccgaccaaagactggaagcggccacgtcacctacacgtaaccccacccccagtgacgagggggcggtcccacgcgtttcaagcccagcgacccgaaagacacgccccacacccaaacgcaagagcgatcccgccctcccattggctaaggcgccaccgtgaccccgccccagagtactacagcaggcgctcagggggctgggcccgcctccgggaaggagccttaaagaaccagctgcccggtggtgtccgcgcccagtcccccagagtggtcgtgcaggtatacgttagaaattttattctctggaggttggggcggactgagagcaggtctggggtcatcccttctccggctcctcctggttgccttctcggatcggactctcctgcttccgaatctggtctggttgcctcttgcttggccgcgaggagccccgacgaccgaacgtggatagtcgccgccacagcacggtaatcagaaggctttcgttcgacttgtgattcggatggtccggggagttcaagtcgatatcttcggcgcctgaggggacgacgaggcctctgagctcacccctaccctcgggaagccccctctcacactccctgggccctctttgtgtgtctgtggtctcatcttccctgccgtcctcagactcttcctccttggactgctcatcagacatctcaaagtccttgtcttggcagcagcccatggccccgcgtggccctggactccgtgccacccacgccagcctgcctgcctccaggcccggcttttgtgacatcagatatcccgtcgccccagctcaggcagcccccaccccaagctacccctcattcctttctcccatcacaaaaggctcagggtcatggtgggtgttcagcagtttatttacaaagtgggcacaggggcgtcaggggctggtggacccaggccgcttcttctttctccgtctcgtttggagagctccttggggctgctccaaacccgagagcttccgcttggcagctgcctccaaggatgcccaaagttcatctgtctctgtgtcttctaggggcaccttgttgggttcttgaggctcttggggctcatcctggtgagtgggaagaaagcttaggagtcaggggggccgggcacggtggctcccacctgtaatctcagcactttgggagaccaaggcaggaggattgcttgagcccaggacttagcgaccagactgggcaacataaggagaccccatctccacaaaaagaagtttaaaaaaaaaaaaaaaaaaaaaaaaaaagaaaagtagtcaggggcacagggacaaacccacagggaaggagaccctggctgagaaagaatccctctgggtaccaccacctttattccctgctcctagaaagcaaccccatccatgctgttggcaataaccctctcaggattttaactgttaatgcctctcagagaaattaagtgaccaggcaggtaaacagatagtcccaagtctgcattccagctgcctccttttcctctccatagggaggtcctcacatctatgcccttggctcccacattcccgggcccaactgctcacctcccagttgtccctgcctgacaagaggaggcagttcaattgagacttgagataaacctgcaaaagatgagggaccttaaggagccaggcatgctgagacagaaacatgaacggagggcacaggaggcggggcctccacaagaccatgagttggaggtgggagagacaacttaccttatgctccagaccccgtggattctggatcctgtgtatcctcaagactctgtccaagccacaggaggctagtagaggctttgaagggtggcactgcaacccacgcacactgcctgccagccccttcagacagcccagtagacgccctagagaaggggggaagcatccgtgataactggctggccaataaccaaccattcattgtttcctgttccaatcactttccatttcaacatttaatctgcaacaaaaccctgagactggagcttctactaatatttccatttcgcaggtgaggaaa

SEQ ID NO: 915608 - DNA, 4001 bp, Homo sapiens
aataaaggcgcgagagcacttggaaatgatcatggataaagaatcaagccctaccctactctcttattgaagaaatatctaccatattcccttcactctccagctcagtttttaaaatataattatgtttgtaaacaacattaaagtggatttattttgaaaaactaatacaaactattaagcttgacaacttggagattaataaattaacccattcattaagggtctatgagcacctactctgtacctgcccgtgggcggacgagataacaagagactcaaaaactcacgagtaaccaccccaacggctgtgtgtgtgaaggtttcaccaggaagcaacattctcacggggcctttctgaaggacaagagtgtacggggtggagaaaaggggtggaggaatgccgggcagggcacggccgacagggaccaggtatgggaagctattggagccagagcttgggagagggaccagaatgtcgaatgtttagagattacaaagtgaaaaatgggctggagttcccacacaagccgggattagagcgtttgtggactctaacctgggaatataaggcgctccaagagggacagggccacacctctggttcaaattgctaaaccttcagatacacaataaatctgtatttacagcaagcggcaatttatgtatttcaacatgcacacattatctgtaattatttcaggtaaaaatggtttcctcctcttttgaaaatacttctttttactactaattatcaatattataggcgtgttctcaatattaaagactaaaggaaaaaagttatagctggcaactgcttcctctaaagatcctacacagcaaagttcagacctgtatggccatcctcaactacactttatatcaaactggtttaaatcgaaaaaggtccacatcacaaagaaccacaatcaatcaaattaattcacctgccctctattctaaggaaaactccccccactccaggtaaatttcatttggcaaattcttaaaaattaacttcaaagaacacatgttcacctccccagtattccgaaagttccaccacttaataaatcgttaagttactgttccagacccgggtccaataaacccaaatagactgaatttctcagcacccaacttgtttctatcttaatccagcaagttgcatcgagttgtcattgttcctccttccaaggcggaggtgacaacggtgcacatcatccgcgaatacgtggaaggacagacacacaccaggggacgcagggagagcggataaagcacaaaggggacgcagcggccgcggggtcgccgggccacggccaggggcgccgtcggggaggagggtgggctgcaggacgagctcgggagggctccgaaatgcgctcgggccaaaacaaaaacaaaaagttcagcgcggcagtgggagcagattgggcgagacggttcacggctgcccattggagaaaagggaaaacagagtcccccaatcgcgagcggcggggctgctcccctcgtgcggccgcgggcccggccccgacgctgcccggcggccgctaccgctcccttccggccgcggccaccactgcaggccccgcgccggccccgcaccggcccggccgcagccccgccccccgcgcccggccgcttgcgcccggccccggccccacccgccctggccccggagccctgcgaccggcctgggcccgcggtcccccacgtccctgcccgccccgtcaccgaggccgccccccgcacaccctcgccggcgcccgcccctcccccgactcaccgcctgcgccgccccgctcctcctcggggcgcgtcccaggccccgctgcccggccgctgcgatgcggggccgcgccgccgggccccgcgtcccagtcccccccagaaaattaatcaccaaaaataattccagagaaaaatggagagtaaaatccaagatggcggcgcgggccgcagcaccgctcgctccctccgctgacgggaaaaatgagtccccgcagcgtccgagccccccgcccccaaccggccgccgccgccgccgtcgcgccccccgcgcccccggcctcggctcgctgcgcccccggcgcccgcccccgcgccccgccacccggggcctcacctcgcctcgcgcacggccgcccgtacgaaaaccgtccgccggcttcaggactccgcgtcccaggtccgtgcgccgcgcggtgccgcctccggttcccgggcgtcctcacctcatcgccccgctgccctgccgcccgcaccgccgccgcgtcgccgcccccggtgagccgcctggaccccgcccgggcacggtggaaggatacgaaaagaaggccgcggcctcgacggcggagggacaccgtgcggcgcagctgccacagtgtgcgcgcgcctcccgccaggcccagccgccgcggcgcttccacggggctctgtgcgggacgcgggcacgcgcggggagcgagttctgtgccgggcgctcccgacggcggagggacaaagggcgattcagagcgagccgtcgcctcccctcgtggcggagggattcgcggccggccggtaggcggctgggatccctccgccctcgctgccctttaaatcgcggctgaggcggcgtcgcccgcgccccgcgggcgccacgttagggtcccctgcggcccttacgcgaccgcattccggtcccggtccccgcgggaccgcggcagctgtcccgggccctgggtctttgcacacctgcccctaccagggacggctctagagccagcctctcggactgcagccctggggaaggggacccccccccctcccgccgcgcgtcccagttgctccgagggaggtggccccgggcagacgagcgtttttgttgtgggaatgggggtcactggcagcagatgcaccctaagaccgtgtgggcaggctgagcgttcctgcgcggagcatgcgagggaggaggagagcgggcgcgccttggcctggccccccgcgggccccgccgcccccagcacccactatgtgccccgcgccgtgctccgctccactccgggtgtgccctgcgcgctggccgtgcgatccctcctcggggatcccgggctggcggggagatcctgagggaccgggccgcctgcgagccggggagctgcgaagcttgcctgggcatcgatcttgtagtccagacaacagaacgatgagcgcgctcccggcccctgcggggctgcccagggtctccgcgcatcctccctctcacgcgtcaggacgacccccggaggtgggggccatgtgggtgccactttacacctagggaaactgaggcacagggagttccgtgacctctatgacaactagtcagggcttgagccagagccctctttcagcattcgggtgaaaaatgcagaataaatcaggaagcgggtgcggaggacctccaagaagttgaggttggcataggcgtgcacatgcctggaacttggtgccggcaggtgcccaaggaagcgcagacctggagtgtgaattggagcgtgttggggaaagggggtgcctaggatatgggcgggtagtgggaccagccagtgtcaaagccctgggaggggagagaggctgcccttgccacagagaggaggcgggcagggcaggcagctcagtcagatgccaggaagagccgcagcctgccttagttttcccctgcggctccagggccatcatcctccacaaaggatgatgaatcgaggctgtggacgaccacccaacacaagaactggactaagtccaagtaacactgacgcacagcgcctccctcgtttgccctcattctcgaccttgactttggctggtagacatgatgctcattaccgccttccacagagggaaactgaggcacggtgactcgctgagggcacatggctgacggaggcagaagcgggtctcatcttcaaaacagagctcctcccactgccttcacctgccctatcagcagcttcctccttttggaggccgat

SEQ ID NO: 915609 - DNA, 4001 bp, Homo sapiens
accaggtatgggaagctattggagccagagcttgggagagggaccagaatgtcgaatgtttagagattacaaagtgaaaaatgggctggagttcccacacaagccgggattagagcgtttgtggactctaacctgggaatataaggcgctccaagagggacagggccacacctctggttcaaattgctaaaccttcagatacacaataaatctgtatttacagcaagcggcaatttatgtatttcaacatgcacacattatctgtaattatttcaggtaaaaatggtttcctcctcttttgaaaatacttctttttactactaattatcaatattataggcgtgttctcaatattaaagactaaaggaaaaaagttatagctggcaactgcttcctctaaagatcctacacagcaaagttcagacctgtatggccatcctcaactacactttatatcaaactggtttaaatcgaaaaaggtccacatcacaaagaaccacaatcaatcaaattaattcacctgccctctattctaaggaaaactccccccactccaggtaaatttcatttggcaaattcttaaaaattaacttcaaagaacacatgttcacctccccagtattccgaaagttccaccacttaataaatcgttaagttactgttccagacccgggtccaataaacccaaatagactgaatttctcagcacccaacttgtttctatcttaatccagcaagttgcatcgagttgtcattgttcctccttccaaggcggaggtgacaacggtgcacatcatccgcgaatacgtggaaggacagacacacaccaggggacgcagggagagcggataaagcacaaaggggacgcagcggccgcggggtcgccgggccacggccaggggcgccgtcggggaggagggtgggctgcaggacgagctcgggagggctccgaaatgcgctcgggccaaaacaaaaacaaaaagttcagcgcggcagtgggagcagattgggcgagacggttcacggctgcccattggagaaaagggaaaacagagtcccccaatcgcgagcggcggggctgctcccctcgtgcggccgcgggcccggccccgacgctgcccggcggccgctaccgctcccttccggccgcggccaccactgcaggccccgcgccggccccgcaccggcccggccgcagccccgccccccgcgcccggccgcttgcgcccggccccggccccacccgccctggccccggagccctgcgaccggcctgggcccgcggtcccccacgtccctgcccgccccgtcaccgaggccgccccccgcacaccctcgccggcgcccgcccctcccccgactcaccgcctgcgccgccccgctcctcctcggggcgcgtcccaggccccgctgcccggccgctgcgatgcggggccgcgccgccgggccccgcgtcccagtcccccccagaaaattaatcaccaaaaataattccagagaaaaatggagagtaaaatccaagatggcggcgcgggccgcagcaccgctcgctccctccgctgacgggaaaaatgagtccccgcagcgtccgagccccccgcccccaaccggccgccgccgccgccgtcgcgccccccgcgcccccggcctcggctcgctgcgcccccggcgcccgcccccgcgccccgccacccggggcctcacctcgcctcgcgcacggccgcccgtacgaaaaccgtccgccggcttcaggactccgcgtcccaggtccgtgcgccgcgcggtgccgcctccggttcccgggcgtcctcacctcatcgccccgctgccctgccgcccgcaccgccgccgcgtcgccgcccccggtgagccgcctggaccccgcccgggcacggtggaaggatacgaaaagaaggccgcggcctcgacggcggagggacaccgtgcggcgcagctgccacagtgtgcgcgcgcctcccgccaggcccagccgccgcggcgcttccacggggctctgtgcgggacgcgggcacgcgcggggagcgagttctgtgccgggcgctcccgacggcggagggacaaagggcgattcagagcgagccgtcgcctcccctcgtggcggagggattcgcggccggccggtaggcggctgggatccctccgccctcgctgccctttaaatcgcggctgaggcggcgtcgcccgcgccccgcgggcgccacgttagggtcccctgcggcccttacgcgaccgcattccggtcccggtccccgcgggaccgcggcagctgtcccgggccctgggtctttgcacacctgcccctaccagggacggctctagagccagcctctcggactgcagccctggggaaggggacccccccccctcccgccgcgcgtcccagttgctccgagggaggtggccccgggcagacgagcgtttttgttgtgggaatgggggtcactggcagcagatgcaccctaagaccgtgtgggcaggctgagcgttcctgcgcggagcatgcgagggaggaggagagcgggcgcgccttggcctggccccccgcgggccccgccgcccccagcacccactatgtgccccgcgccgtgctccgctccactccgggtgtgccctgcgcgctggccgtgcgatccctcctcggggatcccgggctggcggggagatcctgagggaccgggccgcctgcgagccggggagctgcgaagcttgcctgggcatcgatcttgtagtccagacaacagaacgatgagcgcgctcccggcccctgcggggctgcccagggtctccgcgcatcctccctctcacgcgtcaggacgacccccggaggtgggggccatgtgggtgccactttacacctagggaaactgaggcacagggagttccgtgacctctatgacaactagtcagggcttgagccagagccctctttcagcattcgggtgaaaaatgcagaataaatcaggaagcgggtgcggaggacctccaagaagttgaggttggcataggcgtgcacatgcctggaacttggtgccggcaggtgcccaaggaagcgcagacctggagtgtgaattggagcgtgttggggaaagggggtgcctaggatatgggcgggtagtgggaccagccagtgtcaaagccctgggaggggagagaggctgcccttgccacagagaggaggcgggcagggcaggcagctcagtcagatgccaggaagagccgcagcctgccttagttttcccctgcggctccagggccatcatcctccacaaaggatgatgaatcgaggctgtggacgaccacccaacacaagaactggactaagtccaagtaacactgacgcacagcgcctccctcgtttgccctcattctcgaccttgactttggctggtagacatgatgctcattaccgccttccacagagggaaactgaggcacggtgactcgctgagggcacatggctgacggaggcagaagcgggtctcatcttcaaaacagagctcctcccactgccttcacctgccctatcagcagcttcctccttttggaggccgattcgggtgtgggcggtgggcacagcccaagcacttctcctgtctgccctttcactaaaagcagcgtcatctgtggcagcagaatccactctgccacgttcgtctttgcagacgcaactaacaaatgattgctttggtgttcttggtttctggtttatcagaaactttccaagattttcgtagtgcctggctccaaatactcaacttgcaccccagaaacactgagcctgcctttgccacccaccaccaccgaatgcctatgggaggcgagctcactaggggaataccatctgcctctaagtcgaccttggtctcaggtcccaagtccagctatgcctgagcagccctccagagcccccaaagccgatgtcctgcccactcccagctttccagagcccaccccagcatagaggtgctctccatgtgccc

SEQ ID NO: 915610 - DNA, 4001 bp, Homo sapiens
gttcagggtgtttgggaaagcagatgaaaataaaggcgcgagagcacttggaaatgatcatggataaagaatcaagccctaccctactctcttattgaagaaatatctaccatattcccttcactctccagctcagtttttaaaatataattatgtttgtaaacaacattaaagtggatttattttgaaaaactaatacaaactattaagcttgacaacttggagattaataaattaacccattcattaagggtctatgagcacctactctgtacctgcccgtgggcggacgagataacaagagactcaaaaactcacgagtaaccaccccaacggctgtgtgtgtgaaggtttcaccaggaagcaacattctcacggggcctttctgaaggacaagagtgtacggggtggagaaaaggggtggaggaatgccgggcagggcacggccgacagggaccaggtatgggaagctattggagccagagcttgggagagggaccagaatgtcgaatgtttagagattacaaagtgaaaaatgggctggagttcccacacaagccgggattagagcgtttgtggactctaacctgggaatataaggcgctccaagagggacagggccacacctctggttcaaattgctaaaccttcagatacacaataaatctgtatttacagcaagcggcaatttatgtatttcaacatgcacacattatctgtaattatttcaggtaaaaatggtttcctcctcttttgaaaatacttctttttactactaattatcaatattataggcgtgttctcaatattaaagactaaaggaaaaaagttatagctggcaactgcttcctctaaagatcctacacagcaaagttcagacctgtatggccatcctcaactacactttatatcaaactggtttaaatcgaaaaaggtccacatcacaaagaaccacaatcaatcaaattaattcacctgccctctattctaaggaaaactccccccactccaggtaaatttcatttggcaaattcttaaaaattaacttcaaagaacacatgttcacctccccagtattccgaaagttccaccacttaataaatcgttaagttactgttccagacccgggtccaataaacccaaatagactgaatttctcagcacccaacttgtttctatcttaatccagcaagttgcatcgagttgtcattgttcctccttccaaggcggaggtgacaacggtgcacatcatccgcgaatacgtggaaggacagacacacaccaggggacgcagggagagcggataaagcacaaaggggacgcagcggccgcggggtcgccgggccacggccaggggcgccgtcggggaggagggtgggctgcaggacgagctcgggagggctccgaaatgcgctcgggccaaaacaaaaacaaaaagttcagcgcggcagtgggagcagattgggcgagacggttcacggctgcccattggagaaaagggaaaacagagtcccccaatcgcgagcggcggggctgctcccctcgtgcggccgcgggcccggccccgacgctgcccggcggccgctaccgctcccttccggccgcggccaccactgcaggccccgcgccggccccgcaccggcccggccgcagccccgccccccgcgcccggccgcttgcgcccggccccggccccacccgccctggccccggagccctgcgaccggcctgggcccgcggtcccccacgtccctgcccgccccgtcaccgaggccgccccccgcacaccctcgccggcgcccgcccctcccccgactcaccgcctgcgccgccccgctcctcctcggggcgcgtcccaggccccgctgcccggccgctgcgatgcggggccgcgccgccgggccccgcgtcccagtcccccccagaaaattaatcaccaaaaataattccagagaaaaatggagagtaaaatccaagatggcggcgcgggccgcagcaccgctcgctccctccgctgacgggaaaaatgagtccccgcagcgtccgagccccccgcccccaaccggccgccgccgccgccgtcgcgccccccgcgcccccggcctcggctcgctgcgcccccggcgcccgcccccgcgccccgccacccggggcctcacctcgcctcgcgcacggccgcccgtacgaaaaccgtccgccggcttcaggactccgcgtcccaggtccgtgcgccgcgcggtgccgcctccggttcccgggcgtcctcacctcatcgccccgctgccctgccgcccgcaccgccgccgcgtcgccgcccccggtgagccgcctggaccccgcccgggcacggtggaaggatacgaaaagaaggccgcggcctcgacggcggagggacaccgtgcggcgcagctgccacagtgtgcgcgcgcctcccgccaggcccagccgccgcggcgcttccacggggctctgtgcgggacgcgggcacgcgcggggagcgagttctgtgccgggcgctcccgacggcggagggacaaagggcgattcagagcgagccgtcgcctcccctcgtggcggagggattcgcggccggccggtaggcggctgggatccctccgccctcgctgccctttaaatcgcggctgaggcggcgtcgcccgcgccccgcgggcgccacgttagggtcccctgcggcccttacgcgaccgcattccggtcccggtccccgcgggaccgcggcagctgtcccgggccctgggtctttgcacacctgcccctaccagggacggctctagagccagcctctcggactgcagccctggggaaggggacccccccccctcccgccgcgcgtcccagttgctccgagggaggtggccccgggcagacgagcgtttttgttgtgggaatgggggtcactggcagcagatgcaccctaagaccgtgtgggcaggctgagcgttcctgcgcggagcatgcgagggaggaggagagcgggcgcgccttggcctggccccccgcgggccccgccgcccccagcacccactatgtgccccgcgccgtgctccgctccactccgggtgtgccctgcgcgctggccgtgcgatccctcctcggggatcccgggctggcggggagatcctgagggaccgggccgcctgcgagccggggagctgcgaagcttgcctgggcatcgatcttgtagtccagacaacagaacgatgagcgcgctcccggcccctgcggggctgcccagggtctccgcgcatcctccctctcacgcgtcaggacgacccccggaggtgggggccatgtgggtgccactttacacctagggaaactgaggcacagggagttccgtgacctctatgacaactagtcagggcttgagccagagccctctttcagcattcgggtgaaaaatgcagaataaatcaggaagcgggtgcggaggacctccaagaagttgaggttggcataggcgtgcacatgcctggaacttggtgccggcaggtgcccaaggaagcgcagacctggagtgtgaattggagcgtgttggggaaagggggtgcctaggatatgggcgggtagtgggaccagccagtgtcaaagccctgggaggggagagaggctgcccttgccacagagaggaggcgggcagggcaggcagctcagtcagatgccaggaagagccgcagcctgccttagttttcccctgcggctccagggccatcatcctccacaaaggatgatgaatcgaggctgtggacgaccacccaacacaagaactggactaagtccaagtaacactgacgcacagcgcctccctcgtttgccctcattctcgaccttgactttggctggtagacatgatgctcattaccgccttccacagagggaaactgaggcacggtgactcgctgagggcacatggctgacggaggcagaagcgggtctcatcttcaaaacagagctcctcccactgccttcacctgccctat

SEQ ID NO: 915611 - DNA, 4001 bp, Homo sapiens
ctctctgcagcctctgcaagctttgctcttttctcttcctaaataaatgtgtaaaaatatgtattaaaataacaaacattattattaataaattattcacatttatttcataggcactataacaatttacaaaaatattcggtactggccctaaatgtcccacaaagaatgccactactcaactttttgaatttcattctcctaatcaatatgccttcaaatcagcacatgctaaaacagatacaaggtttacctatataatcatttatttactctcttttttaataaaaaggcctacaagctagtcagggcaataacaaaacaaataatgtttacaaatacaaaaaggaaaatacatggtttgttactgccggttaaaatggagtctgaagtaacctggtgtttttaggaaaggttaataaatgaagtgggctaatctcagtgtgtaggagggaaggactggagtaatttcatgagaggtattgttccatatcagaaaacagtgaatgctatttttctagaccatgtactacttattataaagccctttttctaggtgctgggatacaacagtgtaaaaacatagataaatgtctcctcccaaatgaaacaaattccaattgcgggcgcacagacaaatataatgaagtaagtaaacgtctgtcagatggcatggcagataagtaatgggagaatgggtgggtggtattgtggggaatatattttgtttaacgtggtcagcaaaagcttcactggtaaagtgacatccaagcagtgagccgtgtggttatcaagggaagagggtatagtatgaggatgggggggagggcttaacaaatctgacatgttatattttatcgacagccagaacaacaaaatcaacttaatttaaaacaacagcagcaacaaagagaagctgaactttcccacatcaaatttataagtactaaatttttagtatctatagtagctgaagagttaatgtacttcccaaaaatacttcattttcttcaactaatttttagctagagaagagaaacaggtttatgttaactccctgtaaggagtactaatgtaaagatactgttaacagaaagctacaaaaagtgtacatgtattgtaccacacacccactagctacatttgaatttcagataagcaatgagtaatgtttttgtagaactagatccctaatattgcatggcacaaaacgatattataaacgtattccttgtatatctgaaattcgaatgtaactgggtgtccagtatttttattaaatacgacattataaattggacactctgtactacatattcttttaaagggagaacgtaaaagaatgagataaatactaaaaagaaatcattaaaaaaacatatccgataaagctcaggcgtataagcgactttccgagcaccttcttttaaaagatggtagacacagttgaaaacgcacatctcctagacgactaaagagctcccggagaaagcaatgtcttttcgcgccgaattccatctaccacatcccccggaatgtcccacgcgtaacgccctctgcgtgcgccggcgccctatgaagatccggcgcagctaaagtcagtggaaggtagaaagacgccacagccgcctttcgacaactttttgttacaaaagtggagatctacacggaggcgacggcctaggtcgctctgacaggacccaacgaccctcctgacgcgtccacccgtcctcgctagcagggtcccccagcgggctctcgacctgcgccaccaggtacaatggctcggcccgccccgcaacccgaggacaggtgctcaaggcgcggcccggcggacgcagggacctgctctactcaccaggtccggcgtgggaggcgcggactccccgggacaaggaaaacacagccccatagggacgacagcttgagaaccctgaccgggtccggcccaggccaggcggcgctaactgcgcggtccggagccggtccctggtcctccgcgcttgccccgcccccaccgccctccactggctcggctccgccccagcggcaacgccccgcccccaccccgcagctctgccccgcctcgcctctctgcggcaacgcccccctcttctcgcgacaccaaccagtcccacagctcagctgcgcccccttaaggcattgccccttcctcacccacagctccgcctacccccgccccgcgaccgctgggcttgtggccaaagcctaggttccaggaaacacctgctgtgggtagcaatgcagggaagggatggaaaagcttcgctacggttccaaagctcttcctgctaaccttgccttaccatttataaatgaatgagtggtacagctctgggtagttcatgctacctttttttatgagatgggactctggtgtcctagaaattaaagccaaaattccaagtaaacatcagcacccttttctcccttcttagtgacagtgctattccagaacagagggcagaatataaaatccattattatgacgatgaatctagcgtcataaatgtggcattagttgacatttccactagtttctggtatttagaagtcatttatccttccgagagaaataataaagtttcatctactgagaaatgttttaatgattctcctcaaattttaataagtatgagaatcagctgggcaactagttaaaatttacttgctgatttagtaagtataaggtgggacctgagattcatttccagtaaacccacaggtgatactaaagttactgatctcgtctccacacaaatgcttttattttattttattttatttttgcattctattagttatttctgcttatgtaaaaattttcaaacattacaaaaaggtaggatgtatagtgacagcgtctcagaaaccattgtcggctttttgatatacttgctggttaattttttatagatgtataatttacatataatattatgcacttattttgattgtagagttcactgagttttaacaaacatgtgatcaccacattcaagatatgtaagttttccatcacccaaaaaccttctattgtacccaatcccattcaatactttatcctatacctagatccaggaaactattaatttgtttaatatcactttagtctttaagttttgcataaatgttaatatcactatagtctttaagttttacataaatgaaatatacaatatgttttgcaaaagccataatattttctaaattcttccatgttattgaatgaaacagtagtttattccttaaataataggggatgatgcttttttaatactattattcgattgcatgggccgtttctaagggtaaataaaaatatataaagaaaaagtgaaggttctctgttgcaaaaagagaaagataactacccacctcctctttagcattgtgtttagaaaacgtgaaattgtaagcgctatctctgtctcactgaaatgtatgaaaaaaaaaaaaaggccaggcatggtggcttactcctgtacttttggaggccaaggtgggtggatcacctgaggtcaggagtttaagaccagcctgaccaacgtggggaaaccctttctctattaaaaatacaaaacttcgccaggcatggtggtgggcgcctgtaatcccagctactccggaggctgagcagggagaatcgtttgaacccgggaggcggaggttgcagtgagccgagctcgcgccactgcactccagcctgcacaacagagagagattgcgtcgaaagaaaagaaagagaggaggggaggggaggggaggggagggcaggggaggctaaataagcctcttgccagttttgcatcagaaagaaagaacctaaataagcctcttgccagttttgtatcctcagaatatctttggaggcctattggctttctcttagaaatgaaaacatcccagagtggcacctgtctccccgtcttcatggtagtttactgtctaggcacttggcttcaagatggagctttctg

SEQ ID NO: 915612 - DNA, 4001 bp, Homo sapiens
gcatattcaaataatcccaaagatggaagaaaaagagaggaaaaaaaaaaagcagaaaccaaattataataaaatggtagccctaaatcaaaccatatcaataattacattaaatgtaaatggcctaaatataccaattaaaagacagagattgtcagaatgaataaaaaaaaagacccagctacatctatttattaaaaacttactttaaataaaatggcataggtaagttaaaagtaaaaataaaagtaaaatgtagacctactcataactcccccgaactggaaataacacaaattctcacagatgcatggctaaaaactaccatacatccatgcaatagaatattacttagcaatttaaaaaattattggtacacacaacaaaatggattaatctctaaggcattatgctgggtaaaagaaatcagtttcaacagttacaaactatatgactccatttacatggcacttcggaaaaggtaaaactatagcaattaggaaagatcaatggttgccgacagttggggtggaggcagggcaacatcagggagttttttaggatgatggaactgaggaagccatggttgtggtgatagttatataaatctatacatatgttgaaatttatagaactgtacaccaaaagtcaattttactgtatgttaatatttaaaaatgaagtaaaataaaaattacgtggatgatctccatggacccttccagactatgattctatcagtgagaaaaagaaaggagaggcaaaaggaagacaaggagaatgttaagtcctactggcataaaagccactactcagaagaacgggattactgtacaaaaatatacaaaacaaacccaatcttcagaatttattcccagaaggggctaagaaaaccggacattcggatctaaaatatgtatatttttaaatgcctatgaatagcttttcttgtctgtttctatatttttttactttgaagaagctgccaatttctgctggcttaatgccaatttcgctgcttggggttactcaatttacaagcatccctttatttataccctatactctagggtctccggcagtcacaataacgactctgaaaaagcagtcgcttttgcagggtgccagaaagatcagcgctcctcacccggaactaaggtccctgtgggacacagtacaccccgtccactagttccaaacttaaaagacgctgggcggaaggtcttcccaagtcaaaaagcctcccaaaggagaaggaccctggaggccgggcttcggggcatttctgcgtctccggactgccctgtcgcctccggggcagctagccgttttgaggactgtcctggtgtggggctgtgggctgcagaaggttctgcccagcgaccttgggcaagtcccttcctctcctggagtaagaggaaaattctgggaaggctgtgtaagggagcttcccattgccgcctcagaatccactttctgccccccgctctccaacgccaagaaggaatcacacttggccctccagacttcaccccagccttatgcccgccacccttcccagtccctgggagacccgcgggaactaacacatccaaccgagggcatggcccgaaggcaagggggaggcagtaaacaccaaatcccggtctcagacccactccgccccaagcgggcctaccgggcgcattccgacccgccccgccctgcggtcacggcccgccaggtcccgcttccacccaagggaagtacagagcgcgccggggagggtcgggtggggggccgggtcaggaggcgcccaccttgagctgggacttggagaccttgccgctgtggtcctggtcgagtgcggtgaaggcgtgccagatggctttgagcagctcctccttcaagctccccatggccgcggccctgctgccccgccaacccctcctgcccagccagcccctccgcgcctcggacgcccctcaacctccgcagccacagcccgccgcgcagtcacctgacccgccaggccccgcccccgccaggccccgccctgctgccggcgccggtccagtgccgcgcccacagccgccagagtgtgggttctgcgagtcaagccacgcctggtggcaagaatgcttggccttcagtgtcagccaggacggtaaacacatctccctaatgtttcccagaccagttcgggccattttgggtgctcgagtacaacacctcacacaaatgaccgcgtcttgaggaaaaacccgagagattaggtgagcagcctacccgcctcctcccagcgccccgcagtgaaaaagggatccctggtcctgtcctgggaacggagtcactgtctgagaaggccagagaagaccccgaaaagtccccagaccaggactgaaatgatagcgcagtcccaagtcggggagatgcagggcggcggggaggcaggaaggacctcgagggaagtttgttggttcatttcgcaaaagtttattcatgcatactctatcttgggttctagggacacagcgacgacgtttaaggggagtttagaagtcagggtcaggcagcattttcttcctaacgcctagctgttgttcaattcacatcttaggaggggtttgacctgggtaatacctctctgtagtgtttctctgcttgcagaataggagatctgggccaattccaaatcactccacccattttactaatccaaagagatggaccatttaaaagaacgtattcggccaggcgtggtggctcacgcctgtaatcccagccctttgggaggccaaggcgggcggatcacctgaggtcgggggttcgagaccagcctgaccaacatgaagaaaccccgtctctactaaaaatacaaaattagccgggcgtggtggcacatgcctgtaatctcagctactcgggaggctgaggcaggagaatcgcttgaacccggtaggcggaggttgcagtgaaccaagatcgcgccattgcactccagcctgggcaacaagagtgaaactccgtctcaaaaaaaaaaaaaaaagtattcgattgcagctgttgaattaatatctgttcgcggtggtcacaatggtcacttgatctctttgggcttcaaattatcccgtataaaaagagcagggttgcaccagatgttctggaagggttcttgcagtactagcatcctaggataataactattgccggttaactaaggtctgattaaatcgccaggctcagtacctctcctctccaatcctggactaattggagagaacaataaacaccaagagtttttaaaatgaggtggttctcagatgaagtttggttttgttttgcttttttaagttccttaatgcacatgtttgccttattaagaaaggaaaagatcttcataagaaagggatatttggaaagagaagaacaagaaggagcctcttcagtgagtttgagatcaaaaaggaactggtggggaagaggagaggatggccccactgacgaaagaaggggcaggagcaaaagggtggccagcccctcactgtgactgtcctgaaggttctaccccatttcatcaccatttgtcaggacttttcttgccctaccagaatccaatttctatcatttatcttccccatttccagcccaagtctgccagtcagcaaaaccacatggtttaacctctgatttattcatgcgaagtcagcttaccctgagtagcaaaaaaaaaaaaaaaagaagaagaagaaaaaagaaacgaagaaaacctcctaattctcaaggttcagtttaaccactatatgacccttcttctctctcagtatctggaagtaccaaacatatttcaaagccttttttttatgacaagaccaggacattgtggacttccaaattcctacttctcccatcatcctcattcatacaatccaaacgcattttttttctttttttttcttttcttttttttttgagacagagtctcactctgttgcccaggctggagtgcaacggtatgatct

SEQ ID NO: 915613 - DNA, 4001 bp, Homo sapiens
tcctgctgccatcccccaaacagcccacagaaaccgcaggacagactggctgggaggtgctggctggcatttattgggcacctactgtgtgacttgccctgtgttatctcagcaccgcagccctctgagggggctgctaccctgctccttgtactggagaggaaactgaggtgcagtgtgggcagcgctgccagcctacagatgtgttttatttgtcagtcagtcaccagagctgacaagtggcagagtccgggtttgaaacccaggctgggagcccccactctgcagagctgcttaggaaagctttcagacttcagagtagggaggctgggggcttggggacttgtcctaacccttcttcacactggctgtggtaacttcggtgggtctcctgccctctctgagcctcaatttccccatttctaataggaagcactattgctgctgctctctaaaactgtcatcccctgacggggagaaggagctgacattccatggtgcagctttcccaggcttttgggaatggaggagggtgcacacagtctctctgcagcccctggaagagagctcccaggatggccagctcagggccttccacccacaggccaggctcccggccccccacctccctcccccaacttcagcccaaatctacagccttgaggccctgagtctgggcaagcttcctcccctgccccgccatacccctctcctaagctctggaaagccccccactcaggctggtgccaccggcggctgagggtcatatctggctcttcacacggccagggcctcctcgggctggggtgcaacgttcccctccagattgggacggttcctgcagacccagcgctcctgcctcgggaacctccagggtgtatggggaccggagtgtcgggagggggtgcgaagccagagcagggacagtgaggacagtcagggcgctgaatgcgaaagtgaggggcgtgtgtgcagcgtgggcgcggggaggcgtgtaaatggccgggtgagccgcgtgtgtgcacatgcggggcgtgcgatgcgatgcgcactgcgcggagtggccgggccgggtaagggcgcccagcgtgcgcggtgcccggcattcgttcgtgtgcaagcgcggcgcggaggtgcaggagcgcggagtgcgcggggctctggggtcccgggcccagggcccgaggagggggctgcgtgcgtccgcgatcagggtgcgatcccggccgcgcacgggggtcggcggggtgcgtactcacccgggctccgcggaggggccgccgctccggctgggctccagctgccggcccgcctcccgcagcgcgcacgcacctgcgcctagcccggccgccggcggcaacgccacccctgcagtgtcgccgggctcccgcctccgaggagcgcggcgcgggccgggggctcggccgggccggggcggcggaccggagctgcgccgcagtccgggcacgctcccaggagcccgccgcgcgctccctcgcgctcgcccgcttgcccgcccgctccctcttgaatttaaagtgacaagctcgagcgctgtctctgctcctggggtccgagccggagatccccaagcgcgtccgggatccagggacgccctgaggccaagcccaacccctcgctcccacgcctggggacaggggtgggtggggacgtgcccacaggcctctgagaggcaggccaagcactggactcagagccagccggcctgggttctagccccagcctccgcgccctgggttatcctgttctctttctaggcctcagtttctttaccttaaaaacggacccgatactgcgcacctccgggagccaaggaaaacagcgacaggaggcgcagcggaaagtttccccttttctgaatggataattactccctcccaccacgattgagctgtaggtcagctctgtgctggtgccttacaacatcatctcagtcctcaccgtggcctaatctggtcgtggtgactccattttttacatgaagaaacaggctcagagaggtgaccaaggtcacagagccaaaggtcagagccagaattgaacccaggtctgtgtgacttcaaactccatacctttaaccactaaggggtcgtgctttctctcccaaaggaatgaatgaatcattcaggagatatttatgacgcccccgcaggggctgggcacagtgccaggtgtgggcgatcttccatcttccgggaacaggggacaggtccctccctgcccgcgcagtctggcagtgaggcacggcttgcactgggaggggctgggtgcgggggaaggtgccacatgttgtgggcacagtaaccaggggagcaggctgggtggacacctggggagacctctccaacggtctggggtgggggaggaagaggggcgaggatcccagatggggagcaagtgtgcaagggtggcagtgcttcctggctcatctacactctgggcctttagagctgagggcagcctgtgggcactgacctctcagtggaggctgggtctgtgctggcttggtgcagtgtgggcatccttggtctagaagacaggatgctggggagccctagaaagagagttgcatctggctaacacggtgaaaccccgtctctactaaaaatacaaaaaaattagccaggtgtggtggcgggcgcctgtagtcccagctactcgggaggctgaggcaagagaatggcgtgaacccaggaggcggagcttgcagtgagatcgcggcgactccgtctcaaaaaaaaaaaaagaaaagaaaaagaaaaaaagaaagagagctgcatcttaccttcacccacagggggcgcttttgtcttcatttcatttcctggacctggaacagaacaaagagaaagggcattatcatggggcggggggcctgggtaatgggccctgagctttcactgccatttcccatttaactcaaccttcacagccagctgcagctttggtacgattgagtccatttgagtccattttcttcgcaggacacccaggcctggggaatgaatggccgagtttctggtttggaagggagttgggagtcagacacatcatcagggcataaaaggggccagactctaatagggtattctacccaagcaacaaaagacaaagttgaggccaggcacagtggctcaagcctgtaatcccagcactttaggaggctgaggtagggcggatcacttgaggccaggagttcgagaccagcctggccaacatggtgaaaccccgtctccactaaaaatgcctgtagtcccagctactcaggaggctgagggaaaagaattgcttgaacctgggagcataggctgcagtgagccgagattggcctgggcagcagagcaagactccatctcaaacaaacaaaaaaaaaaagcaaagttgaggctggtccagttctggtgtcacactggggagctgatgcaggggcgggagtgagcttgaaatgagagatcttgtcaatttcatgttgaacacccttcaatgatcagaaaagcgtacacgggtgcaccaaaagacaaggatagaatgttgacagtagccccaaacaggagaccacaaatgcccattatgaatcaaatgcacagatgcattgtggtgtagtgacacaatggaagactgtgccactaagaagagaagcaaaactacaaccactaatgaaaggcgagtgaatccacctttcaggctcacgcctgtaatcctagcactttgggaggccgaggcaggtagattgcctgagctcaggagttcgagaccagcctgggtaacaaggtgaaatgccgtctctactaaaaaatacaaaattagctgggcgtggtggtatgcacctataatcccagctactcgggaggctgaggcaggagaatcgcttgaacccaggaggtggaggttgcagtgagctgagatcacgccactgcactccagcctgggcgacagagactccgtctaaaaaaaaatggtgggtgaatctcacaaacgta

SEQ ID NO: 915614 - DNA, 4001 bp, Homo sapiens
attgaaaacagctctaggttcaaattccagctcgatcatacctacctagcaatatctccttactgctacatgcatgtggacataacatgtgctaagtgcttagcactgtgcctggttgtagtaggtacacaatgtggacatgatgattcagtggattaatggatcccccttttatagatgaggaagctggggccccaggtcacctagcatacaagtagcaacactgggattggtgccagggtgcaatggatctgggcctgggctcttggtcaccatgctgactcctgaacaggcaggccttttggggtggggagttggaagagccccccacttcccccagctttgctggaatcagaccatggcagaggcccctcctgggcttgtcagagaattggctttccatgaatgttgtgcctcggcgggggagaggggccctctgtccctgccttctgctccaccccacctccttgcccagtgtcctcacatcattctctggctagcaaggcaatgggaagggtcgggagttgggcccaggagagcctcatccttcaacctgtgagcctcttcaggatctttaggttgaaaccttttcaagtacccctcctccgctttctgagataaccacatcctgctgccatcccccaaacagcccacagaaaccgcaggacagactggctgggaggtgctggctggcatttattgggcacctactgtgtgacttgccctgtgttatctcagcaccgcagccctctgagggggctgctaccctgctccttgtactggagaggaaactgaggtgcagtgtgggcagcgctgccagcctacagatgtgttttatttgtcagtcagtcaccagagctgacaagtggcagagtccgggtttgaaacccaggctgggagcccccactctgcagagctgcttaggaaagctttcagacttcagagtagggaggctgggggcttggggacttgtcctaacccttcttcacactggctgtggtaacttcggtgggtctcctgccctctctgagcctcaatttccccatttctaataggaagcactattgctgctgctctctaaaactgtcatcccctgacggggagaaggagctgacattccatggtgcagctttcccaggcttttgggaatggaggagggtgcacacagtctctctgcagcccctggaagagagctcccaggatggccagctcagggccttccacccacaggccaggctcccggccccccacctccctcccccaacttcagcccaaatctacagccttgaggccctgagtctgggcaagcttcctcccctgccccgccatacccctctcctaagctctggaaagccccccactcaggctggtgccaccggcggctgagggtcatatctggctcttcacacggccagggcctcctcgggctggggtgcaacgttcccctccagattgggacggttcctgcagacccagcgctcctgcctcgggaacctccagggtgtatggggaccggagtgtcgggagggggtgcgaagccagagcagggacagtgaggacagtcagggcgctgaatgcgaaagtgaggggcgtgtgtgcagcgtgggcgcggggaggcgtgtaaatggccgggtgagccgcgtgtgtgcacatgcggggcgtgcgatgcgatgcgcactgcgcggagtggccgggccgggtaagggcgcccagcgtgcgcggtgcccggcattcgttcgtgtgcaagcgcggcgcggaggtgcaggagcgcggagtgcgcggggctctggggtcccgggcccagggcccgaggagggggctgcgtgcgtccgcgatcagggtgcgatcccggccgcgcacgggggtcggcggggtgcgtactcacccgggctccgcggaggggccgccgctccggctgggctccagctgccggcccgcctcccgcagcgcgcacgcacctgcgcctagcccggccgccggcggcaacgccacccctgcagtgtcgccgggctcccgcctccgaggagcgcggcgcgggccgggggctcggccgggccggggcggcggaccggagctgcgccgcagtccgggcacgctcccaggagcccgccgcgcgctccctcgcgctcgcccgcttgcccgcccgctccctcttgaatttaaagtgacaagctcgagcgctgtctctgctcctggggtccgagccggagatccccaagcgcgtccgggatccagggacgccctgaggccaagcccaacccctcgctcccacgcctggggacaggggtgggtggggacgtgcccacaggcctctgagaggcaggccaagcactggactcagagccagccggcctgggttctagccccagcctccgcgccctgggttatcctgttctctttctaggcctcagtttctttaccttaaaaacggacccgatactgcgcacctccgggagccaaggaaaacagcgacaggaggcgcagcggaaagtttccccttttctgaatggataattactccctcccaccacgattgagctgtaggtcagctctgtgctggtgccttacaacatcatctcagtcctcaccgtggcctaatctggtcgtggtgactccattttttacatgaagaaacaggctcagagaggtgaccaaggtcacagagccaaaggtcagagccagaattgaacccaggtctgtgtgacttcaaactccatacctttaaccactaaggggtcgtgctttctctcccaaaggaatgaatgaatcattcaggagatatttatgacgcccccgcaggggctgggcacagtgccaggtgtgggcgatcttccatcttccgggaacaggggacaggtccctccctgcccgcgcagtctggcagtgaggcacggcttgcactgggaggggctgggtgcgggggaaggtgccacatgttgtgggcacagtaaccaggggagcaggctgggtggacacctggggagacctctccaacggtctggggtgggggaggaagaggggcgaggatcccagatggggagcaagtgtgcaagggtggcagtgcttcctggctcatctacactctgggcctttagagctgagggcagcctgtgggcactgacctctcagtggaggctgggtctgtgctggcttggtgcagtgtgggcatccttggtctagaagacaggatgctggggagccctagaaagagagttgcatctggctaacacggtgaaaccccgtctctactaaaaatacaaaaaaattagccaggtgtggtggcgggcgcctgtagtcccagctactcgggaggctgaggcaagagaatggcgtgaacccaggaggcggagcttgcagtgagatcgcggcgactccgtctcaaaaaaaaaaaaagaaaagaaaaagaaaaaaagaaagagagctgcatcttaccttcacccacagggggcgcttttgtcttcatttcatttcctggacctggaacagaacaaagagaaagggcattatcatggggcggggggcctgggtaatgggccctgagctttcactgccatttcccatttaactcaaccttcacagccagctgcagctttggtacgattgagtccatttgagtccattttcttcgcaggacacccaggcctggggaatgaatggccgagtttctggtttggaagggagttgggagtcagacacatcatcagggcataaaaggggccagactctaatagggtattctacccaagcaacaaaagacaaagttgaggccaggcacagtggctcaagcctgtaatcccagcactttaggaggctgaggtagggcggatcacttgaggccaggagttcgagaccagcctggccaacatggtgaaaccccgtctccactaaaaatgcctgtagtcccagctactcaggaggctgagggaaaagaattgcttgaacctgggagcataggctgcagtgagccgagattggcctgggcagcagagcaagactccatc

SEQ ID NO: 915615 - DNA, 4001 bp, Homo sapiens
ctctaagcctcagtttcctcatctttaagttaggatcattctatggctccctcactgggtcaagaaacacattaattagtgtactctgaacagtgcgcctggcacacagtgtatgctatgtcatggtttgctatgacctcttccaagctcagtgagaagttgtggaggatttgaagcaggggagagacacaacctggtttttctttaacagatgatcagccgttctgtgggctactggtcatcaataagacaaagagttggaagagaccctagaggtcatttacaccaactagtttcccagtggttctctctaggaaggggagggggcggtgcctggagagacatcactgaaaggcagaagagtggctgttcctcaagtgtgttgggcaggaaagaaggttgagaggcggccgaccacgacttgtggagaaggactcccaacacctggccagtggaaagcccactattccccttttccagatcgtcccaagtcccacattctgctgtgcagccggctcctatttagccactgtcaatgtcactgttcttggattataagtgcctcaaggacagcagccatttcctttccactctcactgtacagtgactgacacaggccccacacaactgggtcctctgagcttttgaattattgattggaaaaaggaagatggagtcacagcattttagtgccactcctggaaccatacagtctataagggatctagagggcctttaggaggtcctttaagtcatgcccctgccccagggccatccttcctcaaatcactctagcaggactctttgcctcctggttctccagagaacattctgcattctgtactttggaaatgcatcctggaggtcacagcctatgcagggaaatccttccaaactgcttccccagaccccttctgctgctctttacaatgggagcacgggctatttcctgcacgaaggggctctggccatgagcaaatgcatgggataaaagccctcctgtctccagggacgtctgcagagacatcttgggggaggccataccaaccccctctgactggctggagctcagagctgctagggggtggggaagagtccttcaggttcctcccggattcagctctctagaccccgctagctagcttcccagctcctgcgggaccgcggccacctcccctctggctttgcaggcattacctcttctcagctctggcaggacttgccctaccctggctccacaaccaccacccatctccctctcacagaccccagtcttcttcccaattctgcaaactcctcattctctggtacctctcagggtcttccctaaccctggcgattcccctcccagcctccctctcctcttacccttcccagccctaattcttatccaggtcccctttcctgtcccctccctttaggtctcgctgctggcccccattcttctctcagtccccacaagctcgccgctccctaattctccttcaggtctcgtctcccccatcccctagcctcccccatccccctacctttttgactccttgacctgtcctccaacgcgtctgctgtcccctccccgccaagctttgtcgcgcaaagatccacgaccgcctcccaccccagttccccctctgcagctgcccggcaaccccgccttgcccgggaagggcctgcgcgccgcccccgctcacctgttgtgcagacccgagcaagctgggcttcgccttctccaggtcggggtcctggtcccgcggcagcagccccttcttggggtgcatgtgccgacacaggcaggtgaccccgcacaacgcgaggatgctggtggctgtgcccagcgtggcgcccagcgcgatcacaggcaccgacagcaccatggtgcccgctcccggcgaggggctgggtcccgcagccgctcaccttccccgggccgggcccgcctccaggcagctcccgggatccgggcgagccagcagctctcccgccgccagaggggcggggacggagggagggaggacggctgcgaggacgtcagaggaggctggacccgcagccacgtcaaccggcaaccccctccccgccaacacgtgaccggacccccaccccaacaggagccggagccttccaggtggaaggagccttggggttgtttcaggccattcttaatgctttgtgtacaacaggggacaactgggcccaagaagtgctggagcttgcggaggtcacactgtgttagaggacaaacctgggctccaaccagatctgcgactctaggagtcactttcccagactactagctccttgctcacccttctaccccagcagctggccaagctggctgtaaaattgggtcttccgggagctttttcaaacacaaagctggagatttcccagctccccaacctgggagatggttcttacagggaagaggaacaggccacaggtagagggaacagatgggatgtttgggttgaggctgtacctgtgtcctgctgaagatggacaatacagctgcatccccttaagggttgcccaagagttcacctttattacctaatcagcaggtattcgcacctttatatatagttgaggaagccgaggctcagaagagaggtgcacaggtagaaaaatcatcaccctgaacccaagcttatgtttgcagattccaagtccacactcaaacggacttgtcttaggaggataaagaagataaaatgcagcagctaggagtacacacttgattcagagagggtgagcataaaactatgcttagaacaaggggaaattagaattccgggcatgaggactgtcttagctcaagaaaacagtggctttttagtgttcttcattatatggagtgttgaatttaattcagcagatatttgctgtgggttggctgtgctctaggtgtgctgggcatgtgtgaaaagggatgtaggtgatttcatccacaacagagctttcacatttctatgagccaatgtctcctaaatctatagcctctccagccagaccttttcctctgagctgtagctgtgaccaccacctgggaacccacccgtcctccagtttttcagctatctacacttgcataaaaacccaccgatgacttactggcttagaccagttattgtgttacttgtcatgatttcatgggttggctgggctcagttgggtggttttcctgctcaacatgttgtcttctgggactgcagtcatctaggggttcagctggactgggacatcagctctccagacaccattgcagatggtgcaatggtgaactcacgtggtgagcagtaggtgctggctgccactgggatcacaatggggctgtcagctggtgcattttggttgtcctctatgtcacctctccatggtgctggagctgctcacagcatgctggctggattctaagaggaatgaagcagaagctgccagttgtcttaaggcctgggttcagaaattctagaacactatttgatcaaaacaatagtctccctctagttctttccttcagtgacatcaaaaggaggtgtccaaaatacaaagctgatcatgtcactcacagctctcaaaggttctccaagaataaacccaagagactcaacctttatccaaatccctttgtgatgtggtccctgctaagccttccagactcctctctacacacttcccaatgtgcccctgagcctcagccaccccatggacttgggattccttcaacaagctaacatctttagagtctccatgttatcacccatgggtgcatatagcaggcactcagtaaccgtggaataattcatatgatcatcttatgcagaatttccagtgttttgaaggaatcccatttgtgatatgagctccattttagtaaactgacttttccacaagtatttattgtgtgcctgctgtatgccaggcacattttcctactgatccccatttgctgcaaactgtagagctgaagcactgcagtccctggtgacagccttagcaatctc

SEQ ID NO: 915616 - DNA, 4001 bp, Homo sapiens
gggcaagacaggtcccaactgcagccagagaggcccattcaaggagggggtgagggaagagttgagggctgccagcacaccagggatggtactggactccagaccctttgcctagaagatgccaagcacgtcaagctggcctccgtggtgagggcagaggtgcttggaggagtggtgatgtcatggtgcccaggcatgggaggaaagaggagggagggagaggggagagggcacagccccaggccagtggcctaacaggccagaggggaggctgccagcctggtgggcgaggggatggatagtgtccttatttcttccctaccttccatcctcataccccagagctggcttctgaactaagctactggcttctaagaaggtgagcagagcaagagaatactcctgccacgggccatgggctggaagccggcggcctcttcgacgaagatgccagggtaggtgacctaggtccagacagatgaggggagggctctccacaggcaatgccccttcagccctcacctagaggacattcagagaagggcgcaaggttccagagaaggagactgaatctctcaccctcatatccaagtgctgagtgagggcagtgcctggcgcccagtgggtcgtcctcaatatcgactggactgaaaagaatcgatggggggtgggagccgattcctcaggaggcagggacaggctgaggctgcccctagaggggaaagagcaaatgtggggctagggcaacagtgggcaaagccagcacccactggactgccttcaggagcctcagggctgcaggctccttctgtgcagggtcttagagcccttccttccctacagcaccgccgcccccaggaggctggcaggagggagcctggaggctcttcgtttgggagcacatcctgggctggggagtcgtgcttttagcatcagagagaagcccagaaacagaccctgatgccagaactggcagactgggggtgctgggactgggtggagcaccccaggtgggagcggggatggagcctgggcaggagctgcaggggacctgcctacaggtgggcactgggtgaggaggcatcaggagccaaggaggaaatggcagagcaatttccgaggaagacgggaagattcttcggctttggcttagaggataccaagcagacagtgggctcccaggccactcccctggcgggcgaagcagaaggcaaaggagttcggccctcccccaccccaggacgggagagagtttggggttgtttgcttccccctccccaaacctaggagaacattctcttggcacccccattctcatgagcccctgctctctttcccttcaggcacccccgtctcacccatcaacgcccctgcagttccccaccccccagaacctccctgcccagctgccgcaccagattcccacttgccccctggcaccctctcaattcacagttggcactgcgatgccactccgctcccctgtgcccgcaaccttggccaagagctgccgggatcctcgccctggggtccgccagcgctggcacccccggggcaccggtgctggggagcctcgggtgcctctgagggcactgcccggctcccacaggggcagcggctcctcgctccgccacacacgttgtccttgggctgttgaggggtgggggagaggtccttgtggggacactgcgaagccggtcccagacatccagcctggcagtgtccagactgcgggggaccggggtccgagccgctgccgctcgatcccgcgcccccggggctgggatgacccctgggggagcccgtgcggctccgggcggacaacagccccaggctggggctccgagacggcgtccggcgctgccgctgtcctgcccgccggtgcggggcgccccagcccgccggggccgcgcttacctgggctggccgcctccgggtcccggtacatggtcccctcgtcgccggttccctccgggctcctcagagccgcccgcggccgcgcgctgctccgccgccgccgctgggcatggggccgggcgacccccgggggcgggtccgagggcgggggccgagcgggctgcacctagccgcggagccggggagcgggggccgcccgccagccctcccgcccgcccgcggagcacgctgccgccgccgccgaacagcgccgagccgcctccctccggcctgcgcgccgcgtgtgcgcgccggagcgtgtgtgtgtgtacgaggccgtgtgtatgtgtgtgtgtgagcgcgtgtgtgagcgcgcccggggcaccgccggcgccgcccgccagccgccgaacgccgcggccacagccaccgcctgcgcccgctgccggccgcgcgccgcactgcacccgcgcccgccgccgcccgaagccgccccgagggcacggccgccgccccgcgccccgcccgcctcgcagtccccgcggggagggccgccgagccccacggccgggctcgtccggccaggggatccggctccgctgcgcgacccacccccagcccgtgctcccccgatggccgcggcctggcaccgggcagggccgcagagccggccacctcctccgaggtgccctttggctccgatccaaaaggcgtggagatccactccgggttttccgcttgctggcggctcgagggcgtcagctccggactcaacaccgcggcggtccggggcagacggactggtgtgtgcaaaaaccaggagtggaatttttggcagcgctgagcctgggtccgccagtccggtctttctgcaagctcgcacacaggtggagccgaaagggctaagatccctgccctcggtaggaggtttggcctagtgaccctcctcacctaacccagccccacgaaagaagaaaatagacttttcagcctctggctatccctctatagcagcagctcctcctctgatcctcccctctattccttgaccctagcacttcggagggtaggaaggaaatccctccttctccttccaaccctggacctctcttggtcccctctgcctctctgccggctcagcacagtctaaatcaggtgaacactcatttctctacagaatttggatgatttgattctggggcagggaggagaagagacctgtctcctaaggataagaaaaacccagaaatgaaccattagtggtatggtaggcacagagacctccctgcacacacctacacacgtaatcacctacatacacacacacacacacacacacagacatgatgccccccacacacacacccacacagacatgctgcccacacaaagagacacatacactgacgctccccacaatacaggtgctgcccctacccttcactgatgggtcaggtaagagggcaaaatccctgggtctgtggcagcatcctgccctcccctgtgctgagaatgcagtttgcaggtgagccaggcttcctagagtcaaggattattatttccaccctgagaaatccacttttgctggctttatactgcactactcatgcccagccacacctccacctgcccacagtgtggaaggcagccaggaacaaccctctatctcaagtctccccgacacacacacaaacagaccccatccccttgaaatcacatggaggctatccccaacaaccaccacacacacacatacacacatacacattcacctccacctacagcttttccggttgagaaaaagataaggaagttcccccagcaaacctccatgaagactgttccagtggagagcagatttcctgggaatgaatgttctacataaaaatggaaggaaaaaaggcatcgtaggttaaggccacaattcctcagtggccagaaatctcagccctcaccctctggggaagggccatcctattccatacacctcacagctgtcttccccccactcacccaagtacagccaagaacccaggagttatctacactctgctttgggacctggcaaaccccagaaagctaagccaacaggctgggactgcaag

SEQ ID NO: 915617 - DNA, 4001 bp, Homo sapiens
cacccagccgaccatccctgactcacgtggaagcagcaggtctcgtcaaacacggggcagagcgtgcctcggtgcacttttgtctcatgtctgtgtccggcctgggtggagacgctgacccgggcataggggtccacggtgcccccaggcctcaggtcggctgcctgcctcaggcccaccctgatctgggagccagcggggtgggctcagccaagggcccctgccctgtcagctccccaccacccagggcatggggtctgcccttcccccgtcaccctttccggaaactcgcagaaccgctggtcctgcgcagcggggcccttcacctcctggcttccaaagtcgaactccagggagagctgcaggcacccccattgctgagcatcccccgggctggactccaggccatccacatcaggttgcacctggagtgagttgggacaaggggcaggtggtgctgacatcatgcctcatcagagccctgggctcccgggcagcccttgcatgacatgggtcaagaccccccgcctccaggccaggccacccaacaggcacaaatcgtcggcttcgctctgtgagaccggccaaacccacccaaaacgtggcatctggggtaccccctgccttcctcaagaacccgctgtggctccctcgggcccatggggcagcccctgttgcatggcctccttctcacctctgttcacccactttccctgccaggaaggtcctcaacgccctgcctctgtgggggttaaaccatccctggggctgaactcgcctcgctgccctgggctctggagcctggatttcaagccctctctggactgagtgagcaaggagccgctcctcaccaggtgggtggtggtggtgccgcgggcactgcccagacccacggactccttgtccctgggcttcttcctgtggcggcggcagcagcagcaggcagcacagaggaggcaggagacgaggaggacgcccgcggcaagggcgccggcaatgagagcccagcggggccctggggtagaggccaggctgagtgcatctgtggacagctgcagcccccacttggctgggttatccccacacccctcttgggaatcccacaactcacagggggtcccggcgacaaggtctggaataagcccaggtatagctgtggtgccagctggggccggggcactgggagagactggtgggtgccccatctttctaccctgctggtttggaagaagcggcccaggaggctgggtcagctgggagggtggcccctccggcccctgcccgctaccccatctgactagcagcagccagtgctgggtctgccagggcaaggaggcagcacggggtggccaggggcgagggttctgtgcagcaggaagctgaagggagggaggctctggaccctggccaaagctccagcttagctgcccaggcccagcctcccagccacctcccagcagcccccagccccagccaagcaggcagggcctgggcagcctagtccctgccttcaccggacctcagagcacccttgcccccactgtaggatgcgtcctccaccaggaagctctctccctccctgcttctctctcctgggccctggaccctgggccctgcctgggggtcccatctcatccctgggggtctcatctctgcggtcccatcacttccttgcctctaccccagcacgcaccacagctggggcccaccatggtttgccagccatgcaggtggagcatgttcactgcagcccccaggaacttggaagcccagaggggtctgcagggtcatggcgggaggagcagggctggctgtcggcggagctcactgagcaggcctgggctaaaggtgcattcctggcaggggctcagggccgcagcgcctgaggatgaaggtgaggtggtggcaggtaggggcagggtgcagctgggagcggccagaacattccacacacactgactcagccgctgcctggactcgtccacctgcctgcctggccacccttcggcatgtgggtgggaaggaaggtggggcgggcgcagctgctggcccctgtacccgcctgcctagggcctggggagggagcacacctggctgggctggctcctgtcacctacaggcaggggaaccagggtgctacatggggcctacggtgaccccaggcccagggtgactccccagctcagctcttccctgactccacccgctccagagagcagcagccagccaggagactctgttcctccacattggcgcctcccctgctttgcccacaagagcctgggacccctcttgccatgtccaagtcagcctggcctcaggggcccagcccaggccatcccatcgggaataagcagctgttgaggccagataccctcacctctgcagccccccagtctggggcagagcaaggagacagacagaaagggaccctgccatgactccagacacacacacacacacacacacacacacacacacacacacacacacacgcacgcgcacacagcatcaatgccccactccctggcaggctgggagaggcagctgcactcccagaacggacccaaacccccagtgttcagatgagggggctgcagctcaaggaggggagggagggtccaggttccagccccacacgcatgttgaccctgtgaggtcagcaggccaggtgttttacagacgagtggaccgaggctgggagctctagttttgtggctctggaggccagcatggcctgggaagcccagcctgtccccagaacacaggggccagcacaatggagggattataggtacaaaaaggagatgcggaggtcagggccagctttccaggctgcaccctgtgcgcagggccccatgctcagaggggtccctgcttggtttaatgcgtgctggggccatcttgaaattcttaattttggaacaagatgctgcacattttcattctgcactgggcctcacaaatgacggagcttgtcgagttcgggggaccctttgggtgagtcccctgcagatgcagtgtgggtgtgcagtgaagctcacgggcctcggcagcccctcagctcctgggggacactcccaggtgggtccggcgtcccacacgtggctggcggagcgctcctactggtggtggctgatggaatgggctgggtccgcagggtccctggagcgggactgtgccggccagattcaaacaggccactgcctcctccctacgtggagtttcaaggcaacttctctttttgaaatgtcagagcctgtatacatgctgagattaaagtagcttcactccagatttttatggttgagattccggataagttgccaatacagaatctccatctgtgagtgcgggcatgtgtgcgtgtgcgtgtgcgtgcgcccctcccctgtgcccccgctttgctggcgtcccccctcctttagtctaagaacagtcagggccgggcggggagagctcccctgcagtgatttgccgcggccggccagcggcactcccgggccagcctggtgaccttgtccccagaggagcacaggggccacccagaagctgctccggagaaccccaggaccctgggggcgctggctgccgatgctgggggtcccaaagcctggggaggtgcggggtccctccggaccgccgggaccccagggaggtgcaggtgcagcgggcgcatggccaccaggtggcgccgtccgcccctcgggacccggcctccctcatggctcccggggacagtgccctggagacccttgggcgctgggggctctcgggtctcccctcccagatctgggaatcccccgccctccctgcctgagcctcccggggctgctctccccgttgtctagctttggctgtctgtctcctgtggccctgctgggaaaaccttctctgggagttcacgccatgttttcccaggaaagggagacggtccctcctccccggctcccccctggccaccgctccagcgggctccttaaggctctggaaaccggctc

SEQ ID NO: 915618 - DNA, 4001 bp, Homo sapiens
taacaaggagaactcgtggtctggtcacaggcaaggaagtgagatgtttcaatactaatacttgctttgggcaaagcatgcaaaataattgtcttgcttctgctgcttaaggacgaacttccccgacttaagacatcttcctgggactccagcttgtgagataagggactgtggtttattcagcacatcacatccagcaatgagatgcacataggctggacattaaacctccctggaaaccactgggatcagtatttctctacccaattatccactttgaagtaatatatcaatgatcattcaataaacttagttaatataaccaccggcaatggaaaacaatatttttttctttttcaataggaaaaaaaagcctctggtagggaaaatctgatataaactttaaaattttagcagatgacttcaccccacacgaccatcttgaatatatcaaggatatgctatttaagtctggctcagtgtgacactctttataaatcaaataattctttaatttatcttttggataaatggatttttatataataaattgttttcaattcgtacatcataatttgcaaggcaatagctcatttccaatatttatacatagcaatatcaagagaaaggccattttctcatcccatttttaacaatccaaccacaatatgctgttttggtaagtacttaggttgggagaatattcgagaaaactatttctccaggtgagaaacatctcaagcaaacattggaaggaatgcattttccagtagccagtaacggatgagacgacctgggagacccagggacctcaggaaaagcaaatggctccactaaaactccctcctccaaccttaattggtcaaatgccaaaataaatgaactttccaaagttaagagctttgcaactttcactaggagtaactacaggtgcacaagccaggaccgacgagtctacgaaccccatcgtggccggcggtagtcgctggtcgagcctagcgcccaggcccaggccacctccatgccgtgcgacccgccgggaacgggttcaggcccgtctgcccaaggccagaagcaccctgtccccggcccaacgccggatcgcgtcccgcccttctcaccccataccaaggaaaggaactagacgcttgggagaaaggatgagcagcacccggtgggattcggccccaacccggggccgtccccaactcccaacttcccagagtttccttcggcctcgtcccccttcccacggctccgaggccgccgcggcctcccctcgctctgagtgcagatagcccgggaagtggagagcgtagctcggagctagggagccgcccccaggagccttggcgatgggagcgcaggtggcgggcgtggtccctccaaccctgccctagccgacccggagtcggcctccgtgcagtagccaccgcccgggtccccgcctggttacagcatcaggccacagtgcgctggttcttgatcactctcctggctcggtggccgccccccgccctctcccagtccgcgtcgctgttctgcctcaggccccggtgcggccccaagtcccagcccagggcccttaggtccctccaggcggcggtggcggcactcacctgggtcgcggagccggggtctggcacggtcccgcaggtggtaaatgaaatcctggcagctgtcgtgctccagggccccacgggcacagagctcggccagcagctgcagcgcctggtgacagagcgcgtccctggccccgggcatcgcccccccgcatcctcggaccgcgccgggcaggcgggcgcaggagacagccctccgcctgccagctcagagccgccgcctccgggccgtccgcgctcaccgccagggacctgccgagaaacggtgcgagcctgagcccgagccccagacccagccggcccggcctcccaccggttgcatgcagctcttcgccagccggtcggtcaggctttctctctctcccgcccggtccctccgtccctccccagacaccgaggagaggcggtgccgcacagcccagagcgcctctctgcttgcgctccgcccgctactcgcggccgccggggggcggggccaggtcaggagtgcgcgccgcagggtaggatagcggcggccccagaccggggacctggggtactccccggctcctggccgagcgcgagacttggcttgggacctcgcgcccagagcggccgcgccctggcttggggagtgtgagtgagtgcgcgctccgggcgctttcgctactccacccctcatccctgatgcaaaccaagcacccgctcccaccgccgagtgtgtccaaagcacgttcttggatgcctagtgcgaaggttacaatctgggcacacccgccagatgcgcagaaccgagtccctgcttcgaacttggaaagagccgcctgggtttgaaccatgggcctatgggtgtcagatgcccaaatgcagggtttgggtccaagattcgccaacaaaggaaggatttcccaagcacaggcccttttcgaccactgtggtgatttggatggagaaggtggaggctctaggtcagaactaagatcaaataaataaacgattcctgggaaagaccctgaggcttacctgggcttcgtgggtcccttagttttctaagcaaccgtttggaaatccaaacattgccaaagtgtcttcagcacccaaggaggagtatcacagaatcttggagagttggaaggaacctcagggcacctctcatccacccatcttttcagcctttcaagcagtaaagcctagaaataaccacgaagtactctgggtgtgtgtgtgtgtgtgtgtgtgtgtgtgtgtgtcactgtgccacaagccttttaggtacataatctcatttaattctgtacatagcccaacaaggtctgtgtaattgttatcctcattttaccaatgagaaactggggcctggggactcacaaaggtgttacttgctcaaattcatacatgatgaaggtagctttgattttctctctttcttttttcttttttccttctttttcttttgtcttttttgtaatactggtgttcaggcccccactctagagcaattagagtaggatctctagaactggtaactatcattcttagccatgaggttgtgccgtctctacggacatatcacaacaattcatatttgcacagaaagataatttgggatcctatagaatgctcacgcaacaggcaacctttgaaatcctgctgtgaatggtactagggtttcagggaacttacatgggaatagcagagaaaatgcaaagttgtaaaggtaaagatgcctccagagagttgcaaagagacaaacagagggaggagaaaccagctttaagggagcctgtaggggaggttgagcagatgctgtttcttcaaaggggggaacccctagagaagaagaaaaaggccatgaacagagaaggtgacaccagagatagtgtgatgctgggggggggtggcgggggggacatatagtaatggtgagaaggtatgtgtgttgaagcacatggaaatattaccctaatgccatcatgtcagagaggaactgaaagcaacaagttcagttaaaaaatgactttgataaaccaggcaagagatgatgaaggcctaaaccaggccaaaggcattagctgattgctagaaacatccaaatttgaaaaacatttcaagtattaagtgacaagattgcaaccaatggaataagaaagaagtgaaaggcacaaacgtttcaaaacgttacctgggtcatatgtgctcacaccctaataacacttagaaatgcaagcctagagtttaggagagagtgaagactggcaatcatcattggaaaggtagaaactgagttgccacatgggatggttccttcaagaaagaagagttgaagaaatgaaagaggagattggaaggtagcaatgagaacaggaggaaagattgtacagaggggagtcatagggatca

SEQ ID NO: 915619 - DNA, 4001 bp, Homo sapiens
ctcaatggttgcaatagtccctgctttgccaaatgtcagggttgctgtgaagaacataagaggataacattcataaaagggctttataaactgtcaatgggtagaggattaatgctaccaagaggctctaatgcctgggttagtgacaatccttcacctctcctggggacactgtttaaggcacaccatttgcggagaaggcacagcagagccccatccaggtgtgcattgcaagggacctttgaggaacagcatgatccccactacctacagccactgcttgtcatcatagctcagtgtcctacttcacaccatgacagccagccccttcctccattgccaggtcctgggatggcctgtctgttattgttttctcagggagaggaggtggagttaacaaatgagtacctaagactgggatttgattctcacttctgacacctaccagttgtgtgatattgggcgagtcacctgacttgtctcaaagtcaacttcctgacacatcaaatggggtaattatatcccactccacccaccaaccgcaaaagagtatgtgagctcataaaaaataatgggcatgttaagccctttgcaacttgttaaatactgtctatatagaagttattttagtagtcataatcagacattctgtagtggttgaagtgaattctagcatgttcttttataaatcatccacgttaaatcagtgtcaagatacggaaatggtaaaaataaagccattattcatggtcctgtgtcccaggaagtaagaacatatcttatgctccttttggataactcctggagcgagaatcataaaattaataatactaacttacattcaggaagcctgtcgctgccttcaaagcccaagattacacaggcagtaaatggcagggcctggacaaagtcaagttcttcagcatcctggcctagtgcttgtttgacaacaaaggtgaatgaaagtggcaggaatgttgacatggaacatttgggttccacccaacaagaatagtgtatcaaagttgccactcctctttatgggacccaagacaaatgaaaaattggctcagagaatactttcagttgccattaaaaccaattccaacatttctgaaagcatgcagaaatgtgagctagtttaatttattttcttttcaaaattctaaaaattttttaaaattctaatttggttcatgattcagttaaaaaaaagtagatccagtttttttaagtggatagaaatacacacacacacacaaatgtagatgtatgtggttgtatacatttcatttttatctcagtatttaataagttaaaggaatttagttaggtttttaatcaagaccctatttctggtaggagtccagtaggataaattaagaggcaccaagaggaaaaatgttttgtccaggaagtaaacctaaaattggaatccataaattcagtcttcgagtcagaactaccacttatagttgaaaaaaaccccagtgtcctattttcgtacagactgcctcttccttccctcatgcccaaggcttctctggcctcttacctgactctctcttcttcggccctcttcagagcagcatcccgctgcaaaaccttcatgatggcctcttgttcctcttcagtcaggaagcttaagtcaatcattttgaaaagtgcatgcaaaaataatagcaacaaatgtggctcaaaattctcagggctgaacaactaagactgcaaccaggaagattaaaacacacaaaaatgaaatatcttgttcagttctgcatcaaagtcttattttggctcagcaaaagtttagggcagctgatagcaagatcctaagtgctctttcccatgaggaagtcctggtctgtgggatagtgtcgagaagaggctctcagaaggatgctgtattccttgccaaacaggtcgcttgttcctatggtggcttccagcacactcactctctggtccagtcttagacacagtttattctctctctgcacctgtcgtcaattcataagaggcagcagcatcagagcatcacctacctggggaatcatgagacagcaaacaccagacagtgagaggcagttcctataagcactactcattactacaagatttttaaatggccatgcgagatggtctctgagatcaaggaaaccagttcagccagcttcctgagcaaatggtaaatgggtcatgaaacatgcttcaaccctattccagacggccaagatggagaacccacaaaaatgcctgtcagtgtttaacgatccacctgagtaaaggatggttgcaaaaatgaactggttctctctctgcaaactctggggatgctaggctaaaaagtcatgttaaaggtcagtaagatcagggatatgtgattccagtggtcaagcaagaatctagaaataaaaattttaaatgctcacctcttcacaagtaagaatattccactgtactatatatgtgctccatattaacaggagaactagtattagatagagatagtttgcagaagagtgagaattgttattcttcatccagtctcactgctaacctttgctggacctagaggaacctaacaagcttgtctactttcatttctcaggggaaaaacacctacctgtgtgtgtatataaactggaggaaaggaagaggcagagtttcaaaacacctcaccatccaaagtgaggatttttcagttgcacaatgtgcaagaatcctattttctttgaggcatcttcaatacatatgtaatgggaaggaagtgagaagtgaagaatgacacagccctacagaaattcggaggtgatccactcaaggttggggcacttttaacaagtgcagtgctgaacatacacactaaaaacctttagtaaattttaaagcaggctgggtgcagtggttcatgcctgtaatcctagcactttgggaggccaaggtgggtggatcacctgaggtcaggagttcgagaccagcctgaccaacatggtgaaaccccgtctctactaaaaaatacaaaaattagctgggtgtggtgacacacgcctgtaatcccagctactcaggaggctgaggcaggagaatctcttgaacccgggaggcggaggttgcagtgagccgggatcacaccactgcactccagcctgggtgacagagtgagactccttatcaaaaaaaaaaaaaaagaaagaaaaaaaaattttaaagcagccccacttaagaataaaacagtatgtacattagtgaataaaatttataaaaattaattacttgaaaaacagaattactgggaagttatccttctaccacttactagctataagtcattgggcaagttaccgaccactgtgaagctgttttctcatttgtgcttgacattaggatgtccctcacagattgtaaggattaaatgaaataatgaatataaaaagagcacatgtcttgcattctgtaccaaaaatagctactaaaactatattctagcttccgctctgagttcacactttttttccatccagctgaataagactatacttagtaatatatttctcttttgtattatgtctctttctgatctccccccatgaagtttgggcttcattgacagggaatctaatgacctttgttttaatttcctctagctctctgcatactgtccacagtaattactcaaataaatattaagacattacttcattttctttttaatttgcatgtgcttgcatatgctactacctgcttgttcatcttgaaaactacttacccttcaagacaaatcaaagttaccacctccatgaagccttccataacttccataccccaagttaaagttgcagcagattcaatgattattcctaactcttcatttcctccctgtaacagaactatactatcatgttcccaccagagtaagcaaagaattcatccctatcctcctaatgttgggcttggcctgtgactcgctttggccaatggaatgttagcaaatgtgatgc

SEQ ID NO: 915620 - DNA, 4001 bp, Homo sapiens
aatagctttgcaagctgcaggagtttagtgccaataataaatactgtgttattaatggggttagttatttcagtatatttaatatgtaaagtggaatgtttagtcatttgtgagaaagatcctgctactcacttcttggtacgcattcatttgtaactggcttctgatctggtttctcatctactcaggagggcaacattgagaataaataccattttaacagaaggattaaagagacatgaaagtaaagctcaaatgtcagtttcacaactgagacagcagaatacatctgacaggttttcatcttgctttcatccattcctcactgtgactcttcttcattagcctctttaaggtctcctgttcaactaaaaatctgggatcaaacaaaagagatacggagcatccttcctgtaattcactagaccacagtatggaaaatgggaaggagcactggactaggagtaatgaagctgagattctatttcctgccctcccagtgactgactaactataggatcttagaaaagtcacctaatttctctgagtttttcttatcagcaaaatgaagataaaaatccctgccccatcaacttcagtgaggttgttgtaaacataaaataagaaagacagaacgattacataaaagtaaagaatgacctttaaggagctctgttgctgcatttatatgggaaagctcagtgagtacacatttttatgattatagtgaaggcaaatttaacaacaagtaaataaaatccagcatgcaaatacaaattatacatttgcataaattctgcaatataaaaatcagactcatttctgtctctccctcaaccaaggcaccactatactattcatcttataacagagccaagtaatacctgatccactgacaagcttcaagatcttctggctccattatattcagaatcaacttcaccctctgtctatatttagttatttatataagcagaggcacgatttcccacccttgttctgggactctttcctttgaatttaagattttaccagttgtgcccagagagatctaaatgctgagacttgagaatcaaacagaagaataacttaacccaggaattcactccactcttcctgcctttacaaagagttctgcaagtcagagtagcaaaaatcagctcacatccaaagaaatacaattttctatttatagaaacccttgcttcacaagggtctctgatgagatcctcatgacagtatcaccagaagaagccttaagaatacaaactatattaaatgtaccaaatcagaactgttttatagtaacttaggcactattcaccacatagtggcaaatgacgttcttctgtttacccaacagctgcgtcccggagactgcccaaatcaccccagaagttaatacaaagacagacacgcaaatacataaagatatttaccatcttcagcactacgcactaattcttctggctgattatctacttttgcttgatctgttcagaagaaattaacaaatggttaacatggctgacccttggagagaaaagaacaatgagattgtccctggaagcccccggagttggaagcaattagtcaagatgcaatgaggggtgcaaccaagatgtcttccccaaaatactttctctttagattagctccttgagccagtgccatagcgggagctcccatttcagcccggatgcagctcacatcactgctgcacacagactcccaagggttagagggttagttcagagcaagcaatcggccagcagcaggagaaagcacggggctgcaacagcctctctattcttctgtaaagggtatgatgctagccatgactaacaccttcccaaacccatggtcattaacaaatatttgtgtgtgtgcatcatcattcacatatgcctctgggaggcttgcttgggaagtcaactgaagagatgtaactggggaccagctgctaagtggaatcttggcaggctagtgtgagagtgggtatcagtatttggaagggagcgtgcaggaatacccgtcagctgatggtgatttttttttaaccctatacattcctgagtactttaaagctgcaccatggaaatagccccatgtttcacaggcaagaggtttgctaaatgggccaattgttctgagattttttttttctttttttctttttctcaaggcccatcaccaacatcaggaaaaacaatcagggctgtccaacaaaggattcgactcgccttctctggaagcattcaggcggatatgggggttggccgcctgttgaggaggctttagagagaattcctgcattgaggggaggttaaaatgggtgatttttaagatcccttctaaccctgagattccaagatccttgggatagtcaggactacattccaaattgggaatactgtcttcaaacccctgggaatctgtgaattttaggaaatgtttggtgaagtggctttttcttttctttttttcatttttaaattctgactttttattcttaattgcaaatgcacaaaaaatattctaaacataacaatggccaattttcaatcatatgagtttggcagtggttaacttttcacttgataatttttcttatgaccatctgcaatcccaggggtgcattttagcttgaaaatagcaagaacaaaaccccaagaaatcatggtttcttagtccatttgtctagcacacaactctctttatatattatgttttctgctagtactcaagaaatccttcaccattaaagcagctgccagtggggaatcgtgtacctaaagtctttcatgttaagtagttttgggcttatagttccagtatctagaagaaaagtgtgaacagaatagaagggataaaagagaaaggaaagtccttgaagccagggactaattcaactccgtatcatgcaaaattcactggacatccaacgctgtcatatataatgtggtcccttcataaatgttcttgataatagcctgttaattttgagtcccagatcttccgtgtaatactaaaaaggtcatttcacatttctgagcttcattttcctcatctttaaatttggataacaataattcacctctcatagggttgcttgtgctggttaaatgagataatacatgtaaaattgttaggcacgttttggcaaataatattcaataaatgctagttatgactattttcactaatactactagctaccactatcctttgaaactcactgtacttgagaaacactcaaactgggattcttcaattaaaggaaacctagtgttttagtaaccaaatgtaatatattattttataagcaaagttccagccactttaggttgagcctcttcagcgcactttggagaggttattttcatctgttaactgcccccattagagggtgcagtgcacaacagcacgcagtgaggctacaggagagcacataggcatttttaagcttagatggggcatgaacagtgaggcgaactttattctcacttgatgaatctgatgaaatgtcttctagacttttggaaggcattttcctagcggcactcctttccaaagttttcaaaacaggactgggttcttcttctgaacctgttataaaacaaaatcgatgaacactgcacaataccaaaaaaaaaaaaaatcctctaacatatggacatagaaatggtaggctgaaaagagacattatgctatgagtttctactttaagaagcacttatttcacagaagaaaataaaatttctccactattaatatgctcttaaacataattttcctggtcaagaaatatttgcaaacgtaaaccctacaaaaacaagattaccacattaatagaaatgtgatctcttagttgtttactcctattttagacatatgatttgtcctatgccagacattgactcttcccatttaacattctagcttttgaagacagccatgaaatacttctaggagcattaataaaattaattcaaaaccgt

SEQ ID NO: 915621 - DNA, 4001 bp, Homo sapiens
ttgagcaaaacctgaaaaaggcctcttaggggacagtggaatcattcaccagccaacggttagggctaacgggtcagatgtggacaatcaatctttcattagaccccaaaccacctctaggataaagcaaacagggccctgccccacccacgcactagcagctgggcaggattagggtaggccttctagaacagtactgctgctgagaggctaaggcagtcacagattacctccagaataacggaaactcctgcaccataaatgacataatagctctaagatgttttgcatagtgcctgacacctggtgagaacacaatgttagacatttttgctctccttattccagcttgctcttacttaaggagcacaaagacagtgtaaagaacacaggttttagaatcagagattggatttgaattccagctatgctacttcctagctaagtgactaaaggaagcaatctttctgagcctgtttctcacctataaaatagggtatagtacatcacccctcatgtggctttgtgagaattaaggatatattacatacaaagaagtgtctggcccatagtaagtgcccactaaacagcagtcaacattgccctgctgccgtccccacacctcttctccttcctagctgctcttgatgggttctgcaatctgatttcacctggataccacactaagggtgagaaggggcagaacttcaggggtggaggaaagtgagggaagggaaatgctggagaccttccatagaaatccagccaagtcctcagctcctttcaatcatcctactctatctggctgctccatccagcagacagcaggggtcaccatcctggtggggaatggctgccaacaaggggacgggaagctggatggcagtttgcatccaccccaccttccagggtctatctgtctgaagccccaccgggcttcctctgcacatccctgccgggctgtgtggctcagggggctgacagggtgattcatagcctgttcttatctaggcttctatctcaaccctgcgcccaaagccctggaggctgctggtcacaaaccagcactaaatgaaaagaagaacttttcattaaggcaggaagtggagcccctcaaggtcaaaggggatttataaagagaggaggaaagaaagggaagacgcggcaggatgggtgcagagaaagagagacccacttcctatatgctggtggagccctgtgtcttagacgctaaaaacagtcgcttttccacttcaaaggatgataaagcccactcgtgtagtttatagctcgccgtgggacgaggtgtgggtatggaagagaattccaaaacacgtcttattttcaaaggagaaatcatcatcccctggccggcccttcccaacaccccacctgtaaacaggtgctgacgctcctacctttctgcacctgagcaatctgggggcagttactctgcagccaggtctccccagcacccagccccaagcccaggtcagtccctgaaagccctagaaaacgcgatagctcagcagaaccctcgcctacccgggcatcccagcttcctggccgcctgggcagcggaggtggctctggagtaggtgggaaactgaggaaaggagctttccccgtgccaaaacgcagttcccattttagaactggttagactaaggaacaacattctacaccacctccctcacttaacagaggaggaagcagagaccaagagagggaaacaaagttgcccgaggtaacacagcgagtgggccaagtagagactggaacccgagtgcgcacctccgagtcgctgccgggcagggagcgcgcctcgccgtctctcttgtcttctggcccccagccctcggcctggcggtgcaaaccgcgcagccccgggcgcggcgcgttaccttcccccgggcaaggcgttgcgagccttcactctcccgacggacgctggcggcacggcccgggtgtcgcccggcactgtcaacgcagagcggcgtgcgcgagtccctccccgctacccccgcccccggcgggcggtgcggtggggccggtcccgggtgctcgggccaatggcgcttcgcccgctccccgccccggcccgccccggcctcctcgcccggcacacagcgcctgccagcccctgccctctccccttccctcccttcgccctccgcccccgcctgctgcttctctccggttcctagcctccttctcaagtgtaccttgccccgaaacaacctgttttctgtgcaaataaagcagcactgttgttattgttattattatttttatcacggcgcgttagggggccttggagcccgagagtgtggagcactaggagcctctgcactccgagaagggacagccaccgcgcagggaaaggggcgcggagggtatggagcccggtcatggggtaacttgctttaaccctcgggacgtcaatttcctcacatgtgaaatagaagaaggggggaaaaaagttgttgagaggactaaatgaagtgatgctttaaaatacaataatacctagagaaaggtgagggcgtcatgcactgcctgagctacttactggggtatgcacagaggactggtaagctcctggaagacgctgtgtggcagggaggcagacaatgcaatacagtaaatacaatattgtggtcgggcgcggtggctcacacctgtaatcccagcattatgggaggccgaggcaggtggataacccgaggtcaggagttcgggaccagcccggccaacatagcaaaactctgttctaattagaaaagaaaaaagaaaaattagctgggtgtggtggcgagcgcccgtagtcccaactacttaggaagctgaggcaggagaatcgctttaacccgagaggtggaggctgccgtgagccaagatcgcaccactgcaccccatcctgggtgacagagcaagactctgtctcaaaaaaataaataaaataatttaaaaattgtatcacgacctattttttacaagttacccatgatggggccagcccaggcaaacctctgaaggagatgaaccttaaagcctttttccttatcatttcctggactagtgttgtccatttaactgagggtggcccaggtctgcctttggttcttccaaaggtcttccttctcccaaacttacaaatacttatccccaagggcttcagttagtgcccagtgcaggctgctagcctggcccaagagtcctggcactgtgcagagatgtgtattctggcttccttcagcctttgagagcctggtgtgtccctgtgctgggtgagcatgccacatgcaaaagaggaataagccactggtcttgcctttgaagaaacaaatttgtaaataatttcattttagggtaagtgttataataggttgacaaagtgttgtagagtcactacgctgaaggagggggacaataaaaaatacaaatgtgaccaaggtaggtcttgaaggagggctacaaattaggtcagattgaaggggtgacagaagactgggcacagagaggcaggcagagacatggagatgcctgtcatatgtcacggctattgcacaggatttgggacaatgaggcagagatgaagctaaggaggtaggtgggcagatgttggaggagtggctgtacctgccttgctgagggaagcaggctgtgtcctgttggtgatggctgttggcgaatgattttaggcaggggagtagcgtgacctcagatgcttttggtacttcacttttattgttgattgcacctgccttggttatccccttcctgcccctctctagctctggagggcaggcactgggtcttgctcacctctgggtgccttgtatcatctggcataggactttgaaggaactaaatacatgctgttcccagtatcactcgtcccctggaaacaaatagcaatgcctaaatgctagagagggtcacaggatccttgcttcaggttgtggggcaggcaagtgggggagaaattttaaggcagg

SEQ ID NO: 915622 - DNA, 4001 bp, Homo sapiens
tgcttttaagcagagattcaaacagcatagagactgacaaaagcacaataatatcagcaataacatatatatatatatttaatatacaactctccctcagtggaaccacaaatcattctttcaacacagacaatagtaaaatgttttcaataaaacccttatcgtaatgaaatagctttgcaagctgcaggagtttagtgccaataataaatactgtgttattaatggggttagttatttcagtatatttaatatgtaaagtggaatgtttagtcatttgtgagaaagatcctgctactcacttcttggtacgcattcatttgtaactggcttctgatctggtttctcatctactcaggagggcaacattgagaataaataccattttaacagaaggattaaagagacatgaaagtaaagctcaaatgtcagtttcacaactgagacagcagaatacatctgacaggttttcatcttgctttcatccattcctcactgtgactcttcttcattagcctctttaaggtctcctgttcaactaaaaatctgggatcaaacaaaagagatacggagcatccttcctgtaattcactagaccacagtatggaaaatgggaaggagcactggactaggagtaatgaagctgagattctatttcctgccctcccagtgactgactaactataggatcttagaaaagtcacctaatttctctgagtttttcttatcagcaaaatgaagataaaaatccctgccccatcaacttcagtgaggttgttgtaaacataaaataagaaagacagaacgattacataaaagtaaagaatgacctttaaggagctctgttgctgcatttatatgggaaagctcagtgagtacacatttttatgattatagtgaaggcaaatttaacaacaagtaaataaaatccagcatgcaaatacaaattatacatttgcataaattctgcaatataaaaatcagactcatttctgtctctccctcaaccaaggcaccactatactattcatcttataacagagccaagtaatacctgatccactgacaagcttcaagatcttctggctccattatattcagaatcaacttcaccctctgtctatatttagttatttatataagcagaggcacgatttcccacccttgttctgggactctttcctttgaatttaagattttaccagttgtgcccagagagatctaaatgctgagacttgagaatcaaacagaagaataacttaacccaggaattcactccactcttcctgcctttacaaagagttctgcaagtcagagtagcaaaaatcagctcacatccaaagaaatacaattttctatttatagaaacccttgcttcacaagggtctctgatgagatcctcatgacagtatcaccagaagaagccttaagaatacaaactatattaaatgtaccaaatcagaactgttttatagtaacttaggcactattcaccacatagtggcaaatgacgttcttctgtttacccaacagctgcgtcccggagactgcccaaatcaccccagaagttaatacaaagacagacacgcaaatacataaagatatttaccatcttcagcactacgcactaattcttctggctgattatctacttttgcttgatctgttcagaagaaattaacaaatggttaacatggctgacccttggagagaaaagaacaatgagattgtccctggaagcccccggagttggaagcaattagtcaagatgcaatgaggggtgcaaccaagatgtcttccccaaaatactttctctttagattagctccttgagccagtgccatagcgggagctcccatttcagcccggatgcagctcacatcactgctgcacacagactcccaagggttagagggttagttcagagcaagcaatcggccagcagcaggagaaagcacggggctgcaacagcctctctattcttctgtaaagggtatgatgctagccatgactaacaccttcccaaacccatggtcattaacaaatatttgtgtgtgtgcatcatcattcacatatgcctctgggaggcttgcttgggaagtcaactgaagagatgtaactggggaccagctgctaagtggaatcttggcaggctagtgtgagagtgggtatcagtatttggaagggagcgtgcaggaatacccgtcagctgatggtgatttttttttaaccctatacattcctgagtactttaaagctgcaccatggaaatagccccatgtttcacaggcaagaggtttgctaaatgggccaattgttctgagattttttttttctttttttctttttctcaaggcccatcaccaacatcaggaaaaacaatcagggctgtccaacaaaggattcgactcgccttctctggaagcattcaggcggatatgggggttggccgcctgttgaggaggctttagagagaattcctgcattgaggggaggttaaaatgggtgatttttaagatcccttctaaccctgagattccaagatccttgggatagtcaggactacattccaaattgggaatactgtcttcaaacccctgggaatctgtgaattttaggaaatgtttggtgaagtggctttttcttttctttttttcatttttaaattctgactttttattcttaattgcaaatgcacaaaaaatattctaaacataacaatggccaattttcaatcatatgagtttggcagtggttaacttttcacttgataatttttcttatgaccatctgcaatcccaggggtgcattttagcttgaaaatagcaagaacaaaaccccaagaaatcatggtttcttagtccatttgtctagcacacaactctctttatatattatgttttctgctagtactcaagaaatccttcaccattaaagcagctgccagtggggaatcgtgtacctaaagtctttcatgttaagtagttttgggcttatagttccagtatctagaagaaaagtgtgaacagaatagaagggataaaagagaaaggaaagtccttgaagccagggactaattcaactccgtatcatgcaaaattcactggacatccaacgctgtcatatataatgtggtcccttcataaatgttcttgataatagcctgttaattttgagtcccagatcttccgtgtaatactaaaaaggtcatttcacatttctgagcttcattttcctcatctttaaatttggataacaataattcacctctcatagggttgcttgtgctggttaaatgagataatacatgtaaaattgttaggcacgttttggcaaataatattcaataaatgctagttatgactattttcactaatactactagctaccactatcctttgaaactcactgtacttgagaaacactcaaactgggattcttcaattaaaggaaacctagtgttttagtaaccaaatgtaatatattattttataagcaaagttccagccactttaggttgagcctcttcagcgcactttggagaggttattttcatctgttaactgcccccattagagggtgcagtgcacaacagcacgcagtgaggctacaggagagcacataggcatttttaagcttagatggggcatgaacagtgaggcgaactttattctcacttgatgaatctgatgaaatgtcttctagacttttggaaggcattttcctagcggcactcctttccaaagttttcaaaacaggactgggttcttcttctgaacctgttataaaacaaaatcgatgaacactgcacaataccaaaaaaaaaaaaaatcctctaacatatggacatagaaatggtaggctgaaaagagacattatgctatgagtttctactttaagaagcacttatttcacagaagaaaataaaatttctccactattaatatgctcttaaacataattttcctggtcaagaaatatttgcaaacgtaaaccctaca

SEQ ID NO: 915623 - DNA, 4001 bp, Homo sapiens
cccaggctgcaggtgagaaggcaaagggctgagggcccaggcagttgagaagccctagagtggaacagcacagagactatgcaaattaacttcctaaattatctttcctgtacagctgtggggggtagcctgtgctctggagtacaggtccacggttcacgttccagtcctcccttcccctcccctgaatctcactcacagacaatgcggcagtgaaagagccaggagatgttggggctgcgttccatctgaggcagagcacagaagaggcctgtcaggaggcctggggctcaccccacaccctcaacctagccctccctgctccttaagcctgcccgctggctactccctggcttccacctgctccagaactccctgccttgactcacaaagtccacacggtcctcagccagccagtggaaacatttgaggaagagaagaagagtgaagagtgcaacaaagcgggggctgaagtcatcccgaaaaacggtgaaggccagacaagtctctgtgacggcgtaccaggaacgttccagaaggtgctgggggccaggcagggaataatgtggataccaaacattctttcccagcaccctgccctcacctttggggcagccgacatcttacctccatctctgctgccctcagttgcccaaagaacaccttgcccatcaccttgcccagaaggaagacaaggacaaaggcctggatgtacaggacctaggagtggggagaggctgtggtttgaggtcactttctgctttcctctccttgggactcatcatgcaggatcctccacatcctcatcacagtttattcaaagttaggcagctggcggctacttccctacttacctgacctctagccccgccccttgcccaggcagactcctccttccctcccagggagttcctccctccctgagccctgaactcactgccatgctggggctggacttggtcaggtacaccacagtggggtagaactggtgtttgaggtagtaggcgtgagccaccacagccccggtcagcgccaggctggccgccatcatcactgccgtgcggaacattgccctggcccggagacctgcatggggcaagaaaataacttatgtgatgctcgtgctgtgcaaaatagcccggtgcctggcacagcctcaattcataggagaaagtgggggggaaatcacatttcgccctcgaaatcatcagacaaagaatagcttacgctaccccattttacaaattagactcgaaggggttaagtgatcacactgacgcaaggcctggaacctgggtcagtcttgcttcaaatctagggctctttccacgctgcctgccaagccgcctcctctagggaggtgatgaggaaaagctgcaatgttggaggagggggagctgcaccgctgaccctccggtggagaagatggggtgggaggcaacagcagaaatctgctccaggggcgggaatgcgcagccagggctgagagcagccaaggcacagaggatagcaggctgggcaggcgacagcgccggtgacagctgtgttagggtgggcagttcggacgcccgccctgcgggagcgggcggggaacgtcagcctggaatcctggggtcccccgacccccggagtagtgtcaactcagagcaccacaaaaacagcgggacgggagagagcagcagcgggacgggaggagccgggtcgccctcgcggccgcgcacctgtgagcaccaggagttgcgggcgtcgcaggcagggcccaggcttgagcaaagcggccgcaccggcgtctgaggtctccggccagctgacaggccgaaagcgtgcggcggggctgaggggcgtgccgactccggagacctcaaggggaaggttcgggtcccgaccccaaccacaactcgggccagacttcgccccactcaccaggaacccagcgccgcgagcccgctcaatccgcgcgactgcggctgcccctccggttaacaacactccccaccccctgcgaaccggaacttcgggggtcagacacctcacttccggcggcgcggggcgcggcgtgggtcgtaccaagtgcgtcctgccctggctcgcactgcgccctacgtgggcccatagcaatggtgtcaccaccgtatctggggtgatgtctacggggaagggctgggcaagaggtccgagaggtggtcggaaggtaataaggcaacaggggggagtcggaggtccccctattatttattagtcacagatggtatggctcctgcgctgagtggcctcctcggactgggggactcggccccgcgagcagctgggaaggggagccgcttgcgggctgtaccacctggagcggggagtaggccagggacagactatacaagcctgaggggaatgaaatgttttcttaaacatttagggagagtcacaacagtttgacaaatacggtgctctctgagagaactggatgcggaaaacaaaaatttgtcttctccatgatcacccccacaagttgtgtgggagtgagttgggtcccgtggctgccactgattggttgcgataagttacgcggcccaataagaaaaagaatgtacctttgctggcctatagaaaggggaaagcaggtgagtggttgttaggggcggacagctgcgttgcctaggccctggtcccgctccagttggctgagagtagggaaagctcagtccttgggcgagtgatccctggctggcctccgggaacgtttgccgcgccaggacagggagggacaaccaggtgtacccgagactgggagattaattcctgctaatcttgggacggaagtgttctgtttgttcaaaggaattgacttcagcgtcgcaggcctgcccgcatctcagtgtctgattttgctgcccatgtgttgttcagctctgagccataagcaagacccccactggtcctgggctgcactgtattttagttcgtgtctgggtcgcagccaactaagcctgctgattaacaaaatggagctaatgcatccactttgtgccttgcgttttcctccgtcatctcatttaatcatcaatcactaaggtttatgagctagggggtgctaccccctcccccgaaacgtggggcaattgaaattcaaaggcttaccaaaacctgtcctaggattggcgccaggtctgtctgcctctaaatctctgtgctgttggtctcagccatcttccctgccacctgttgacttgacagtttcagcttataaccagtcagagttggcttccccgtaaggccacgtataactttttttcccccttttctttttatttatttatttattaatttttgcgacagggtcttgctctgtcgcccaggctggagtgcattggcgccatcagggctcattgcagcctcgacctcccgggctcaagcgatcctcccacctcagccccacaaggtgttgggattacaggcgtgagccacaacaccttgcctatctgtaactttctagtgactgcatccaatggttggctttcagcccttgcttgactcaacctctctccccttcttgaaagtctcctccctaagcttctgtgatccacatgcctctgctcctcttttctctctggctatgcatgtgtcctcttctctttacctgatgtccttctctttacttttcctgcatgatttcctctgctccagtccagcccctgacccaggtgctgatgatttccttgtgtggtctccagccgggatctatcctgcttttaaaacagttcagtgtccctagacactgtctgcaccccagctccggaaacgggcatcatgctcactatctgcccccacatccaaactggtaattaagtcatttattcagttagtctacaaatatggatcaagtgtctcctgttctagggacttaggatgtcagtgaacaaaataaagatctctacctttgtggagcttatcctagtagatgtgacagcaaaccacagacataagtgaaaaatctaatacgctggaag

SEQ ID NO: 915624 - DNA, 4001 bp, Homo sapiens
tgctgacctctccaatatggagattggaatgaaggtgagagcacaacagcatacatttgtgttgcgggagtggttggtgatggtgaaaataactgtagtgggccttggctcctcacatatttgttcggatatacagtaatcctgtcccaagggccagtggcttctctctacatgacagactcaaattgtgaggctgctttttttcttgtattcgcaggtggcattggaaggccttcggcctaccatcccaccaggtatttcccctcatgtgtgtaagctcatgaagatctgcatgaatgaagaccctgcaaagcgacccaaatttgacatgattgtgcctatccttgagaagatgcaggacaagtaggactggaaggtccttgcctgaactccagaggtgtcgggacatggttgggggaatgcacctccccaaagcagcaggcctctggttgcctcccccgcctccagtcatggtactaccccagccatggggtccatccccttcccccatccctaccactgtggccccaagaggggcgggctcagagctttgtcacttgccacatggtgtctcccaacatgggagggatcagccccgcctgtcacaataaagtttattatgaaaacaggctggtgtggggacatggggacagataagtacatttaggttgggtggctcaggtgaagtagtgcggcttcttcacattgatgccatactcgctgagggcaggggtcaagtcctccatggttagagtgtacttgcggtcctgagggaagagggaagagcaccaactgagcacaggaatcccggacttcaatcccagatgggtgaccctgagtaagtcttacacctcccctacgattcagtttccccaaaggggtggcaggataagcctccactgttgtggaaggtaattactgattcattaagcctcccctcacaccttgctcttgctccgggagctgccggaggccgtgcccttcattttgcagtgctgtagggcatcattggcaatatctgagatgaatttctgggcagctaaggagatgagccgaattctagagagaaaaaacttagatgagaaggagatggacaacatactgcacaagcacccaaaactaacctgccctgggtttactcacatgcgtgggtctgaggcctcaaagccagcacggttcaggtagtaaccagtcactgcatctgggatctgagaaatcaattaagagaactgtcagcagagcgggaggagggtgagggaaatggataggcctgattatcaggaagctcacagtttgggtgagcagagggcaaacacagaagagcgactaggggagcaaatggaagagaacgctgaaaagcacgatgtggctgaaagttttgacagcaggctaggtggccttgttcgggcggaagcccaccgtaggcgtgtaatcttccagctgcatcaagaagtccaccaaaggcgtgctggacaccacgggcttcacgtctccgttggccgcgctcggcagtacgtaaaccccgttagatatggccccctccgggggcgccgcgccacccgccgacaccggagctggaggagaaccagcaaaatgagacacagaggtgggaggcgcagggccccagctaggtctgtctataccctctgccctcacccgccgctggacccagcccaagacgcttccctcgccctcacccgtcccggccctcacccgccccacgccgctcagctggctccccggcccgcgccgccaagggtcccgtgcccccagcagctgctccagccccaggtccccccgctgtccccgcggggctggccttgttctccgcggcggtgctggagggcagcgcggcgggagccgagaccgggggcgcggggcccggggccgaggcggcggaggccggcgccgcctcggggtccgcgccggagccgctgcagctcatcgggccggtgggagaggcggcgaacagagccgcttccgcttccgctcgcgccgcgcacaccccggggtgacgtcacgcgcccacgactcgccccgcctgtctctgttagtgctctccagcccgctccccgcctcctcccatagtggatctgcgggttagaggaaataggctgcagggcggagaccgagccttggcgaactgcgctgccgtagccattccgccctagcctctgccgtgctccgcggcgattccgtccagaccggaaccagcgtgcgtctggctctcctccgccgctctgggacacctcattctgtctgacgctcaagacctggcttcgacgtttatggccctatgtccctcgactacgggttgcctgcctgtctgcatcgtttcaagttcccttattcagccttttaaggattcatagtggatttggaaagccccctctcttctccgccagctgccccgagaggtgggggcagcagtggggcggcacacagtgctgctgtaggaggaggaggagtttcagcctgagtcaacaacatatgcaaaaatcacaacgaatgagaggcgtgaggttttcggtgtagcagacatttaattcttatttgccaactcctgagctaggacctgggaacacaaagttaaataggacacgattctagtcctctaggcaccaacggtcttggaaaggaaggcagacaagtaaactggccatttcaatactacgtggtcgttacaatgctagaggtaggcacagggggcgcagtgcaagggaggaagggcgttaacatctgccacctacttccaggtgccaagcactgttatcaacattattccactttattccctggtgattatgaaaggcaggtattgatattcacacttaacagacgaggaaacagcctcagggagataagcttacttgacccagtctctctcctagtccatatcagaaccaagattcaaacaggttttgtttagaaaatctaggatttttcagccataccaaaataaagtagcctcagggaatcaaaacattcacgaaagaaggtgacttctgaactgagtcttgcaagaattctggaaattaacctggcagttgtatcaggggtggtaaggggacggaacagcttgagcaagagtgagagttccttggggtttggggagggaggaggaaaaatgattttttacttaagaacaaatagcaaggaaggtttgtgagctatgattgggggctggaggggaaagcctgaattctatccagtaatccttgaagggttttcatccaagtggcctgatgggatttgcattttactctggaagatgacttggggattggcaggaagtaaggacactttttttcaagagaatatagccctaaactaaggtagtagcagtggggatataagtggataagttctagatatacttgggaaatataattggaaggacttgtggactgataaagatatatttaagatgtgcagtcagtaggacttgttgattgaggacttgttgattgaaggtggggtgaaaagatgacacaggtttctggcttggttggaaaaagcatagcatcatttaccaagaagaaacgagatggaattgtttggggttgggaaggtggacgatgaaatgttgagtatcacgcatcttacatttgaggtatcaatcattattggatagaaagtcttatttagtgagatggtaatggttgtagatgtcagtgatttgttccaggggacaatgagtaaactgagaagagcaaaaatctacaaatggagcaatgaaggtcagcattccatgaagaagcagaaattgatgagagaggaagacaagagtagtcagagaagttaagacctggaagctaagtaaggagagggagtgggcaactatgatggaaaggccataaagcaaagattgagaagtatgcactggaggccattgtttctggatgtcagggtaggaaagagtaaacggtgacagtagaggtctccttgcagtgaattggggaatgaatatcaagtgaaatagtgcacagagtctgtataca

SEQ ID NO: 915625 - DNA, 4001 bp, Homo sapiens
tgtattcaacgcaacaagattccaaaaaagtaccgtcccttccaacaaaagcatctttcaatataagtaaaaaatgtagttttatcattagccacatattttaacgtacaattaccaatacagtattaatgtacaattaaaagccgttttccaagatcaaagggggaattcctaaagcaaagtgtgccctatataaaccaggaaaaggatctccaatcaataaaccattttaaactcctaatcacctctccattataattcctagattcttcattcctagattcatttaagcaactgaactttgtcatattgtatctttgccattattggtggaaactgacaagttctgaattctcaacctttttcaatgaactatcataattcttgtgtcttcatccccatggtagagagtatacaacataccaaaaaaaaaaaaaaaaaaaaagaaaaagattccttcttgtgagctaaaagaaaaaagaaaaacaggttggtctgggtggctcaggcctgtgtaacacagcactttgggaggtcgaggcgggcggatcgcttgagcccaggagctcaagaccaacctgggcaacgtggtgaaactccgtctctacaaaaaatacggaaattagccagaatagtggcgcgcgcctgtggtcaggaggctggggtaggtggaatacctgagcctgggaggtggagcttgtatgtagtgagcctcagcaacacaaggagacccttgtctctacaaaaaattcttaaaatactggctaggtgtgttggcccgtgcctttgctcccagccactcgggaggatcgcttaagccgcggtggaggttgctgttagccgagattgcaccactgcactccagcctggacgacagagcaagaccctgtctcaggaaaaaaaaaaaaaaaaaaaaaaaaaaaaaaaaaggcatggcaacaaaaattaaagataactacttatttcattattgtacatgccttagtcaatctcttgtctcattctgtagcttcttgggacctgacatgagtcattacatataaatcctaggatgaactagcaaaatatttaaaatatgaaacgataaggtcaccaagagctcagatttgttaaatgccccctgtggtattttcctggtacaaggtcttactagtttttttaagtacaagattctacaaagtcattaaatatcgaatgctcaaaaacggaattcaacaaaaatttgcccccatgctttaacggtatacctgtagttaattttttttaaaagtagggattatcaaaataaagctagctcaataatcactttttcgaagtgtttagaagacactcctacttgggtgtcgatgcctccgtggggattctgcaattcttagaggccacgtgggcagagagcggcgctttacccggagctaacgctgtgaccaccagcgcctctcacccggcagcgcctaacctgcagaaaaccggcgcgagtaatgggtacctcacatacgaaggttaaatcatttaaatcacgtaataaggttaaacttgtccgcaacacgatttaacacctccatctcaagatataatgaagcccgtccacactacaaccacgtttgtgtgggactcataccagccgcgtggcgcggagtggcctgcggccgtgatcccttcaccctctcggaccgacttcggagtctcgatcctccggaccaacgaaggggccccgggaaaccccagatatgcaacgcctcccccgcccgccaggcccggacggcctcgccctcttagcaacctacctaaaacggcctcgcagtggccccaaccgcgcacttgctgcttgtaacccaggcctcggcccaaaacccgcgactggcctggtgtcctagagctctgtacacaccaccctcccgacctcagccctccaactcccgataaccagccgacctcctccaaccgtgcggaagaaaagggttggctatttccgtggcccaagtaatagtcaggccgaaatctcgcgatacaacttagcttccgggaagaaggcgagcggtgggaggagacgcgacgtgggggcgccatttttctcgccgcgcagggaggactgactaacgtgggcggagctctagctcgcgtattctgaggaggcggggttggcctaggcgaagatccggactctgggtgttttgctaccgtgaccgtttaggtgagtggaatagccaagaacatttcggcaaataacaaaaacaaaacgtgcggtcacttgtgagtggatgagaactgtgaggaaacagcctctcagcccggttcgtttccggtggtctcgcgtttgctgagctgtcgcctggctttctaaatctggtcccgggtgtgtggcgagggtgacgggtgggatgtgtgcctgagtgttttgtaatcctttgtctatttctgccttcagaaacccttgtgtgttaaaatattggagaaggctcattctttgaccatgactcgaagtgtgtaacctttgtgctggacgccagtgttattccatagcacgcccaggtctcctccccacttttgcacctgtttcgtaagctcaccctttctgcctcccaggagttggctaacatgtcacaagtgagacctgtggaggatttgtttttcctaagtttcctcctacatcccccctgccccacaccattagttccttgaccggttcctgagttaagattaaacagtgtaaactagtttagttttggtggggtttttttctcccaaagtaatttttttttttttgagaccgagtttcgctcttgttgcccaggctggagtgcaacggtgcgatcttggctcaccgcaacatctgcttcccgggttcaagcgattctcctgcctcagtctccccagtagctgagattacaggcgtgcgccaccatgcccagctaatttttgcatttttagtagaggcgggggtttctccatgttggtcaggctggtctcaaactcccgacctcaggtgatcctcccgcctcggcctcccaaagtaattttaaaaaggaatgaactggtttgatttttccgctttcaaaattctgttttcatatgataaaccacaaaaatcagtaaagctgtctagtcttattttatagttcacattttaggattgaacgggccttaaaagtaatctggtctctttacctgctttgctccatagtttggacaattccggggataaaaagtccgatcctttaggcagcccactgcatttgatccacagggtctgggcaatgacgaagctccaggactggtatggcatgtccctcactgccgtattcagcagcaagcctagctgtgtaatttgtgaggctcaatgcaaaatgaaaatgcagcgtcccttgttcaaaaagaaggggaaaagtgctattaaagggaaggaacatttaactcctaatgcagaatcattgaaatttcacatttcattttgtattttttcttttttctttttttttttagaaacagagtctcgctctgtcgcccaggctggagtgcagtgtggcccgatctcagctcactgcaacccccacctcccgggctcaagagatccacccacctcagcttcccaagtagctgggactacacgcgcccgccaccacaaccggctaatttttgtacttttagtagagaccaggtttcaccatgttggccaggcaggtctcgaactcttgacctcaagtgatccgtctgcctcggcctcccaaagtgctgggagtacaggcgtgaatcaccgcgcccggccacatttggtatttctctgtttgtgttatagagacagggtcttgctctgccacccaggctggagtgcagttgaagcaggatattcctctgaccccttcgtgggtcttgcggctgcggtgcctcacttacttagcccacggctctcaactcctcgcgggagggggggcgcgagtgaatgaggcgggaactggagtgctggaagccacgaactccagtcacccaggcctgctgcgctccac

SEQ ID NO: 915626 - DNA, 4001 bp, Homo sapiens
tggtggtccgcgcctgtagtcccagctactccggaggctgaggcaggagaattgcttgaacccgggaggtggaggttgtagtgagccaagatcgcaccactgcactccagcctgggcgacagagcaagactccatctcaaaaaaaaaaaaatttgtaattataggccaggcatggtggctcacgcctgtaatcccagcactttgggaggccgaagctggtggatcacgaggtcaggagatgaagaccatcctggctaacacggtgaaaccctgtctctactaaaaatacaaaaaattacccaggaggctgaggcaggagaatcacttgaacccaggaggcagaggctgcagtgagccgagattgcaccactgcactccagcctggatgacagagctaaactcagtctcaaaaaaaacacaaaacaaaaaacaaaaacaaacaaaaaaaaaagatcttctaaaagaaagaaagaagaactattctttttttttttttttggagatgatgtctgatgtctcactctgtcacccaggctggagtgcagtggcttgatctcggctcactaaaacctccgcttcccgagtagctgggattacaggcctgtgccgccacacctggctaatttttgtatttttagtagggatggagtttcgccatggtagccaagctggtctggaactcctgacctcaggtgatccgcccacctcggcctccaaagtgctgaaattacaggcgtgagagccaccgcacctggcccgacgagctttttttttttttttggagacacagtctcgctctgtcacccaggctggagtacagtggcgtgatctcggctcactacaacctctgcctccctggttcaagcaattctcctgcctcagcctcccgagtagctaggactacaggcatacgccgccatgcccagctaattttttgtatttttagtagagacgaggtttcaccgtgttgcccaggctggcctcgaactcctgagctcaggcaatccaggtgcctcggcctcccaaagtgctaggattacaggcgtgagccaccgcgcccggccacgaatagcactgtactatgcctgagacacagctaagtgctttatatggattacttcactatattctcaataataagatattattatgtatttcgtctatttcacaggcaaggaaatcaaacctcagaggctaaatgttccatgacttctccaagatcatgaagtaagcactgagtaagtagggagggggagcaaggactcaaccccttgctcctaatctttactctataccgcattcaggagccgccagctgtatggggaacaaggcctggatcccaccccaaagacatggattggagacccaccccttggtgaccctagacccgccaatagatcgttgtgaagctgcagtttccctatctgtaaaatgggagcatttagtccaccagcgcgaaaggcacggagggagtttccctattatatgaccgtacacgaaatctagactgtgaccaaagtctcccgctcctcagcctcctctcctccgcatcctcagccactagtcacgctggagaggaggcgtgggaactgacctccgcgggccgggcctcggcaacgcgcatcctcccacccggcctagcccagcccagatcggggagggggtgcgcggggggaggaggtcaggggtcactgaacttgggtcacgtggtcagccaagggggcgggccctcgcggtgcgggctccaagactggtgagtaagcagtcggcgtcgggaatggggagtccttggaccagagcaaggcctgctcacctgaagaccccggcgtggcgaaggctgctaccgagacgacggcggcgggggcggtggcggcggcgcccactcacgagctcacactcattccctctcccggggccccggccccgccctccccaatacagccagtcggcgggcgccttggaaagtttccggccctccaggaggcttcctggctcttgattggccagtgtgaacagactgtagagaccggcggtcacgtgacgctgaagattcccgcttcttaaagcaacctctcttgctacgtttgcgagtaggtgtgtattgttttaacacacgtttaataagcatattttattttttttaccaccacaatagtaacgaggaaataaacagtctcaaagacagcgtcttgattttctttgtcttgtttgctcgcgagtttctgagcacccgcattttcgcgactgcagcaaagctttagattttggtgtctggcttagttttcctgcccggcctacctccccaacatcacatgccacttccccttcctgaagggatagatggggctctcggtaggtgttctcggcaggcagaagggacttctgacccggccgaacatcccgtgcaagctccggactccagggttctgctctttctgcacctacttcgcattctccccacgcctgtgaaccaaatacaagccctggcctacctcgccttgcatgaccgttggacacgcacactgacagctctctttctccaactcccactgcaatagcagctacttgggcagttcttaattgataagcagtgggcttagtgagtaaaggatggtatttggaatcagaccgacctgggttaaaattctgacactgcctttgggcaaattacctaatatggagtaataatgcgcacttcacagggttgttgtaaattaatgtctgtgagagtccctggcagagttggaggttaaacttctttcccggccgggcgcggtggctcacgcctgtaatcccaacattttgagaggccgaggcgggggatcacctggggtcgggagttcaagaccagcctgatcaacatggagaaaaatccatctcaactaaaaatacaaaattagccgggtgtgttggcacatgcctgtaatcgcagctactcgggaggctgaggcaggagaattgcttgaacccgggaggcggaggttgtggtgagccgagatcgcgccactgcactccaacctggccaacaagagtgaatctccgtctcaaaaaaaaaagagagaaactttctttccctcacatgtcacaaggcatacagtgaattcctttaagttcacccaagatggggtagtttgcactgagtgaactgtgggaacattctgcaagggagcatgaatgtacacattttttctctttccccctctcagggttagatgctgctgccgctggaaaagaaaatcccctgggacccgagctggcaaagccagatggatgcgactgtggttgccatggcaaccccacctaaggagaatgtgaccctgctgagtctcttccactcatattcagaaccatattagaagtggtttcaagtgtctgcccacctgtgcgttaagggaaagagagagggcgctctcctctaaggtctgactgagcctgaagtcagcttagccagacctgggcagctggctgacctccttgcttaggtttactgttctggacagccatcagcaaccttggagacactagaagatgggagggagaccgggactgcccgggacctattagatgtagtgaacctgtatccaacctgtctggagctcatttgctcccaatctgagtggaggcaggaaccagggaaggcagtagtgagacctccatggccacagatgggagaaaggtggctcgctccacacacccaatgcctggcaagaactatgatggctttggtgtcagactttttttcttttttcctttttttgagacggagtaacaccctgttgcccaggctggagtgcagtggcgcaatcttggctcactacaacctccacctcccaggttcaaatgattctcctgcctcaacctcccaagtagctgggattacaggcacttgccactaccaccagctaatttttgtgtttttagtagagacagggttttcaccatgttggctaggctggtctccaactcctgaccttgtgatccacccgcctctgcctcccaaa

SEQ ID NO: 915627 - DNA, 4001 bp, Homo sapiens
tcatcgaagtgcccgtcattgggcatccctctcctccttgcgtctgtttccttatgtgtaaagtgggggcaggaccacttctgaggacccagttctctgagcactggggatgaggtgggctcctggcccagccacccctctccctgccagtgatgccagagaccccaaaggcagagtgctctgttctgctgttcagctacaaacagccaatccctcccttcaccctgtgtgtcccacccccgctccccaaccacccaaggactcctgcacaaagaactgtggtccaaacccccaagtcagctgggaccaggtgattttggtagccctgcatcctggcttccatccaccccagcctctgtctcagcctttgcaccaccatcccagacaggcatccaccttctgtctctggccctgcttctacccccactccacctgccctcatgtctgccttccccttctgcacccctgctgggctcctgaggaacaggatggaaggagagtgtgtcccctacccccagcttccagtctcaggagggtcagaacagacaatacaggtcaaagcagcaaggctaagggtgacaggtacacaacgctgcagcccccagatctagagacaagattaggatttcggtcagagggggatgaagcacacaccatccccactcccacccagcaccaccatccttccccttcctcctcctgggtcagggtcgaaaagtggagaatccccagaaatcctttagagtcctctgatgaagcctcccgagtcctgccttcgagccagtggggagggggagaggaggatgattacagggcggcccccccaggggcatctcaagacactcccaggacagcatggacaggcatggaccctcctgccctgtggctcctgccaggacccctcccctgagctgcccagtgggtgaaagtgggcagtggagaaagaaagtccagggtcaaacgggaaggtggcaccccctaccagcagaagcccagaaacacgagcagagccaggggcccctgcagggctgctgtgccccttctctcttcccaaataggagtgagcacacctggacctctgagagggcaggagggtggctcctctccactccacggacaaacaggagtggcctggctacataaatgtgtgccatcctcactgctacctttggaatagcaacttcgaaagggaaccaccctttgggaaagaccaagggtcccaggcctgccccgcctatcactccaaagctcctccttggcagtacccgccccccacccctctgctacagtgggggtgacctcccactgtcagacagtggaaggggctgcttgtcagaaggacaggccttccgtctccactctttgcccctgactggaatacaagagttctgtggcccttcacattgtcacagggctatcgctgctgctcaggccctggggacccgccagagtgggacaccgtgctccaacacaggtgcgttcacacactcctcacctccttggaagttctcctggaggggcaacagacagtagagccttggcctaaccggccggcgcctgcacccttacacacaccttgtggatgtggctggctgagatggggagcctccctctcaccccggtggtttccatcaattcctctgcactagccaagtcatccggggcatttcaatgagcccggggctgcccagtctgagagagatccaggacgctagtgatccagcccaccctgcctggagcttgggcccccatgctgactgagagggtgggtttccctagccagggagctggagctggcgcctgggacctcaggagagcctgcctgaaatgcacccactgctcctgtccagctccagcccaacttccctccaagccccagccaatgcactcacaaggcttcctcagggctcgcaggaaggagtgaagacttgtgtctgggttcggacagacaggatggggcgctggctgggtgaggggtttaaagggctgccgccgtggtgatgtcagcctcccccactggctcgctcctcggccccctccctgctagaggaagccggctccgctccccacccccggctcccccagtgactccacacaggctccatatttggggaaagacaccaagttggagcagtctaccggggctgccgagacattctctgcatgctttggagatggagcgggccggggcggggcacgctgccggcggggagccggcccgggaaaagccttttatggacaggaccctgcccggacttacggctgctcctacttcactgttctctggccccgagtttgagaagagggggagttcaatagagtctggctggagagaggggcaaggggctggggagccgggaatcccaggggtttgtggggacaaaccagccaccctctcctcctggggcttttagctctgatgggacatgggatccaacctttcctgaggacctactccacaccaggccctttgcagtgctctcattgaatactcacagctacagtgtgagggtgtaattacatccccattttatagatgaggaaactgaggccccgagtgcgtcttcctcaaggccacatggtgaatggtaagtggcagatcctgcacacctctgccaacccgcatgggtgcaggagaggtggtcagacccaccctttcaattggaccaccctgctcaggttgagaagagctttcagtgcaggtaggtcttgagttatatgctttagttggggctgggatttgagggttcggcagaagctgagtccaactccggtccccatccagtgggcagtgtcaataagagggtctataaggcctggcagggcctgagacactaacgcaggagaaggaggctcaggaggctggtatcatcccttcctccctttaggaacagtccctaccagcctggaaaacagaccagcctctgtcactccagagataacccactctcatcttgctcgtacctggcttcagggatcttggggagagataagaggttaaaaaaggtgagactaacagtgggatccctggactgactgctgtggcactcccctgcaagggcatctggtagggaagacctaacactctccactacacacacactgccacacccggcaccacccctagccaaacaaggccctaggagggggctgccaggcctggcagaggaggggcccgcctccgcagttctgcccactgcaactggacatgctccagagcccaggggaggcacagccatagcacctcccagtggcgcctgcaggaaaagcaggaagaggagtgggccctggcgaggggaaagcccactcctccatccctgaccctgcagacctctggttgtgttctgaattcaacagattccttggcccccaaatcatgtcctccttagccgactgaagtctaaatgaatctttcagggacatatcaaaactccctcctcttggagcctgcccagctttcatcaccctcctgcctcggcctgcacgctgagcggattataaacgccgcatcagggagcactgcttgggcctgtggcttggtgagctgggggccgctcaggtcagaggtgaagtgagcctcagtctggtgggcggggccaggtgggcagagactgctgttcctggggaggtaaggagggatgtctgcagtgggatggcgtgggaaaggcttttccaggaactggcctctgtccagcacagtgccccggtaaatgtttactgaattaatgctgttgctggagggacaggaaaaacgggagaatcaaggaattgcagttcccagtagggccatggcttgaagaatggggaaatggaagacctccgcctctcccctcatcctcaacagctccacccagagggagtgcaaacaagggccccaagaactgagtctggttgtttattgaatgcaaattcattcatagaaaacggaaatgcaaccatagcatggagacgctctgagaaaagatccagacccacctcatctcccagcccttcaagcagag

SEQ ID NO: 915628 - DNA, 4001 bp, Homo sapiens
gggtttagaagatttttttttttttttttttgagacggagttttgctctgtcgcccaggctggagtgcagtggtgtgatcttggctcactgcaacctccgccttctgggttcagcaattctcctgcctcagcctcccaagtagctgggattacaagcatgcaacaccgcacccagctaatttttgtatttttagtagagacggggtttcaccatgttggtcaggctggtctcgaactcctgacctcgtgatccacctgcctcaacctcccaaagtgctgggattacaggcgtgagccacctcgctgggccagaagttttcttaaaaaacaatacaaaacaaaaccagaaacccaggactccccagccctcctgtgggtgtgggtttaggaaaatccatctttattggccctgcactgccaagtgtaatggacctgacactccgcaccagctctgccctaactggtgagggccagtaaggaacaatacagatgagcgctctgtccaccaggcaaactgcaaattattctcagtgctaagaagggaaaaaactgagcagcagaaaaatgtgtagccccttttctggagctttctttcttatgaagagaggtctggactacaacgggggggctgtgtgtgtgagggattcacagctctagctttggatctcccaaagaggggtccggagcagactgtggcaccccaagccagtcactgaatccccatattttatggttaagcagccaaacatgccaattcactctctaggctctgctagataaacaatgcccttactcagttaccaaagaggaattaaagcctgtttctcaagtcaccatgagaaagcagaaaagagaggaagtcacttccgtattaggtgctcgcagcattcatccatgaagcgtttcatgattttcttaaaaaatattacttgttctcaacaaaacatagacacaaggctcgtctactctgcactgcagaggacagaagagctaagtattaataaataatccttctttgtattttccaagttctctccaatgtaaacaactcaagcccaggaaaatccagtatttaacagtgtaccaaccctgtgctttcatgggcaccggcttttacccacccggtgcgtctggcggtggctgtccagcaggccgggcacctgccgcccacggagttgtcccactgggcaccgcagggctcaagggcgatggcagcactggcagcttctggtcagagctagctgatgtccccgctctgcagacatcagcccaacaaaattgcatctcgctgaccacaaactggccacgtggaagtcagctcgaagctctaccctgaatctctcctgaactcaaaggctctgaaagctgcctcgacccatgaaggtgcacagaggggctcccgcgggctgcccacagcccgtcccgggtgcggggtctgagggcgcagccgaccccaccctgggcggagggcgaggctggggctccggcttcgtgccccacggctcgcaaggacccgtcagtaccgcccgcaccgctgaccccagcaccgagcccctcacggctgaccccagctcctcacggctgcccccggccctgctccctcacggccgacccgggccccgttcccctcacggtcgccgctggccctgcgcctctcacggccgacccgggccccgctcccctcacggctgtccctggccccaacatccggcacctgcgctcattcctcccggaacgagccgcccggggcaccgccacccggtccgcgtcccggaacgggagacccggggaaatcggggcgccggggcctctggagggcgcttgcgccgcgcccgggctccgcgccgtcctcaccgtggaagtcgcccgtgtcggccaccacggtggtgaactgcttgagctggtccagcgcggactccatcctctgacgcttcacgggtgagctcgacatagcaagaccgaggggtctgcggcggcggcggcggcgacgggacgggcgcgcggacggcccacaatgccccgcgggcggctgccaatcggaaagcggcgcgggagggcgaggcccgctggtccctgcgcgcctggacgaagccccgcccccggggacgaagcccgagcgccactgccggccgcgcaccgcagctgcggatcctacaggctgggtctccccaggtcctcagcagccgccgcggacgggcccgggaaaacacctgcacgacacggggcggctgggcctcgcctccttcctgccccgcgggacgcaccgggagggctggaggagatggacctggcccgggtgccgactctgcggggctgaacccgccagggccgaacccggcgatgcaggatccatggtggggccaggactggggtcgggggccgctgcaggaagcaggggagggagcggcgggggacgccctgcgggtgcaggaggcagagcagggggcggctgcagagcccgggcgccggacgcggcggggaacctgcttctgggaatctgttcccctgagtcctaagcccagaggtgtccgggggaccgaacggcgaggcaggcgtaggaggcccagctgccctgcttcttaccatcgctgacttgcagagttccttgtatattctgatcaagtctctgtcgcttgtgtctgcgttgcagacactgtaaccgccccatgggttcgccttgccagctgccgggacagagtctattgtcaagacaggggaattgcaatagagaaagcataattcacacagagccgattgttcgggagaccagagttttattcctcaaatcagtctccccaaaactcggggatcccagtatttaagaataatttggtgggtagggggccagtgagtcagaagtgctgactggtcagctagggatgaaatcacagggagtcgaagctgtccgcttatgctgagtcagtccctgggtagaggccacacaactggttggcaggtccaggtggggccatccggttgtcagaaatgcaaaaacctgaaaagacttttttttttttttgagacggaatctcgcccttgttgcccaggctggagtgcagtggcgcgatcttggctaactacaacctccgcctcccgggttcgagcgattttcctgcctcagcctcccgagtagctggaattacaggcgctcaccaccacgcccggctaatttttgtatttttagtacagacggggtttcatcatgttggccagcatggtctcgatctcctgacctcgtgatccgcccacctcagtctcccaaagtgctgggattccaggcgtgagccaccgcgcccggcggaaaagacttcttaaaaggcaaatcctaggctgacgcggtggctcaggcctggaatcccagcacattgaaaggccaaagcaggcgatcacttgaggtcaggagttggagaccagcgtggccaacatgcaaaaccccgtctctactaaaaatacaaaattagccaggcgtggtggcacatggctgtaatcccagctacttgggaggctgaggcaggagaatggcttgaacctgggaggtggaggttgcagtgagccgagattgtccctctgtacactaacctgggctacagaacgagactccatttaaaaaaaaaaaaaaggccaaccctaggttcacagtagtgttgatatcttggggaagttgcaaatcttatcttatgacctccagaataatggctgataatatttagacttccagcccctctcattctaacttggtggctggtggcctttcattcattttacaagaacagtctagttttggggaagggctattatttaaactataaattaaattccttcccaagacttgtttggcctatggccagtaatggacaaggaccgtttgaaggttagaaacaagatggaattggttaagtctgttatctttcactgtcataatttccttagttataattttgcaaaggtggtttcaatacttcctctcagcatgtgttcccttttcattttaatagtgtctt

SEQ ID NO: 915629 - DNA, 4001 bp, Homo sapiens
gcccctgctgcctgtgccggaagaccccataaggggccagtcctgcaggcacccccttctccaccctctgggggcctctgcccaggcctcagcctccctgggccttcctgggtcccctgagatgcaagactgtagagctgggctagggaaagtgggctggagcacctggggcttgtggggctgggggtccctgggcatcaccggcctcgtacccgtggccctgaggcgacacaaacatctcgtgcagagggaattgacggtgcaggtccctgccaatggtctccatccactgtgggtctccaggggcctctgccagctcctgtgggtagccaggaaggtgggtgtgagggttcagtgtggtgaggggctctgggtaggggaattggggcccctgcccactccctcacctgataggtgccagggctgttcttctggcacacatgggccccacacaacaggggccagcatcgggcgcgcagggcagacgggatgcctttccggcactgcatctttacctgtgggtgaggccaagggctccactaggcagcctccatagctcctgctggcaggccccaggcacagctcatcagcaggcaggggcccactttgggtggcagggagcaaaggccggaggtgctgggacacagggtgggtacattttgccaagatgtgggctgaggcagagaggaatgagccatggaagccaagtggggcccctgcccccctcaccttcttgtaccgccgggacatggttttctcccagtgcgaggtcatctccacccacttcatctcccgttggcggatgaggtctgcaggtgggtggcccggcctgggggtgcatggcacaggtatccagacgctgggcagctgttacccaaggcccacactgccaccctccaggctacccaggtgaacccagctcctggccctagggatctctgggagccctgtggggtgacctgtgacccaggagctgccaatgcttgtcacggggacaggaaaggatgtggctccgacgtgggcagaagcaggagactgaaggggtgagtgggtgtgtattgggggagggactggttggctgtcacccaggacagggacacagacaattcataggggaagctggctggagagagccctggactggaagcccagagtcctgagtttgagtctgggtctgtgtctgatctgtgtgacctggggcaagtttctgtctatatctggacttgtgtttctgtctgtagcttggggaaagggggaaggaggaggtatgggttctgtgatttggatctgggattcctgagccagaggttcaaaggggaaggatgttctgccccagtagtgggtgcaaaccctcggaggctgggggtaagagacgtacagaggcctccccggacccttcccaccttagggttccacctggcacctgcagaggggtgctactggctgagtccccctcccaatccctaccaccagaccctcccggcctccctccagaattcagccctcagccccctgtcctctgtcccagcattccgccagccctcaccctgcccccttaccctggctctgctgagctgcccccaatgaatccatagcggtcggcctggcgatatgggccaggcccgctgagctctgagtcggaccccaaggagctggagtcatcctgcagctcgggaggctgcaccaggtcctcccccagggcctgggccatggtgcccggggccttcgatgccacaggcagagaaagtggggagaaccagtgtgaggggccactcccggccagcctggggcctggctgcggggtcagaggggggaggtttcagggtatctcaccaagccccctatgtctcctcttttatgggggcaggggctaggccctgccctgacagaaaagccaggcctctgtccggagacccagccccaagccctgcccctgtccccaccagcccagctcacctcccgcagcacctcacctcctcctctcacttcctcctcctcctcacacagctttggcaaccgctgggggcccctcccaagggtggggggtgtcaccccttcctctctgaggctcttcctgcctgccccagtgcccctgagctgtgggctcctcccaccttccccatggccccagtgactgcaggcttgagttcctgtgctggtgtggagggcccaggactgttagacgcaggggccgggccacctccagttcttttgtttgtttcttttgagacagagtctcgctctgttgcccaggctggagtgcagtggcgcggtctcagctcactgcaacctccacctcccggattcaagtgattctcctgcctcagccccccaagtagcagggactacagacaagcaccaccatgcccggctaatttttgtatttttagtagagacagggtttttgccacattggtcaaactcttgacctcaggtgatccatccacctcagcctcccaaagtgctgggattgcaggcatgagccactgcgcctggacttcatgtttgtttcttgagacagggtcttgctctgtcacccaggctggagtgtaatggcacgatctgggctcactgcaacctccacctcctggtctcaagagatcctcctgcgtcagcctccacagtagctgggactgcaggcgcgcaccaccatgcccagctaatttttgtattttttgttgagacagggtttcgctgtgttgcccaggctggacgcaagagaccatcccgccttagcctcccaaagtgctggaattacaggcctgagccaccacggcaggcccacttccagttctgaggttactggcatgtaaagcaccaactcagggttccaacaagaattaaggttcatttatcgtctgctcttcttttttttttttttttttttgagacagtctcgcactgtcgcctgggctccacttcccaggttcaagcgattctcctgcctcagcctcccaagtagctgggattacaggaggctcccatcatgcccagctaactttttgtatttttagagagatggggtttcaccatgttggccaggctggtctcgaactcctgacctcaaatgatccgcccgcctaggcctcccaaagtcctgggattacaggcgtgagccactgtgcccagccacgtctgctcataaagtaattatttttatgtgcacaccctgcaatattactgtgctactcaaaagctaattatggggccaggcttgttggctcacgcctgtaatcctagcactttgggaggtcaaggggggtggatcacttgaggttaggagttcaaggccacctggccaacatggcgaaaccccacctctgctaaaaatacaaaaattagctgggcacagtggcgcacgcctgtaatcccagctactccagaggctgaggcaggagaatcgcttgaacccgggaagtgaatgttgcagtgagccaaagtcgcgccactgcactccagcctgggggacagagcaaaactctgtctcaaaaaaaaaaagcgaattatgggacttataagaaaatattaatttagcatgccccaaggaccaaagtgcgctgggaattcagccgtagctgtctttgagtgtggtcagccgcctgggcgccacagagacccacgaagaagtggggggtcctccgtgaatgcgaggtccaggctgtttttatctcttgagcctcagtttcctttcctgcacttggagcagttaaccctcagtgcctagcagccggttattaacatgttcacaacaccttccacccagggaaggggtgggaaagtctgttgggcttttgaaagagaaaaacaacttccacagtccttccggccccacatcctctgaacagggctgggcgcctcctctggggcgtaaccagcttggtcacgcccccgacagaccccgcccccagcccgccgccgaggccccgccccccgggccgccgcgcctcacgtccagcgggggcgctagagggcgggggactgggcggggcgggcccgggagg

SEQ ID NO: 915630 - DNA, 4001 bp, Homo sapiens
cataataattactgcagtaagaagaatttgggatgtttttaaatagcagaaaagaaaatcagtgtatcttcacaacattggaacagtaaaataaaatttctttaactatgttgtgataaagcaactaagtggaactaggcctctcatatttctcagacacagcaaaggataaaggaaactaaaacacacacgcatacaaaaaatttcatcaatcaaatgatcaggcaacatcaagatattaaagatcaagattatggtccttcagaaaacacaggtcaaatatgctacgtggtataaacatctaaaccgaagcaatcaattgcacctagctgccctcctccctctcccccggccaaaataaaataaaaaaaaaaaaaatccatctccttagaatcatccctgctctttagaagcttacagaatgaggacactgattgacaccaaataaatgtgcttcagaaacagtgtttttcaaactgcaagttgtgacccacaaatcatcaatttagtaaatgtcagccagcattttttttaatgcaagagggtggaatataatagaaattagcagaacatatcacatataataagggtaaatactgctttgtgaaagtttcccttcatacctacgtatgtactagatctgaatgtaagacatacttattactgtggggcataatttttttttttttaagtttgaaagctaccaccctagagatctgggtctaatgcatctcaggacccaaagagtgaatgttttccttagtcctcagcacctattcatactctttgctcaagatagactactggaaacgtaagagctccacagcagcatgacatgaacaagggacaagccccagctcagcctgtatttggacttgaaagcattaccaacttctctcaacagccctaggcgttgcctacaagctctttgtagcctagcaaccttcacagtagagctcctcctttctccactgactgtatacagttcaacacttccaaccaactttcctcaactacaacttctggaatcactgtgtcccaagaaaagactattaaatctcctctcttcaccaattcccagaatgtcttcctactagcggacctagaactcaacagagaagctccacacagatccttacttcccccaagatcccacgacaaggcacccgcctgtcagtccaacaccctcgttctcagtctcccaaccttggggcaaatcttttctcccaaaagcccttattcaattaccacatccacatccttttatcagcccctggtaagagcaggcctaatgtcccaagggcctagacatgcccgtccttcccccagcaaacctccctggggacatgtcctcttttctgggattcagtagttcagagacaagtttcctatttccccagcagtcccagacacgtctccctcttctaacagctgggaggcatctacccatcccccacgctggggcaaggtgagacgcctagattctcccaggaacccgggcaggctccccaacacgccctcctccaacccgggaccagtcccccagcccagcccagcccagcccagcccaagaccctcccagctccgccatagcccaggccaggcaggccccatcctccctctagccccagggcaggtctcccatccccacagctgctcgagacaggccccatgtggctttcacccttccccgagtgtcctatcccagcaccctgcaggagcgaccctccgcgcctcggctccagaggggaacgcctcgggcctcgagagcccggcagagccagcgggcccggctccactcacccctcagcccgggaggcgggggagctactgcggcggctcctctggctgcgcctctcctcccccctcccggccaccgctgtcgccgccgctcagcctcgggcctggtcccggccagccccggcccggcgccgcttcacctagtcccccactctggccgccggagcccagtgtcctgcattgacccggaagcagctttcccggcccaacaacaacacgtgaccccgccgcacgtgtcacgtccgctgcgtgaatgggagggggcgccggaggagcgggtcctccccaaccgcgctggggttgccatggcgacggggatggctgcactggcttaggctttaccacaaacacctcatctgctctttctcgtgcccacccattgagtggacaatccccaggggcagaacaggagtacacattgtcatatcagaggacaataggggctgcagaaaagagcattgggctgaacctttccagaaacacttggaatcttggcctggctctgttactgatttgctgtgtgaccttgaccaagtctcttcctatctctggcttcagtgtcctcaaccataaaatgagggaactatactagatgagccctcagggtatggtggcagtctgacctttcttctgtgcccccttcacaagtggcatcccgagcttccaacaccaatgtagtaacagcagctttcatttattgagcactttctaggtacaggcactgcgcatgtgctatttttaatttttacagccctccaaagagatggtatttatagaattgaaaacaagttcagagtgcttaagtgatctgcccaagaccacccagttagtaaatgtgaccagggtgagatttgaatccaggtcaggctggcaccagggtccatgcacttcactttatgccacgctattgctccaactccatgcatagtattactatatctgactgttgagctgtgattgcttatgtactccttcgtccatttcttttgcagaaacatacatggaataggcgtggtgctggctcaaccccaagtgaattcagccttgtatgggaatgtcccctgaagtgctaggagatgaagatgtctttgtgcataaagtgtatgtgcttctgtgtggtgtgtgccagaaaagacgtgggggatgtaatgtgcatgtgcatgtctgcattggtttctagaagggggaaacaaaattatttaggacagacccaatagcaccttaccatcatcagttcctggagacttatttttgtcattctgttttgttttctcatatcccataggtagggttagacagggtagagaggaaaaaaaaaagccagaaggtcatgggtaaagaaactgctctgagtataaaggggatgattagccaagaattgtatcttaggttgctcaggaaggggctttactcccccttccacagagaacagagtgcctttcttggcaatttaagaattactggctttcagagcactgagatcattagcattgtgtccggaattggtgggttcttggtctcactgacttcaagaatgaagccgcggaccctcgcggtgaatgctacagctcttaaggtggcgcgtctggagtttcttccttctgatgttcggatgcgtccggagtttcttccttctggtgggttagtggtctcgctggctccggagtgaagctgcagaccttcgcggtgagtgttacagctcataaaagcagtgtggacccaaagagtgagcagtactaagatttattgaaaagagcaaaagaacaaagcttccacagtgtggaaagggacccgagcgggttgccactgctggctcgggcagcctgcttttattctcttatctggccccacccgcatcctgctgattggtagagccgagtggtctgttttgacagggcgctgattggtgcatttacaatccctgagctagacaaaaggttctccacctccccaccagattagctagatacagagtgtccacacaaaggttctccaagtccccaccagagtagctagatacagagtgtccattggtgcattcacaaatcctgagctagacacagggtgctgattggtgtgtttgcaaaccttgagctagatacagagtgccgattggtgtatttacaatccctgagctagacataaaagttgtacacgtccctaccagactcaagagcccaactggcttcacccagtggatc

SEQ ID NO: 915631 - DNA, 4001 bp, Homo sapiens
aaaagtatatcataataattactgcagtaagaagaatttgggatgtttttaaatagcagaaaagaaaatcagtgtatcttcacaacattggaacagtaaaataaaatttctttaactatgttgtgataaagcaactaagtggaactaggcctctcatatttctcagacacagcaaaggataaaggaaactaaaacacacacgcatacaaaaaatttcatcaatcaaatgatcaggcaacatcaagatattaaagatcaagattatggtccttcagaaaacacaggtcaaatatgctacgtggtataaacatctaaaccgaagcaatcaattgcacctagctgccctcctccctctcccccggccaaaataaaataaaaaaaaaaaaaatccatctccttagaatcatccctgctctttagaagcttacagaatgaggacactgattgacaccaaataaatgtgcttcagaaacagtgtttttcaaactgcaagttgtgacccacaaatcatcaatttagtaaatgtcagccagcattttttttaatgcaagagggtggaatataatagaaattagcagaacatatcacatataataagggtaaatactgctttgtgaaagtttcccttcatacctacgtatgtactagatctgaatgtaagacatacttattactgtggggcataatttttttttttttaagtttgaaagctaccaccctagagatctgggtctaatgcatctcaggacccaaagagtgaatgttttccttagtcctcagcacctattcatactctttgctcaagatagactactggaaacgtaagagctccacagcagcatgacatgaacaagggacaagccccagctcagcctgtatttggacttgaaagcattaccaacttctctcaacagccctaggcgttgcctacaagctctttgtagcctagcaaccttcacagtagagctcctcctttctccactgactgtatacagttcaacacttccaaccaactttcctcaactacaacttctggaatcactgtgtcccaagaaaagactattaaatctcctctcttcaccaattcccagaatgtcttcctactagcggacctagaactcaacagagaagctccacacagatccttacttcccccaagatcccacgacaaggcacccgcctgtcagtccaacaccctcgttctcagtctcccaaccttggggcaaatcttttctcccaaaagcccttattcaattaccacatccacatccttttatcagcccctggtaagagcaggcctaatgtcccaagggcctagacatgcccgtccttcccccagcaaacctccctggggacatgtcctcttttctgggattcagtagttcagagacaagtttcctatttccccagcagtcccagacacgtctccctcttctaacagctgggaggcatctacccatcccccacgctggggcaaggtgagacgcctagattctcccaggaacccgggcaggctccccaacacgccctcctccaacccgggaccagtcccccagcccagcccagcccagcccagcccaagaccctcccagctccgccatagcccaggccaggcaggccccatcctccctctagccccagggcaggtctcccatccccacagctgctcgagacaggccccatgtggctttcacccttccccgagtgtcctatcccagcaccctgcaggagcgaccctccgcgcctcggctccagaggggaacgcctcgggcctcgagagcccggcagagccagcgggcccggctccactcacccctcagcccgggaggcgggggagctactgcggcggctcctctggctgcgcctctcctcccccctcccggccaccgctgtcgccgccgctcagcctcgggcctggtcccggccagccccggcccggcgccgcttcacctagtcccccactctggccgccggagcccagtgtcctgcattgacccggaagcagctttcccggcccaacaacaacacgtgaccccgccgcacgtgtcacgtccgctgcgtgaatgggagggggcgccggaggagcgggtcctccccaaccgcgctggggttgccatggcgacggggatggctgcactggcttaggctttaccacaaacacctcatctgctctttctcgtgcccacccattgagtggacaatccccaggggcagaacaggagtacacattgtcatatcagaggacaataggggctgcagaaaagagcattgggctgaacctttccagaaacacttggaatcttggcctggctctgttactgatttgctgtgtgaccttgaccaagtctcttcctatctctggcttcagtgtcctcaaccataaaatgagggaactatactagatgagccctcagggtatggtggcagtctgacctttcttctgtgcccccttcacaagtggcatcccgagcttccaacaccaatgtagtaacagcagctttcatttattgagcactttctaggtacaggcactgcgcatgtgctatttttaatttttacagccctccaaagagatggtatttatagaattgaaaacaagttcagagtgcttaagtgatctgcccaagaccacccagttagtaaatgtgaccagggtgagatttgaatccaggtcaggctggcaccagggtccatgcacttcactttatgccacgctattgctccaactccatgcatagtattactatatctgactgttgagctgtgattgcttatgtactccttcgtccatttcttttgcagaaacatacatggaataggcgtggtgctggctcaaccccaagtgaattcagccttgtatgggaatgtcccctgaagtgctaggagatgaagatgtctttgtgcataaagtgtatgtgcttctgtgtggtgtgtgccagaaaagacgtgggggatgtaatgtgcatgtgcatgtctgcattggtttctagaagggggaaacaaaattatttaggacagacccaatagcaccttaccatcatcagttcctggagacttatttttgtcattctgttttgttttctcatatcccataggtagggttagacagggtagagaggaaaaaaaaaagccagaaggtcatgggtaaagaaactgctctgagtataaaggggatgattagccaagaattgtatcttaggttgctcaggaaggggctttactcccccttccacagagaacagagtgcctttcttggcaatttaagaattactggctttcagagcactgagatcattagcattgtgtccggaattggtgggttcttggtctcactgacttcaagaatgaagccgcggaccctcgcggtgaatgctacagctcttaaggtggcgcgtctggagtttcttccttctgatgttcggatgcgtccggagtttcttccttctggtgggttagtggtctcgctggctccggagtgaagctgcagaccttcgcggtgagtgttacagctcataaaagcagtgtggacccaaagagtgagcagtactaagatttattgaaaagagcaaaagaacaaagcttccacagtgtggaaagggacccgagcgggttgccactgctggctcgggcagcctgcttttattctcttatctggccccacccgcatcctgctgattggtagagccgagtggtctgttttgacagggcgctgattggtgcatttacaatccctgagctagacaaaaggttctccacctccccaccagattagctagatacagagtgtccacacaaaggttctccaagtccccaccagagtagctagatacagagtgtccattggtgcattcacaaatcctgagctagacacagggtgctgattggtgtgtttgcaaaccttgagctagatacagagtgccgattggtgtatttacaatccctgagctagacataaaagttgtacacgtccctaccagactcaagagcccaactggcttcac

SEQ ID NO: 915632 - DNA, 4001 bp, Homo sapiens
ccaaaaaagcttgtattactgagaagaaggagctattcgaccgtgtgacaaactataaataaatccatagataaaggtagtcaggttctactatggacagggtatagctatgtaatttattatccaatccgggacatctttgagtgaaaagggggtactattaatgcttatgccagaacaatacggtgaaccaggactgtcctgggcaagccaagattaatggtcaccctaattagtatagcctttggcaaagaaaaaggcatactgcttaaatccttatatgcttaaattaaatactataaatatgaaaactgtctattcccaagtgcctcaactcttgaaaaacttacaaagccagtctaacccaaatagagaaaaactggacagaacaaaatcaaatttagtgtgtaaaattcttaaacttcacaatctacttatacgaattcaagtattatcttttttcttttttttttttttttttttgtaaatgatgactcaatctatctcccaagcaccaatcctgaagggaatgctgaatctgaatgcccccataggtggaacttcaaactctcaatgttcaaaacaacatcgctttttcttcacaaaatcttcattatgtatttgatggaaccaatatccttgaaataacataaattccaagctttaggtacctttgacgtataggggataaaagaaagggaacagtcaatcagatgctaagttctcttagttttacttttcttgtttctctccagtgcaaatagcaagcaatacacatagcaagtgctgaataagtgcttttggaatgtgtattctaatttctgaacctttccttatgcttccaaaaatgctgagagacgttcaagcttttggtagagagaagagatgaactgttgacttggatgtggggggacatttgaggactccacccctatttccaagcactgaggcaagccaaactattctaatataaagttatggctggcaagctatattaagtttattcactcaataaatccagtgcttctacaataaaagaaaggaagaaacacttggaacactcaaaggttagaggggggaaattactgacagtttcatgtacctctttgggcaaagggtcagttatggggatttgaggtgctcagaaaatagtctgtgtactggaagtcataaaacggaatcaggtttatctaagttggagtcagggctctgacacagtacccttgggcaaatcatctctctgggcttcagtgttctcattttacaaataatgcctaattctcagggctgtatctcgagaatcaaacacatttcctagagtcctgcagtaacaacgatgactaaaatttattggtatgtcttttacgcaccaagcacttttctttactcatttaatattcattattctgcaagacagttactagctcatttacagatgaggacacagagaaattacgtaatttgtccaaggacacaaggctaacaagtagtaacgtatacggaaaagccaacactgtattaatactgtcacactgggaagggggaacagcttggggaaagattttgtgagggagtctccaggaggggaccggctgaacgtgggtcagactcacaaacaccgtggccttggccgctttgcgcagccgcaggtacttcagccggtacttctcattctggctcttcttcgggagctttttcatcctggccttgctggactgcagcggagcccgcggcgaggaagcgaggccgtccagcaggctcatggtccagccccgctacgggggccccaggacgctgccggcatcggatcctaagtcggggagcgggcgggagcgctggctttgtctgttccgggctagcggaatcgggcctctaggaatctagctctccgggacgttcccagggctgaccgcagggccagagacacccgcaaccgaacgggctcccggcgcctcccagcacttccgtgtctgtcttggaagtaagcccttcccggaagttacgtcccggtgtcggcagtgtgtaacttccggggcagggagagtagggtggtctgggcggtgcgatcgtgggcaccgggaggaaagagacagctgggggctagtgctggatgaggagaggagggagggccggcggccgtgtgcttagctgaagggtactatagttgaaccaacgaactaacaagaagcttaccaatgcgagctctcattcacgctcccccgctgggccactgcgttttaatacgtttttcatgcttcgtgcagacaggctttcccagactgtaggacaaagtgagcccaagtgctgggactctgcttctttccctgcttcgttcctttctgcagctcacagaaatgtgtttgcagggcctcctaatgctatcatcttcccaggagctgggaacacagtagtgaacaggaagaaaggccttggctctttctagtagggaagatgagagatttaacacgcagttttaatactagcactaagtaggcactcagtaaatgtttgtctagtgaaaccagaagtgtatttctgtacataatatgtacatgtatatggttctaactttacaaccaaggtctatttaaaattagggaagatagaaaaatctttagggtgcggtattggtaagtgacccaggctggatggcagaaggcttgcttgcatcttcttccagcgatgccaataactagttcagtaactctctagttttttctctcaaaaaaaaaatttgctgttctgctgtattttgtccttgcgggctttggggtctgactttatttgtattatttattttcatatacatgtatcacatctagggggaagaaaagtgctatcctttgtcctagtttgcaggctgttttggccaatggactttagtgggatttgcatgaagatattttttgtttcttcttcattggacacatttccttacacttacaaaacatttcattcgaactttagaaatttagaaaatatagtacaagaaaggtttaaaaatccataatgctaccacttggaatgaactacttttaccatgttagtatatgtgtctaatattttatgcatttttgtataggttagacaatactgaaaataaagttttctttttgttcatttaccattgtatcatttcagtttcacaaatgttagtatagcttccttataagcataattttaagtggctggttaatattccagttatggctatattatattttgcataattatttccatgttctttgactttttggtcaattccattaaaagcatatctttgcgtccaaagctttttccatataggactgttcagaggctggatatgtgtgctccacaaaggtcatgccactgagcaactcattcagtccttatttgtttagaagaatatttacctagtgcctattatgataccacctttaagaaccttaatttaagaaggaaagacagacaagtaaattggcaatgttaatatggtataataagtttgtttcagaggtaggttttattttatttggcagcactcagggaaggagggaggagataggaaaggtttcttaaaggagatacatctgggcagactctgaaggagaggtagtggttggttggcccagtgaagaacaaaggggggcatgctggatggtggagacagcatatgcaaaggctcagtatgggaactgcaagtagttgatcagtgtgaaagatgtgtgtagagagaagcaagaagagagactgaagcagtaagtagggttttttgggtcatgaaaagtcttgtgtaccaactgaagagttggactttgacccagtgacaataggaaaccatctatcagctctttgcttgtgttaggtaaacttacctgaatctgtcagaagcaacacaacttttctacttaactatacgaagaagggtctaaatggcctatgcaaaaattctttaaagaaatgcataatgtgtagctctaaaaagaaatataaaatggcagacagcatgatattgtgtc

SEQ ID NO: 915633 - DNA, 4001 bp, Homo sapiens
aggagaacaaaggaaggaggaagtaacttatagaatgctgagaaaggtaaaaacaccttcaaataaggaagaggaacaggctatgacctaatgtttgcttggaccaatataagcatgctagggcaaatatttaggctaaattgtgggagctaagaacataaaatatattgatttttttttattattgttagcagatatttaagaatgttagtacaggtctttgaataaattttgcttctaagagaagttattatttattctaattagatggcaggaaagtctatgaagaggaacctctactttactttttacaatgtgaatgtaattaatgacacaaaactgtgtatttaaaaatggttaaggtgggccgggcgcggtggctcatgcctgtaatcccagcactttgggaggccgaggcgggtaggtcacttgaggtcaggagtttgagaccagcctggccatcacggcaaaccctatctctactaaaaatacaaaaattagccagaagtgctggcgggcacctgtaatcccagctattcgggaggctgagacacaagtgtcgcttgaacccaagggggtggaggttgcagtgagacatgttcacaccactgcactccagcctgggtgacagagtgagactctgtctcaaaaaataaataaataaataaataaataaatataaataaataaaaaggttaagatggtaaattgtgttatgtatattttacaattaaaatgttttaaatggaaaaaaatcctgagaaacagaactattattttatagcagccccataaggggctgagaagctggaagggccatggaagccacagtggctgggagtcaggggacaaggttttattcccagctgtgtccccacccgagtggctttgggatatttacacgactgtaagactatgggatgcctggagcagaggggggtgctgggtgttggagagatggatgaactggcagacaggcgggtgacggaggcccccaggtggcatagcatctgctgaggtaccaggtggacggcacctggccagggtgagctcttagtaggtgcctggggagaatgtggagcccagggccatggccacgtcctcagcagccctgagagctgcgtgcaaaggccctgggatttctgcagcctcgcgggggagggggcgtctttgtgacagggatgggtcacatcaggtttgaggaccctgggcaggatggatagatgggctgatgtccccctgcccctgtggccagtccatcagaagggtagctggttgtcgcccggctgccctgctggggcgggtacgtcatccaggtgatgccagcccccctgggtccatggcaatgggtcccaaggtgggggggctcatgatttcactgggcctggaggctttgccggtggtcactggctcccaagtcctctaggggctcacccgctgcccgtcgcagccaatgtgctgcccctcaacactttcagggactctggtggggggagcctgtcctttgctcagtccctctagaagccagcattcctcagggcccagagatgacagcttgccagaagcatcgagtgtcaagtctggaagggaagctaagggcttcttgtccagccccaactttgatgctcaaggagctggggctcagggagaggcccgaggtcacacgtgcccagtgaggcgctcatctcccggaacagcctggtccctggcatctcccataattgcacttgggcagccgtgagccctgtcccgttgggatctcagaccttagcctggggtgcccctgccccaccctcttgtgaaggacctgggttcagcggggctgtcttggttcccaccctgcccacccaccctggaacctgagcctgacccatgaggccacctctgcttcagaacgtagcctacctgccatggagacagagaggctgtccggctcctggagaaacactgcttggctggggctgggaacctgcctgctggaaggggtggtcaccactcgtccactcggcacctcagctcagccctcaggtgctcacacaagctgtagtctctcggcaggacggtccttgcctcctcgatcgcccttcgtccacgtcctgaggtcgtggtcttcctactcgagctggacccctggtctccgaaggtgagatgcaggctctggggcgtgcagcggcccttctccaagccactctcgggctgtgctgtccaaggctgtgcgggaggagggcaggtgggaaggttctgacgttgcagagccccccttcctccctccttgtcctccctcttcaagttcctcccttccccagctaagagccccccagccattcctgatcgatgggcccaggcgtggcaggggtgagggggtgggagagtggttcttgaggacggctgggcatctgcaggggtccaggcctggctgactggaggggctggggccccgggggttgggaggcacagtgggagcagcagattgcgggctgaatggcggaggaggtgccctcccaccaagacccagacccctgacctgaggctggccccagccggccggcagatgcgcaattgtcaggagcagtgtgagcaggaaacgcaagggggcagcagcaacgagtgcagtcagcatagagccccagactggatggcgggaagcccaggtcctgtggcacgtgaacccacacgcacagacacatggatgaactcagggagctgcgcaacgctggcaggtcccacagtctccgtgcctcagcctccccagttaacctaagcacataatctcttccgcctgtgatggtctagcccagcctggagagcggtaagcccatcccgcctggaactgggggcactgccctggctgatggtgtccacggaatccccatctggacatgagtggaaacggtgaggctggcccaggtgagaagtgggcgtccgctctgcctgtgggtctgtctgttctctctggcctgaccgggcaccctctccaggttgtctacagcctgtgctgggcattcaggggacacatggatcactctgcagggaggcagaacctggaggtccccctgagaggctgccagttccttggttgagagtgctcgctggccttttgactcttgctgaatggcacagagtgggtcgtctggctggagccccccatacctcctccagaatcctgtcttggggatgctgggttggcagtggccttgattcctaagagggggcatggaggggctggggggcggcagggctgcttctccctgagcgctatgttctgggcgcagctgcagctcagggatgcctgtggctcaatcccttgtgtctcacatctcagcctgcagagctggatgggaccccacacaaagacggtgggctggctctgggggatgtaaaaggaggagggccggcccctggcccaaccccatgcccggctgtgtgagaaaaggctgccagcactttggagttgctgccaggcaagatgggagtgctctgtgtgagttggagggtcccagcagccccttgaggctatacaacaaggtgtagtcatctgccctggccatggcatggtgggtgggaagtggggagatgatggagggagttgggggatccattccagtactggtggctccccttcaccgagacacccaggggagggccaggctgggattgtagtggcccctgatacgtgtgtgtgtgcgattttgatctgtgtgatgggaaacaacccccctcccacacacacacacgagcacactgacatgctaacccacatgcacgcagacacacggatgaactcagagcctgctgactcgccacatggcgcacacacgtacagcttctgtgcacatggacttaccacacagcacgcgcacagacacaggcaggcctccctgcacacccctccccggctggcccgcccgccctgcctgcccgaggcgcctgctggccccctgccccctcatccatcttgcctgccagcctgtccctggtgcccccgtatccttcacaccttc

SEQ ID NO: 915634 - DNA, 4001 bp, Homo sapiens
tccagcgtctcccagtgacaccggctccacccccaccttcactctggcctccctcctctcgggctgccgtcaccctagacaggaccccactggcccaggcacttaggcccagggctgccccgggggtggctggagccctcgctgctccctgtggagctgcatgtgctgagtggtaggagcgggcatctccaccgggtaccctggggctagccagggagcactgctgtgggggggctgtcccctgaggcccgggccgcccggcagcagccgcagccttccaggtgttgaaaccaacaaaagtgaaactacagaatggcggggaagggcccggggccttgctcaaggccgatgtggggtgggggcaggtgccaggccacctccaacccgccctggatgctggggcccctccagctccaaagccactgctctcagggcccagggcccctctgtgggaatcagttgcttagctcgaaaattagggggaggggacaggcctggtcagggccccgcctgcccagccagtcacttcctcccctgggtctggtttacttaactctaaacagggaaacgcagccccagccccagcctgggaaaggagagaaggagggaacgagggaacactgagcagatggcccaaggctgcaggtgggcagggcagggggcagcggggctgggttccatccctaaggaccaggcccggccacagggcagagggacttggagcccaggctgagattgggtgtgtgaccttgggcaagtctctcaccctctctgtgcctctacttcctctttgggtgaatgggacgtggcacccctgacagagacaggatctagggaggtgacaaaaataaccagagcctcaactgaatcccttcatccacacgacctcacactaatccctggggggagaaacccttggggagggggtacggtgcttttgtttcatacaggactccactgacacttggagaggtaaagtccaatgttatgtgcccagcacaaagggtgagctcagaggagggttgtgtctgacctggctccctttggggctgtgctggccaaataaggaggtgtggggaatcagctctggggatctggggaggggtcacccctggctcagggccatcagggctcccacagccactatgccgagggctcgagggccgggctccttccagcacttcccagggggtgggggaacaacctgtaatgggcggggggaaaggtgtggggacgtgatcagcccccgtgcctggcatgtgaggctccactggctcaccccctacccctgtcccccttggtccccgctctagccagggtcacccagccacttttatggtgtaaatgaatacgcctccatcctgcggccctggggtccaggctccagcccactcctcaccctgtgcccctttcctggcccctccaggaacccagcaggtctctctgcacctctgccctcccctccagatgatgggaaggcagtaggagagggtctggcgccccctccattccaaatggggtgggctctggagtcaaatgacccagctggtctccagctctgacacttcctagttgtgtggtctcagcttccccatctgtagaatgggtccctccctccaaggaagcagcagcggggaaagctccgcgcacaccaggcccgggaacgctgggctgtgttggtaaacaccccatccttctcctcctcccttggggatcctccgtggccccccgcaaggcctgacaccctgcggggtggcgggctgagctgcattcacggagccaactgggtggggcgccaggatctcctccccggggcagggggaagagggtgggcaggaaattctggggctccgcagaccccggcaggggcactcaccccgggtgtgctgcgcgccgcgcctccgctgctggctgccccgctccgcgcacgccgggcgggactcagaactgcactcccgccagcccgggactaggcgccgctcactcctttccgggcaggcgggacgacggggaggggccagggacgccccgcccccggcccaaggctccactggagtccaggaagtctgggagaggttgagcccaggctgtggcctggcggacgggtcctgaggcgcttaatcccggagaggaggcctggagaaaggagcggataacagaccactgccaaccgcgcgcgtctatgctggccccgatgcaggggcagctccgctcaggcccagctcaggataggagatgagaccctgctctcctctcacttcgaggcttgtgcgcctctggctgatgggaccccaacattcgcaggctcatgggcttggggtccccaggatgctcccccacctccgggacccctcccttgggcggcagtgaaacccgccggtgcttacaccttcctgctcttgaccaccctggagaggccccgctctggcccttgggtgggtggctgccccactctgggcctgcttcactggcagcaggacacagggccaggccatgctgccttgttctgcccagcgccccgcacccagcaggccctgggagataccctggggccagaggccagctgtcagctccacctgcagctgcagccgcggggggtagaggggggtgtcactgtgaccttgctccaggtcagcaccatgggcgtcatcaggtcctagtgcctggaagctgggactcacgaccgtccagctgcctgcactttggacaggcctggggcattcccactggaggccaggggcccttcagctctggtgatccctaagccccacacagcgagcacaggcctgtggggctgcggcaggggtggacaagtggagccccagagccgggcctggaaactgagtcacagccaagctcagctgtggttcctcagaaaattgggggacttgtggttgggcgccataggcctgttctgacagggtcggggcctgatacaaccagacagcctgagtggggtctcagcagtaagtgcctgggagaccacggtaagggaaagaacccagcggtgagctggaaagactgacccgcttggaatagaagtattcagtgcacagctacaggctccatgccacgctctgacggcggttacgtctgggaaaagctaaaccggcggtgcttcaggagtcctgcgcctgccttgtttttggaaagaacacctgttttcatcagtggccaagatgagctgcgggccagacctgtggacacttcccgggctccaggcttcccctcgcctcctgcagttacttctcaccccagtgccacaggctgtggggcccaagcgggagcctggccactttggcattagatggcaatgcctggtctaggaaggaggcccaggtgttagacctgagaaaagctccctgggaatgggctgggagaggctggtgtttttgctgcaggccttctcagagccttgaatgtctaccatgcagtacctgccagcaggcacacagcagctggagcatttccaacactcactgggccaggaaacttgttctttcgaagaagtagctttttacaaagtagtgctttgtaaaaagcacttttggaaatgatggtagatggggggggtcaaggtctctgaactgagttttattatgggatgtgccctgcatggccctgagcaagccctttcacctctcggagctggtttcctcactgcaaatgaagtgaaatccttccacagtacttagcacaagttcaggggggctgcttttggccattatatgggcaaggggcttgtgtgtggccctagggaaaccccaccgtgtcgctgggccagcaaagcaggaagtggtgagcagtggccgggccagcaccctggcgtagggaacacaggaaagaggatgtggctggacgcaggccagctcagggccagcagggcctgtgtcaccctcgtgtgactgtcaccccaagcaggcttcctcctacccccagcaaggatgccccggcctgagtttctgccacttgctgttcttcagcctgaggtcttgggaggc

SEQ ID NO: 915635 - DNA, 4001 bp, Homo sapiens
acggcactcactccctcctccatctgggtgccagggcagagacagaccagaacggtggcgggggccttcagggaccctgggatctccagccaggcccagctggagatgtagagccctgtgggggctcactgggcagccccttcccctctctctgacgtgagatgatcagccctgctctgccctggtgggggcccaaagacaccacatggattggcaattgcttgggaaaggcaagcatgctgcctcctagggacggcccaggagaaggagcccagcctcacccgcaagcacctgctgtgcgcggcgggtgacccccggaggcaggggcatcacaccggttccacagaccatgagcaggcctaaggtcacaggggggcctggattggaatgaggcttctgactttaaaactatcctgtgcagcctccagggacttaggaaagtcagggtagggcttgctgggccagggccatcagggcagactccctggaagcggtgggccatggaggaggctgggaggagaaggagcccctaggcaaagcccaggtgcagggagccagaggctggaagtgaggcagaaacgccccggcctggtaggaggggcgggcggagagggggcgaggcctcaggctgctcaccgagctgtcccgcagggcctcctgcagggcgggcaggtctcgcacagagcaccaggcctcggcaatgaggcacttgtgcgtggtgctcacgctgcactggttcagggccaggtacacggccttcatcttgtggacctgcacctgccctggcggcagcagctgcagcacccggcctagcacctggctcaggaaccgctctgtctccccgaggacctgcgccagagtgggcagtcagcgggggctgggcaggcaggtggggtggctgggccgggggcacccacctcctgcacccacctcctggaggccaggccagggcacccacctcctgcacccacctcctggaggccaggccagggcacccacctcctgcacccacctccgggaggccgggggcacccacctcctacacccgcctccggaaggccgggggcacccacctcctgcagctcctggctctgctgttgcagctgctgcagggccccgaggcgggcctcctcctgctgcagaaacgggaagacgtggcagtggaagctggagggaggatgcgctgcgtgaggggccagaaggacacagctacgagactctgagtctgaagggagctcatggggaggagtcacgatagggcgggctgggaggtgacagcaggggcctggggagcagggcggtggggcgggtgttcccagtgactcaccagtccgtgatcttgcggatcttctgtccgatctgctcaccccagtaggagatgaggaaggtcatccacgtggctggctcgccctgcagagcaggctcagctgactctggggtcccgctctgcccaggaccccccagcccagcgccagctgctcaccgtcacggggtgctccagcggctgctccagctccctgaagctggcaatgaggaagccgcggcaggccctccagagcaggcgctctagggcaggggccttgtggggctccacggcacctgccacaaagctggcggccacggggctgggcagggctgctccaacctcctgccctgcctcccccaccaggccccccgggcaggaccctgcccagcacgggcaatcgggcaattgggcacactggccctgcccacaggggaaggcaggaggcctcccgggcaggaccagaagaggagaaccccctagggctagggcttgggactgtgggaagttccgggcctgaaggaggaggcggggccagcctggggagagcactggacaaggagtcggagctcagcctggcccagcccagcgactggccaggggttctgggctggccagaaagggcatgaggtcatccctcactcacttgaccctcaggtcctggtgcggccccccgggggcctggagcaggggcgtcctctctgaggccccatctgtgtgggcggctgccagctaggaacccagaagcaccatgagccctaggctggacagcccctccccagccccccagtctcctgcctgggtgggagctgacctgaggttcatggccctggcgtagcacggcggcgtggagctgcagctggtgcagctgggcccgcagggcctgctggttgccccgcacatcccgcagctcctgggccaggcgctccgtctcctcctggatgcgcagcaggtcccggggtgggggtgccggcagcctcccctttggcgggggcaggaccagcccagcccgccgcacctcctcctgcaggaaggctgggcgcagaggaacgggagtggggtgcagttgaggttgtctcaacagttgagggccccacctgctgccccaaactccatcggccaccagctgctggattcaccaggtggaggtggccagaaaatcccggccaaactttcatccagaagctgtgctcccctccctgagctcaggtctgggctcactctccctccccagtcccttggccaccactcagaagagggcctgaggtctccccacaggccggcccttgcgctgcagggcttgggaccggagctggcgtgagtcctgtgtctgcctgatcattgaaaagctgtaaactgcaccagcaaacacaaaaccctgcctgccccatgcccctgccttggtgcccccacaggctcctcctgagaggggttgcccagggcaggggtcccttttgcctgctccttaggggtaccctaccctagatcctgggccccacccaccccagcccagctgtagaggagaaagctgtctgtgcctcttccctgcttagaaacccctgtggcttcctggcgcccacaggacgaagtcctgggctcttatgctgtattcgaggcctccccagccagccctgccctaggccctctgctcagcccacacaaggcagccaccttcgcaagcacacttcacagatcccagctgctctgtcttggccctgcagggccctgcatatacctcccttctctgccttccacctggcaaacccagactcttcctttcagatcaaacttggcccatgcctcctccaggaagcctgcctggaatgtaggcctgggaccaactcactgaaggtcttctccagctcctcacagcgccgaacatcaaccacaaagcgtctctggaaggcgctcaccgaggcgttgagctgtgggtgccacacggaggggtgagtgtcccgggaagggggtcagggagctcctcaccctagagcccaggcctgactctccccaggccttagctgcctcctccagaaaggtgtggagtgccctgggagccacaagacgcagatcagagcacagaccagaccccatgccccaggagggtatggggaggagccagctcaggggcctcagctgcgggcttcccatgagcagtgcccatggcaggggccgctggggttcaaatggggccagggccctatggcggagggggggcagtccccatcctggaccggcctccgggctaaccttggcagtagcccccttcccacgcctgcccacccaactcacgtctctgaactccacgaggcccagctcgcccagccgactcacgcaggtgtaggcagccgctgtgggcagaaagagctggaccagggccacctcctcgctccggaacatggagcccatggtcctgtgggtggacacggatgggggccagtcaggggcagaccacagacagttcccaaccacgggcacctgtgcaccttcactcactgaatcctggaagctgctgttaccacccccatctgacagaggtggaaactgaggcctgggcaggcttgatgcggtgctgaggtcacgcagaaagtaagcagtgggactgggagaccccgaagcccaccctcaggccgacctcaagctctctcctggcttgctctgcccatggggacccccgcccctacctccagcgtctcccagt

SEQ ID NO: 915636 - DNA, 4001 bp, Homo sapiens
ttatactggtgattgaccccaaaacttcattgtctgattacccagctggctgggcatcgagatcattatttagcattatgcagcctgtaaaaaactctccagttttagcctacaatatgccccaattccagagatggagggaagtcacattatactgtggaagtaggaaaatccatagctcccaaggaaatagaggagaataaaaagatttactatttatttaaacacaggacactttgtcaatgtatttttccataatcttgaggagtagccccaaatcctacatatctccagattatctaatggattagtgggagagtgagaagaacatgaggtttggattcagattttggccacattttgtgctccttaacttatgactgtggataataacttatgtaacttgttttactcttagttttctcatttaaaaattgtggctgttaacacttaccttacagatattggacaagaaaccaccgaataaactgtaaaatgctgcacatactattatttccagctcaactggagtttttatcactatacttgagaatcaaggaaatgtaatttctcttgcccagttttctttactttaaaagaatgagtcaagaagatctgaatagagtgattgtagaaaggtcatggtttgttgcagacacaatggaacaattgtgagtcagttctctgagattttgtggaaccatccagctcagcagattttctggccctgaaacagactttttagttcctgatcaacaactcaaatcagcttccttgagtctcaaagataaatttaattattatcattattatttaaaatgaattgaaagctaaaacctacatagccattccctattcttaggatccaacaggggaaatgtcaagccaagaagaaaaatcagagtcagaagagtctatgctttagcctgtatgtatacaagcctgtcttctgtggtgttctcttcttactggttagagagcacagatagtaccacctagtaatctttggactggtttgaagctcaatttcagagtaaagtctcacaaaagagaattcatgcacttgagaactgcaccagacttcatgagataatttgcttcaatagtctcccctcattatcctttatttatgaatgaagctaaagaaattcagaaatgttgggtcattcaataactaagggatcaaactaaacctgaatttagttttcccttctcttactttaaagttcttttacagaaccacacaatctctggggtcaacacccatgcaagagatgatggaactttatcccatgtgtcctgggaaagagttgaaggaaggtggacatgcaacttggaacatctaaactcactcatgacaagacagcagtcatcactatttgaaagagattattatttttttctatgtagttacaaggggttaacccaaaaatcatgcattgaatttcagggaaaaaagattgcatatcaagaccaaaagataactttccatgatctagaaaagtttctgggagcataaattttctgtcattgaaaagtcacatgaatagggagttacttggtagggatgctgtgctagagaggatctgagcatagaaagagcagttaggcaagtgaatacacaatctataattcctcttacaacaacatgcattgtgagactttcctcaccatctcctgccacccttttcatcattcatggagtccaaccacatacgaaactggaatgggatcttttctcaggtaactctacatagagtctcttgtcaacagttttcagtagactatcactctagagtaattttagctcaaagtttactcaccacaaatctcgcatagttggcttggaataaaagaaaacagtaagagccccactaggggcagctggtgtgactgtctcatctctccaacagtgtaccagaatgttgatgaattggctggctatttattaagtgatgggcagaaggtaatgagagctcctccttcaggttgcctcagcctcttttcactcaagcaaatattgagcaatgtcaggaggtgtggtcaagtgtatttgtccatgtgatgtaataaataaggaagaagacttgaaggatgtggttagggagaataaggcaataactttcctttgtctcctgtcctaaaccttcgggtttcatatctattatttgccttccgtgcagtgaagatatattaggcaaatgactgtttcctataatctttccttttttttccgtttcactttatgttttatgtttcctgataaagtagatttgatcatgcaaacacatacaacatataaaaatggaagtaaaagaagacatccaaatgggaagcaggcatatgaaaaagtgcttgaaaaggtgcttaacatcattgatcatcagataaatggaaatcaaagctacaatgagatatcctctcatctcagctaaaaatggctttattcaaaacacaggcaataacaaatgctggcacggatgtagagaaaagggaagccttgtacactgttggtgggaatgtaaattagtacaatcactatggagaacagtttggagcttcctcaaaaaactaaacatagagctaccatatgatccagcaatcccactgctggctatatacccaaaagaaagaagaccagtatattgaagagatatctgcactcccatgtttgttgcagcactgtttacaataaccaagatttggaagcaagctaagtgtctatcaacagataaatgaacacagcaaatgtacatatacacaatggagtactattcagccatataaaagaatgaaatcctgtcagttgtgacaaaatggatggaactggagataattatgttaagtgaaataagccaggcacagaaagacatacattgcatgttctcacttatttgtgggatctaaaaatcaaaacaattgaattcatagagatagagaatgaaaagatggttactgggggctgggaaggctagtggtgggaaggagatgcggagggttaatgggtacaaaatattggaaagaatgaataagacctactattggtagcataacagggtgactatagtcaataataatttaattgtacattttaaataactaatagtataactggattgtttgtaacgtaaaggataaatgcttgacaggatgaatacccccttctctatgatgtgattattacgcattgcatgcctgtatcaaaacatttcatgagccccataaatatatacacctactatgtacctacaaaaattgaaataaaaaaatttaaaaacggaagtaaaagttgtaagtctgaaattgaagcaggcagtattggagaacccagcacatgaggggatctttggcatagtggtttccaaactatgatttttctcctaagatagattccatgagagtttcctaaccaaggaggaaaaccagagagctatacatcaaatgtgaatttctgccctgccagggcagttgctacatgtgagaagtgttgcctatcacagttcttctgagaactattagagaatactgtcagcctagctaaggatgtcatgacttaatgagccactatttgcattgtacctctgtgatggttaattttctgtgtcaacttgactggcacctgagtgcccagattaaacactatttctcgatgtatctgtgagggtgtttccagataggattagcattttaattggtggactctggaaagtagaatgccgtctccaatgtaggtgtgcatcaatcaatctattgagaccctgaatagaataaaatggtgaaggaagggggaattcaccctttttttgcttcctgccagcctgtttgagctaggacatcttatcttctccagccctcaaactgagatttacaccatcggctcccctggttcttgggctttcagtttggcctgaatcactccactgacttttactgcatgcagacagtagactgtgggacttcttagcctccataagggcatgaatcaactccttggaataaat

SEQ ID NO: 915637 - DNA, 4001 bp, Homo sapiens
taacatttgtaacatcagcacttgaagatcacaaaacattttcataaacactaattagactttcttacacacatggaaggtaatcaggtgatcaaaagaaatgtcaactgatttagggagtttggcagactgtgttctgcatattagagagaggtgaagaatcacctgatagaattatgtgaaatttcagagaactccattaaatagaatgaagttactgggattgaaatattcaggcctgtttttttgttttttttttggggacagactcttgcactgttccccagattgaagtgcagtggcaccatctcggctcagctcactgcaacctctgcctcccaggttcaagggattcttctgcctcagcctccccagtagctgggattataggcgcccaccaccacgcctcgctaattttcgtatttttagtagagatggggtttcactatgttggccaggcttgtctcgaactcctgacctctagtgatccgcccgcctcagcctcccaaagtgctgggattataggcgtgagccactgcacctggcccaggcctgtattaatatgaaagttgttttcatgtattttccctttcgagacccatcttagcttccaacaccccactggagacacccatctcctctgtgtcctaaatcctattagggtcaggaaatgctccaagatccaaaggataacattaccagcatattctgtgagaaacgacaaacaaaacgctgctaattttattatcttcacatgctgagaaggagcccaggagggatgaagtaattcattctgtgcagtgaggaggaaagggaggatttctaggtctctaatgctcagcttagtaaactaaccccatccttaagattgagttcaagtcctgtctcttcccaggacacttcccggacctcaccagtgattgcacctttctcaactcctgcagggctggctagttgacatttggcatttgtcactgccttaaattcaattcaaagcgtgcttatttaaatagaaagatgcaaatacatagtctagagggggaggcagacaggcttacaaggagccataatgaaacttaagtggcattatgaaattgcccagggaatatagcagaggaagaaactaactctgcctgggaggagattgagaaaaccttcccagaaaagatgacatttgaactgatctttaaaaggagtaggatttcacctagttaaaacatgtctggagggggagaggagggggagaggaggtgaaaaggagggcatttcactcagagggcagaagccaaggcacaagaaaatgagaaaaggaagtggctagagatgatggaaagatgcgttggggccagatggtaaaagtgctagtttttattttaaaattccccacctagatttcgaacttcttaagagccaggaccagtcatattccccacttatgctccatctgtatatcccccaaatagacacccacaagtatctgttgatagagatgaatccctacgtcatctctgtgatgtcactgtatctgggaggctgggcgttggtttcagacatacctgggccccaattctggctctttactagctgtgtaacttcagtgtcctcctctgtaaaacacagctacctacctgctcggtttggggggagatgaaacgagggattgtgcacggcaggccttctacaaatggtaactctaattaaagggctctaggatgcggccacgaaccatttaatttgcttatatcgcgcgcatccattcaacccccactgtgtctaaaaagagagccgaggggaggaggatcctcgcacttgccaagaagacggtcatccgtcggcgctgcacgcgggcctaggctggacacaagaggctccccagcagaaagggtctttcggcaaaagaaaaaaggggctctgtcccccggcgccgggaatcccctcctctggcactgagctccactcgcgcccggcgtccggattccgttgtaaacagctgttcaggccagcgagggagtggcagggccgggagtaggggaggacgcgggcgcgccgagaggacagcctcgaggggtgagctccacccgcccgcggaccccgcctcttcctcgcctgcccccgacatcccgggatgggatccgacgggaagaggcgaagagatgcctgcgacttggaccgcgcgcctcccggacgggccccgccagcctccgccccagctcccgctctcacctgccacggagtcggcgttctccctcctgccgctcccgccgcgaatcaggcgcgggctggcgccgcggcggaagccggagggatgcgcggcaggcaggggcggttcagcctctgcccctccgaggccgcatccctcgccacgcggcgggcggtcctcccagcccgactcgggtgggcagcggtcagagcggccgcttctcagcatcaggaaggaggagactgctcttggccgggaggcgccagcccaatatagggcagcgccatgtcttcgtacggaaaggcgggagggtctttcccctgcttgccgaaggggttcagtaagcggtgactcgcagctgggcggcgccgtgtttcctcagggagaggtggaaaacatggccgatgaccgctcagggggctccgtggccagtggctcccagccaagagtcgcccgccgcacgcagtgaggcgccatgttttcgtacggaaacgcgagaggcatggccgagtgcccgccgatgagtctcagctggcggtggctcgaagctggggatggcccgcccctaggcgccatgtttccatacggaaagacggaacgcgcgccgcatcccagccgctggtgcgggtgacgcgaggagaaagggaggcggagaaggcgcgggtcagtcaaaagaaggaataagaagccattgcatctgaaaccttccccgcccgttctttgaaatttaattttgccatcctgtttgtagctacacaaagtttattccccttctctcatttcctcagctttaaaaaaaagttagtccgggcgcagcagctcacgcctgtaatcccagcactttgagaggccgaggcgggcggatcacgaggtcaagagatcgagaccatcctggccaacatggtgaaacctcgtctttactaaaaatacgaaaattagctgggtgtggtggcgcgcgcctgtagtcccagctactcgggaggctgaggcaggagaatcgcttgaatctgggaggcggaggttgcagtgaggcgagatcgcgccactgcactgcggcctggagacagaccgagactctgtctcaaaaacaaacaaacaaaaaaaaactacaaaaaagcagatggggtgacattggtgctttcaaacactgcttctaaatagatcacatgtgggtagttattgctaacgtattgaaggccgagtgcaataccagaccctcaaaccatttactaacttgcacattaaagtctttgctttaaaaaaaaaaaaaaaaagacaaaaacagaagttctctggtgaagattcactttttggaggaaaaaacaccaaaaacccttaagatactcaactaaatggaactgttaagatctacaaagaatggctgggcgcggtggctcacacctgtaatcctagctctttgggaggtcggaggtgggtggatcacaaggtcaggagttcgagaccagcctggccaatatggtgaaacctcgtttctactaaaaatacaaaaaaattagccgggcatggtggcatatgcctgtaatcccagctacttgggaggctgaggcaggagaattgcttgaatccgggaagcagaggttgcagtgagccgggatcgcaccactgcactgcagcctgggtgacagagtgagattccgtctgaaaaaaaaaaaaaagatctgcaaagaaaacatgcagttcttctgagtctaaactcgtaccattaagtctctagtgtttttcagccctgactacaaatacaacttggaatctcaggggcaggggttggaaaagtatcatc

SEQ ID NO: 915638 - DNA, 4001 bp, Homo sapiens
ccatcttagcttccaacaccccactggagacacccatctcctctgtgtcctaaatcctattagggtcaggaaatgctccaagatccaaaggataacattaccagcatattctgtgagaaacgacaaacaaaacgctgctaattttattatcttcacatgctgagaaggagcccaggagggatgaagtaattcattctgtgcagtgaggaggaaagggaggatttctaggtctctaatgctcagcttagtaaactaaccccatccttaagattgagttcaagtcctgtctcttcccaggacacttcccggacctcaccagtgattgcacctttctcaactcctgcagggctggctagttgacatttggcatttgtcactgccttaaattcaattcaaagcgtgcttatttaaatagaaagatgcaaatacatagtctagagggggaggcagacaggcttacaaggagccataatgaaacttaagtggcattatgaaattgcccagggaatatagcagaggaagaaactaactctgcctgggaggagattgagaaaaccttcccagaaaagatgacatttgaactgatctttaaaaggagtaggatttcacctagttaaaacatgtctggagggggagaggagggggagaggaggtgaaaaggagggcatttcactcagagggcagaagccaaggcacaagaaaatgagaaaaggaagtggctagagatgatggaaagatgcgttggggccagatggtaaaagtgctagtttttattttaaaattccccacctagatttcgaacttcttaagagccaggaccagtcatattccccacttatgctccatctgtatatcccccaaatagacacccacaagtatctgttgatagagatgaatccctacgtcatctctgtgatgtcactgtatctgggaggctgggcgttggtttcagacatacctgggccccaattctggctctttactagctgtgtaacttcagtgtcctcctctgtaaaacacagctacctacctgctcggtttggggggagatgaaacgagggattgtgcacggcaggccttctacaaatggtaactctaattaaagggctctaggatgcggccacgaaccatttaatttgcttatatcgcgcgcatccattcaacccccactgtgtctaaaaagagagccgaggggaggaggatcctcgcacttgccaagaagacggtcatccgtcggcgctgcacgcgggcctaggctggacacaagaggctccccagcagaaagggtctttcggcaaaagaaaaaaggggctctgtcccccggcgccgggaatcccctcctctggcactgagctccactcgcgcccggcgtccggattccgttgtaaacagctgttcaggccagcgagggagtggcagggccgggagtaggggaggacgcgggcgcgccgagaggacagcctcgaggggtgagctccacccgcccgcggaccccgcctcttcctcgcctgcccccgacatcccgggatgggatccgacgggaagaggcgaagagatgcctgcgacttggaccgcgcgcctcccggacgggccccgccagcctccgccccagctcccgctctcacctgccacggagtcggcgttctccctcctgccgctcccgccgcgaatcaggcgcgggctggcgccgcggcggaagccggagggatgcgcggcaggcaggggcggttcagcctctgcccctccgaggccgcatccctcgccacgcggcgggcggtcctcccagcccgactcgggtgggcagcggtcagagcggccgcttctcagcatcaggaaggaggagactgctcttggccgggaggcgccagcccaatatagggcagcgccatgtcttcgtacggaaaggcgggagggtctttcccctgcttgccgaaggggttcagtaagcggtgactcgcagctgggcggcgccgtgtttcctcagggagaggtggaaaacatggccgatgaccgctcagggggctccgtggccagtggctcccagccaagagtcgcccgccgcacgcagtgaggcgccatgttttcgtacggaaacgcgagaggcatggccgagtgcccgccgatgagtctcagctggcggtggctcgaagctggggatggcccgcccctaggcgccatgtttccatacggaaagacggaacgcgcgccgcatcccagccgctggtgcgggtgacgcgaggagaaagggaggcggagaaggcgcgggtcagtcaaaagaaggaataagaagccattgcatctgaaaccttccccgcccgttctttgaaatttaattttgccatcctgtttgtagctacacaaagtttattccccttctctcatttcctcagctttaaaaaaaagttagtccgggcgcagcagctcacgcctgtaatcccagcactttgagaggccgaggcgggcggatcacgaggtcaagagatcgagaccatcctggccaacatggtgaaacctcgtctttactaaaaatacgaaaattagctgggtgtggtggcgcgcgcctgtagtcccagctactcgggaggctgaggcaggagaatcgcttgaatctgggaggcggaggttgcagtgaggcgagatcgcgccactgcactgcggcctggagacagaccgagactctgtctcaaaaacaaacaaacaaaaaaaaactacaaaaaagcagatggggtgacattggtgctttcaaacactgcttctaaatagatcacatgtgggtagttattgctaacgtattgaaggccgagtgcaataccagaccctcaaaccatttactaacttgcacattaaagtctttgctttaaaaaaaaaaaaaaaaagacaaaaacagaagttctctggtgaagattcactttttggaggaaaaaacaccaaaaacccttaagatactcaactaaatggaactgttaagatctacaaagaatggctgggcgcggtggctcacacctgtaatcctagctctttgggaggtcggaggtgggtggatcacaaggtcaggagttcgagaccagcctggccaatatggtgaaacctcgtttctactaaaaatacaaaaaaattagccgggcatggtggcatatgcctgtaatcccagctacttgggaggctgaggcaggagaattgcttgaatccgggaagcagaggttgcagtgagccgggatcgcaccactgcactgcagcctgggtgacagagtgagattccgtctgaaaaaaaaaaaaaagatctgcaaagaaaacatgcagttcttctgagtctaaactcgtaccattaagtctctagtgtttttcagccctgactacaaatacaacttggaatctcaggggcaggggttggaaaagtatcatccaaaactccggggagggtgatgccagacaagttttaaaagctccctggggaagcaggctagaaccttccttaaaagattaatatggctgggtgcaatggctcacgcctgtaatcctagctctttgggaggtcgaggcgggcggatcacctgaggtcaggggttcaagaccagcctggccaacatggcaaaaccccgtctctactaaaaatacaaaaattagctgggcatggtggcaggcgcttgtaatcccagctactggagaggctgaggcaggagaatcccttgaacccaggaggcagaggtggcagtgagcggagatcgcacccctgcactccagcctgggagacagcgagactacatctcaaaaaaaaaaaaaaaggttaatataaccaattttcacttggttaggagcaagtgaatgaatatactcaagttccacctggagaggatactgcaacaataccaaaatcactgatttaatttgggatatttcacttgtaatcttttaatgttttgtactgtttcaatattcaaaaaatacatatagacacattccattttgatctttggctgcaaggactggaaattcaaattacg

SEQ ID NO: 915639 - DNA, 4001 bp, Homo sapiens
tagaagaccagcaagattcactgcagcctgcagagaaaggagcccactcccggctgtgactacacagtggatcacatctccctgaagggagggatatgtctactcaggtaaccattgcaggcaaccagcgcaccccaagccatcagaccacctgaacttccaaaaacaaccaaggtggaaagcggggagaaagaaatctgtggttgttgtgaactgataaggttctgctcctttgcaatacgtgtagtgtttttagtatttctttttactattttgaaatgtggcaggcttaacagacctttctatcccaagacctgggctccttccaacgcactgtttttaaacatggcctttttacattccctgctcctggaacatcatctgtctctaagtttccagggctcactgaggtcaattttcatttctgcaaatcacaggaagccacttgcttctaagaagttaacaagcctcctgagaaacgctggtggctggtatttcattgtttcataaatatttttatatagtgacactatccaactttaaataaatcttttaaaaaaggcaatttaaaagcaaagaaaattctgatctggatttcatttattttcatgagaggggaggtgtgagtcctcattgttttcgactcattaaaaatattgctttgattttttaaaaatacaaaagttatttttttaaaaagaagaaaagtcacagaagttaaactttctttaaagcgggactctggacttttgaaaacaagtgttgctgttacgaacaaagactagaagtgtacccagattttctcccccccggggatcatttctcttccaatcaacaaacaaatcccccagtatttcctaccgaaagggaagggaagttttccagggagagtctcctcctgggtttggtggtaactgcgactcagtcttttttggacacaatgtttctgctgactcctgaaaattttccacttgaatgtgcaatgaagcggcggcggcagcggcagcaacagtcctggagaagcggcaaagacgaccgtgccctttttcatctttgagaagaaggagcgaaccccccgccagcggcacaagtctgcgcagacccgggccggcctcgggggtacccggcgccggggggcggcggcgaaagcaggggggtgcaggccggctccgggctccgaggcggcggctctgcccgcccgcgctcgctccgaacttctggctccccagcgcaccccgtccaaggcgcccgagggtgtgtgcgtgtgtgcgcgtgcaggcggcgggagagggggcgcgcggggggcgcggcgcggccggccgggggccgcctgttgccgcgcgggctcccagcgcgcggcccaacttggcgtcctggcaagtcgcgcggcggcgcccggccgctcacctcggagggggcgcggggaggcgggtgtgggggcccggccgcggccctccgcgtgcccgcccgccgtcgcacacaaagcagagcccgcaaagaaagagcggcccgcgagggacgcgccgccggccccccgctgccccgtgcgccccccgcaccccagcatccgccccgcgcgccaacttacctcggcccagggagccaccgcagcgcccggcgagtccgaggcaaacttcggcgccgcttcccccgccctctgctcggtgcccggctccctccccggctcccggtccctgggcccggccaccccacccctgcctagcaccgctcctgccccggggccggctggcgcgctgggctgctgcccgcgctccgggcaaaggtggaggggtgggggggcgtcactgcatggcctgtgcctggacgcggccgccccgggcccgggccccgccgcgcggaatggcccgcagggtggaagcgagtctgcaaagtgcttggtgggcgcccgcggcgggcggcggggccgcggcggcggcagcagaggctcggctcggctcaggcggcgcggcgcggcgcgagcgatgctaagaatgttcggaatgaggacaggaatgaaatgaacgccaggaccgaactcgctccggaggggtggggcctcggtgacgtcatgcggcctgccgcccggggctggaggcggggcctgccgccgccggtgacgtcatggggaatcggggcggaccggcgcggctgcttcgccgttggggcgcgggctttcggcagctgggcggagtctcgcgcccacgggggagcgtggctcgcgcgggagccgccctccgtctcccggcgcgggctccgggctttgtcccgagccggggcggggcggggcggggcggacgggagctgcgcggcttggaagtccctgcgctcgcgcgaagaactctggaagcctgggtttcttccagggggcaggcgccgaggcgggagttgcgcgcgacgcgcctaccgtgcctcagtttccctagtccgggacgcggaagcgcgggtgactgcgttgagtgctcccggactcgcggaagtctgcaagtgtagggtagagaagttgcctttctggtgatgcagattgttgctctcgagcgcggtggacgccgtctccgggccagattcccagcctgccatttcttctcttccctttcacttttataaaagttcacagctctcactcaagtcgaaatctgtcttacggttgggaaaggaaaacctttagcttagcaaagaaggataattacagagttcgtaataaacctgccctgctagcaaggtcttctccaagtcagttaaaaaactaagttcactcatctctgccggttgtacttttcaaaagtaacttcctaaactttgaaatgctgcatccggcgactttaagttagccctttcattattgagaaacttcatttcattattaaaggaatcattttaaccctgccattggaggtagtgacgcaaaagtgacatagacgcagtcggtaaatcagaaaacgggtaaaatcgacccactggggacagaaccgtctaaagtttcgggtgattgttataattatttaacaaactgcaaagcagttcccgcacagtggacctcattcgttctaggcacttggctctcttttccagctgaggcctcaggattaaataacaacatattttgtgcccgaggaatccctatatccctatatatgggtaactgaggagactagactgtgactgagtgcaacacatttctacaaaacataacttttactaatacattgttttccttttttttaattttttttttattttatttttggagacaggatcttgctctgtcacctaggctagaatgcaatggtgcgatctgggctcgctgcagcctcgactccctggaatcaagccatcctcccttttcagcctcccgaatagctggaactacaggcacgcaccaccacgcctagctaatttctaaaatttttttgtagagatgcagtttcaccatgctgcccaggctggtctcagacgcccgggctcaagctgtcctcctgcctcggcttcctgaagtgctggaattacaaaagtgagccactgcacccagtcttattaatacatttttaatttcaactcttgaagtaatcggagtaacaggcagttgtaaaaaataataataaatcgtttgttcactttgcccagttctccccactggtaatgtcttccaaaactctaatacagtatcacaattgggatattgacattgatacgatccacccatcttattcagatttcctcagtcttacttgtacgtattcgtacgtgcctgtgtttaggtctatgcaatttcctgacttgtgtaggtaccaccacagtcaagtacaagtgcattttatttctaattcataggcaatgataaggtaatacagtgaggttcacaataatgaacccaaccaccttggcactggtttttggaaatgtgttagaaaacacataattaatttggcattaaaactgtactaggcatatctctctccaaatgtcatcttctaaaagcaccagataaatttcgatggcagtgc

SEQ ID NO: 915640 - DNA, 4001 bp, Homo sapiens
tttgctcctttgggaggcttttggtgaacagacaacagctcatgtaaaagagaggagtgcaaagcggccagaaagcaggcctgttgcaccaggccaagagccagctctccagttctgaagcagggagcaagaggagttatgcctcaacggagggctaatttctttccaggggctgacatccaaggagagcagcaaaactaatctggtcattcgtgtatatgcatcgtccaaaccccagaagttgctgagaagcagcccgaatttgaggctgtaggaggcgctgtgtcgggtcataggcactctgggcccatgagctgtatttaatgtcacaaccagcaggtgaaaaggggtcttctaacatttctatttacataatagtaacaaattaaaaattcctggaagtactaattaaaaaaaatctttataatctctactacagtattatacacaggtacttatttctgaagttaacagtaacaaattatgtcctggcatggatttatccttcatggggaactttttaggagtcatgcccaagtatgaatgagggctcaaattcacactgaattatcatcatctgtatggaaagattaattggtattttgggctgcactgattggccaatctgcctagggaatggaaaacccataataccgcatggaggagacggaaaaccatggccagggagaatgaccctaacttcctcttctgctgcaaaggtgaggcagtttgcaagattcttctcttcgtgggtgatcctaattagttcacaattttgaataggaaagaacggactgttaaatatttttaattttaagaaggatacaaacattaagaatatctaatatggtaaataatacttgtcaaatgaaaaagagggtgctaaacacaagggcgtaggtttaaactacggtaattaacactgcagaagccattattatttttatatatatatataaaactgttagcagcatggcctatcaataacatcagagttgctaaaagaaagaatatccctatccatgcttgccctaagctgagaatttcacaataaacatagctatgtttccaggattttttttttcccaccaaataaaatgtactttcttggagctggggtaggaggttgaagtcaagggccctctttcattcccgtggggtttcacactatggtttaactgcttaaattcaccaattctggaaaaatattagcactgcacaggggcttgacgtgttcatctcagacttgtactcatgtgccacttgaactagacaaactcgcaaggtaaagaaaggtgccttagaattttagccataaaaagttaaaatctacgtagaccgccccgtctttgtctaaaatccaaaacaacagtagaaaaaagacatatgtggcctttcacttacccagggcagtgctacacagagaaaaagaaggaatcactgaggggaaaaattgtcttatttaagttttagatttgagggccacgtaaaaggtcactgatacacaaaccactgacatcaatgctattgtaatttcctagtttttggccgaaataagtagattctttaaagtctccaccacaaattaaatgccttaatggaaatcagtgatcagacatgaagtgcacatacccctatcttatctacttttaatggaaataattttgcgtaattttaaagatctactccactagcacagggcaagctggtacatacaaatagtatttgaagttaaataagaaaaaagtgggaatataagtaaacctcatttaaagttaatgaattttacccttgataatagaatttaattacatttttctcttgtatctgtagacacacatgcacctgcccttacaattgtggttccaataaaagtgtctctttatcaattcaagagcatgctaactgagagctttatggaattctgtagtactcaccttggtgctgtacaagtgcgaagatgaaagagacccaaattctaaggaatgatgaataattcatcctggaattttaaaaagaaaatgaaaaaaaaatccccagcttgccagagtaaacagaacaccaggtgtgtttagtggctaatcccaagaccatcaaaaccgtcatagaacaaattcacataacaacatcaacagtgctgagtcgggctgaaatcccctgaatgctggcaggtcctccgaagttcaacacttcatgaacaaattagatgcccagaagaagccagtctggaagtgtaatgagatcattcaaactgtcaagtaattatttaggatcagtgagagtggtatgcgtaaaggaaaggtatcccctctgcatcaaataaagcgctgaaaactaggacccaacgctaaagatgcatgcaggtcccgggttgtgtctctgcagcagaaaccacaccccagtgagacctggatttcctaattttcactacagctttccatcagaatcaaacaaaagttggttaaaacacaatgtgttctacagctaggagaatttagagtctgccatcaccttctccatagaatggagccgatccatcattttgaagtattgaccagattcagggccagtctactctgttcactgacttcccacagtgaaatgaatgatagaaacattagtaataaaaaaggaccaatccagagttggaatcacaataaaaatagaatccagcgcacaagcaaccaattagttccagcaagttaattaaagaaggaacacagcaaagagaaacttgttttcgtgttagtttacaatcggttgcatggtggctttaccctccatcaggagcatgttttgtctgtgtcactctgcaaagctgcgatgagaacacggacgcaagctcaagttagacatcacccaagcgtgtggctagaccatgaagtctcctcctgacagtattcttaaaaaagaaaaaccttcctcttatcatttgaagttatcacaattcttcagccaaactttcacgggaaaggcaatgaatttatcctgtgagagttttattgcaaatctttagttgtcaagtatatatgttgtaatttcaagcacatattaaatattagacagttttgctggaaagggtacaaaggtttagcagagatcacacacagctttaatggagaagatgccgtgcaagtttaagactagagcccttagggaaccggttcagagagaagtaaggaggattcatttagatatttgtatttatgaaaaatgtcactaacctgttctgtagaggctggaggaactgagtcagaaatattaagccaaatcttggtaagccagaaaaaattaggtaaaacaagaattcatgtcagttctcctcaacttgttgccaataatttctgattcctgaaataatgtctgaatctcgtactcttaaaaccaaaaattaagttagtcctgcactagagacaggtaagtgttgagctgcaatcaagtttttttctattgattaaggaaaagtaaatctaaagatcagtttcaggattgcgtagagaggttcttttcctgaaaaactagacctttttttttcccctttgaaaaaaaaagtagattcagatggaaatgtcaggtacttggagctgaaaccttgggcctttctgatcagaatcactttgcactgaaaaacacaaaagaaaaccccccttctacctttgtacccaaaagaaggcaactgtataatgttacagaattagcatccaccagcatgggattaaaactccaaacaaagcagctgcctccaacatttaaatgaagttggttttctattaaagtctttttttgtttctctggttttcaacagtcgccacagataggctctactctattttttcacaggtatgcatgaagtatttaaagaaaatttccaaactttttaggttttatgccctctcttttctctctgatgcaccgctctgcaggagataggacagggcactttccaggcaaaatctaacaagggacctagcgctagacacgatcttccacaagggaaatct

SEQ ID NO: 915641 - DNA, 4001 bp, Homo sapiens
aggaagggcggaaaagaggggctttggggctccccaggacaccaagtcagtttctgaaaacggcgttccctggaaggccttccaacacctccgagggaagacttggagctctgaagacccaatgaaacctcagttctgactgactcctcctctgcgatcaattccggatgcccccacttagtccctgcctcggtaaccggttctttggggacagcagcatcagcacccgacgcccatcgcacaagtgggcgccgtggtgcgaggcgtatcctagctacccaggccggggtgggggcgccccggtacttacactccccaagcaggcaaactttcaggcttgtctttcgagaaccgggagctcgcatcacagttccgggtaatcaccgaggcagcttatgtaattgcccgcgatgccgctcagcagatctctctccttactcggcctcagagctcagtacatgggcaccctcttccccccaccccccaccccggcgattggaatcccgagcttgccccaccaccgccttctacaaagcagcggggtgatctcgtgtgctacaaacaccaagccagtatgcaggttcaggcaaaactctggctgcctccctgcgcccctttcactgcgtcgatggtttacagataactgcatttctataaaccctctctccacggttagggggtgggagggagttagagatcgggtgggggcttggcgcggtactgttgagggctctgcacccaactgagcagtaatacactcatccacatggacgcgggtgcataaatcgccttaacattttgccctgaaagcggagccaatttccaaagttaaggaccacgcagctgaatttccagtactttccaacctcgcctaggcgggggcaggcagagaaggggcgggcagcgggcagctaactcgcccgacccccccgccaagaaggactcactaggtgaaccccccgcccttcacccaagtagttggttgtgtattcctcggttgcgtgtgtgtgtccacacacacacacacacacacacacacacgccgccccactaccttccagtctgctcctccaatgtaacgaccgcatttaaaaatggcaattaaaatgactgaggagctcggtgatcacatttcaacccagagcacatttcccgaagctgggggtgagagtagtcatacagtcacactcacacccgggagccctccaagcgtccatctggcggctgcagcctcagttggctcctagacgaacatcaataccgcggccgggcgcccggtgaggagaggcgggcgccccgcgggttgcagagggcgaggagctggggtcgcatctccaggatctgagctccaaccaccgcccgtgcggggctgctgcagccggcacttgccccgcagggcaggctgcagccgctgaagcccggcgccgcctcgcgggctcctccagcgcccgacgggggcctggggcgagctagtctgcagaggggctgcaggcgaccgggccggggcggggaacgggatccgggagaggcagacgaacctggggcgcgccgcctccctcccacccgcttcccacctccctgccctcccccaacccttgctcccaggctccagtccgcggcgggctccgggggctgcggcggctccaggctccagaacagcttgcctcttcggccacccgcgccctagcctccctcctcctgggccaggggagcaagcaaacatctcccggagccctcggcagccgcgtgagctacccgaaccctgcccgggccagcagtgcagagggcgatggagctggcgaggcgtcgccgcggtccccaaggcgcttttccgtagagcggatcacgccgccttaccgtggctgcaggctgctaccgccggggaagcggcgaggacggcggcagggaggcaaggcgccgcgccggtggctcctctctctctcggcggcgcggctcctctgctccgcgagccgtagcggggcgcccaggaaggagcaggtccgggctctgcgctcagctccagcgagaccaacaatagctcccgcggggagcggagccccagcgagcctccagccgcgcgcgcacgaccggctcccgctcccggccgctcccggccggcgtccctgccagcactgctgccccacatgaaacagctgcaatcccgaggcttctggggggttggggcgggtgtgtgcgcgcgcgtgtgtgagtgtgtgtgtgtgtgtgtgtgtttaatagcttcccttctcttcttcccctccctgcctgctcgcctgcctgcctccgtcccccaccctcgctctcttacacacagaaagagagggcgagcgagagagagacacacacacacacgcacacgcacacgcaggttacatgaatgggaggcggtagccaatcctacgaggccggcgagccgcgcggcgcactggcgctgggagcagggccgcactccggcgcgggggggcgccacgcaggtgatgggcgcctctccgggggccacgcgcggccgctccctcaccccagtctcggttcctctgtctccttcccccttcctctccgccgccttctccatcttctctccttttacctcctttgctttctcgagttctccgagctctctcagttcggtatctttctggtctctttcttcttttaccctccttgcttgctttctcttcccctttctgaaactttctcttttcctttctggactttcttgtacttcctctcctcttgccttttgttctttcctcctcctttggctttctctccaggctccccgtagcacggtctcgtcccctctccctcctcttcgcctttccctgggtctctctggcgcccagggcctcccttctgcctgctcgctggatgttactccacaccccccaccccaacacttttctagggacggtctctttcaagttgctactgcagcacaatcagagtaattaagagctgagatcttgagttccttcttcaggcatgcaagatgcccaaagaaaggccctccttcctcggacaacttccccaaaaccatggtaacagctactgagtcgtgataacaatcacttaaaaaatagcagtgattgcggtccaagagatttctgtccctcgaatgtttggatcgtgatggcaagcacatttccaagagaagggcatttttatgtgatgagagcggtagtttgactgagtggcaacttggaagggctttggggaagagactggaggaattcccactccagccctgctgcctgctggctaaaggacttagtgcgagccatttccccttacccggcttcagttttctcatctataaaatggatgataccgacttcaccagttttggtgaggattaaaagagagaacaatggaaagaaagcactgggtgtatatgagatgcttaatttatgttagtttccttctttaagacaacttccttcatgatcttctgctacagtgtgtctctctgatctaaagtagtcaatgaaggaggaaatgtgacaatgctaatttcacataaatgtgaaaggaggggtaggctattttgaaaactcttctgtgtggtgaggagactgtctagccagttgccatatgctgattataaaggcatcacagattataaacgtggggtgctggaatgccccttcaacatctcataactagggcatctcagaaaggcagggatgggttggggtgggtgggaagtttccacacaatctgtccaatctatttttaaaatctttatgataagtgtacagtgaccagtgacaaagcctctgagattaactaaaatgtcaagtctctgcctttgaatagcatttatcaactttgtgtcctcactgcagacatcaaatgctgggcatcagctgtgattggcagttagatttagtccttcaacaaatatttcttgaccacctactttgtggcaggtgctgtgataggtctcggcattcagtggtgagacaaacaggccctgttttctgagcttacagttcagtagg

SEQ ID NO: 915642 - DNA, 4001 bp, Homo sapiens
aacagaataaaagattaaggctccataggcatacagcttacctccaattctcttggcctcttgcaatttctattatcaggctttacaaggtgatttgccatcatattccgaaggcaccagctacaaagcttagaacaatgccagatttaggtacaaactccatgctacaagctctctggaatccttccctgtttcccactcctactgctgatgttaatttagactgtcattatctgtcactttcctaaactcaatttctccctcctctaaatcattctatcaactgctatttgggtaatctttcaaaactttgattactgcattcctttaactcaaaaactttcattgttccagaataagttgaaattccatgatatggccttcaaggtcctgtattatctggtgcaagcctactagtcccatcattttcaactactcctctctatgtacttagccaaatgagtctctctggcaattctgccttgtttcaggactggctcagttaagattcttttatcttcggccgggcgcgctggctcacggctgtaatcccagcactttgggaagctgaggcaggaagatcacctgaggtcgggagttcgagaccagcctggccagcatggtgaaaccctgtgtctactaaaaatccaaacattagccaggcgtggtggcaggcgcctgtaatcccagctacttgggaagctgaggtgagagaatcgcttgaacccaggagagggaggttgcagtgagccgagattgtgccattgcactccagcctgggcaacagagcgagactccacctcaaaaaaaaaaaaaggattcttctatcttcacaaaatcttaatgtttaaacaggtcttacagttcatctaattcaatctcattttttacaagtgagaaaacagggacagtgacggtggatcaagtgacaccagtaagactgagctaaattagaaccgagatctcactcgagtctgaggttattcccactgtccaaccttactttaaagtagcttcaaattttacttttacttttccataaattcggaagggattttccctaggagtccaaatgttgaaacctggaagggtatagtctctgtgtctttgagatgaggggagccctgtccatattcaagttatcaattgactttgttgtttttgagaaacgatgctgatttgggtaactttaacacatctgtttgattagtcctataaaatatgcatatatagaagacagaaagagcaacaacaaatttgaatgatgcttgttaagtaaattctgtatcgtacgtctccattcctgccagtacctttatagtatgtaagtttacgtgctgtaatagtattaatagtatctagaaaatactacacatgcacagcagtgctaactttgccttgggagttggaaaatacttcagagaagccaacaggcagatttttctctcttcccttccccttctaattttccctttccccttcacccccttctcttctctccccaagtaacactgtgcacctatgtcaaacgaaaacttataatcaagtaactgtttctgcaaaaataagttcgttttcctgtcatggctcaaggcctcagcagatccaggcctggtggacgggctggtcttcgtcgtgtgccaaacactgaccactgccctggctctgccatcttaggcttagtgacctggctgttactaagcactgtcccctctgccccatgcagctgtctccttctagtcttctccctcttctcaacgcgatcctagcccctcaggccatttcacctccattttccctcacttcccgccgcccctccgcacttcctccctactgttgtttccgccccactagagcccctcagaggaagtttccatcctcgcacccttccttgtgtcacagtccgtcacattctcacaggcgcccatccctccagccccaccccaaggccaatgtacttcgcggtatggggaccttcctcgtcagcgaacgcgagggagtgaagaccccgggcgcggggtgctcggacttcgggggtggaggtgggaagcgcgccgcactcccagcagcccctgcacgagtcacgtgacagctctcccaccaccaccccccccaacttccccaccgtagcctcccagagccaggccccacggaaaggcagctttttcccggttttctcccgctctttcccctccacttggaatactcgtgaaacaaaaatctctccctgccaccctgtgtgtgtttgaaccaggaaaaaatctgaaactggtcaagaaagaacaaggaagacttgccaaagcaaggccggtgtgtgtcccagcagcttagaatctcagcaaaggaacacaaaatagcacatccacggcctcttttcgagtaaaatttacttggtttgtttgcaggaagggtttaaaactgcgtttgcagatgctctgtttgcaggaaggctttaatcacgtgttcccctggcccacaagcaaggcttttagatccagagcctcagttactgccccctcttcctctttggtgcaaccaaacgttcagaatcacgccttcttagaaaattcttccccgggtgtgtcaataagttaagtctaattggcaacagctatcaaaaagtgttgcataacacacatggctcacataattgtagctttgcctcatcgggtgctttaatgcggaggctttgacctgcaatttcaaagatatacattccaagcttacgcccagttagtggatgtggaagaaaaaaaaaagcaaattacctcataacacaaaggtcaataacacacatccataagctccaggtacaaaatcttacatcttagagaactatatttaacatttacatacattactaaggttttttttttccttttgcttgattaaatgttagttatcattaagtcttggaagtattctgtgtgtgtatatttatttgctgtttgtgaagaagccggttgttttaaataagttcctagaaaataagcgctcaatgtgtttaatctgagttgctaatattgtgaaatataggccacataatactagcctagataactatggcgaagtaaggagtctcaaacactgtcccagaacaatagcaatctgtgttgaatttttaccctctgtggtaaaatgaagggaaaaggaatgaagttttagtttgccttaatttttatctttattgtttcagactcttcagcagtataaagttttcatcaagtcaaatatattcactttaaagtgactgtgctttattctgataccatgtccttcctaatttggggggcacaggtgagataagttttatgaaataaaaagattaaaaattcttacatttttagtgtccttccttggtaaaatgtagagttgtccactgtgtttatctcctcctccttattatcatggttgctgttattatttttaatggttcattaaacccaagggtctgggaaatactcatggaattcatctcacagccttcacactgtatgatatttaaacaggtggttgtccatctgattcttaaaatatttccaagaaaaatgattccacctaatgcataaatgctttcatcagattaagagaacaccatggacattttattttcttttattttttaaatattaacttccattgcataagctaaatgggtaggaataagtgagatgatattgttatctagagctttaaaatattcaaagggctgtcatcattatctcatttaatctttgaaaacaactctatgaagtacaaaggacactgagacatttgttgctctatatcaaagaaaaaagtgtttgtcccaaaacttcaaaatgtgtaaattacacattctgcatctttacagctggagaaaattcactggcaatggaatatttaaaattagagcttgcttagtgtgctgcttctgatcactacttgatcccacttcgtgctttcatgttaattggcccaattggactctacagttggaaggtgaaaacttactatttcaa

SEQ ID NO: 915643 - DNA, 4001 bp, Homo sapiens
ggagaatggtgtgaacctgggaggcagagcttgcagtgagccgagatggcaccactgcactccagcctgggcgacagagtgagaccccgtctcaaaaaatataataaaaataaataaataaaaaataaatagctctttatggaggttgtgaagtttgaaggtgacaatccaggggaagccccgtgcctggcacacagcaagtgctcaatatgtaaccattgttatactgttattggttcttactctctgatgaagtagtttgagggggtgccagacagtgcccagcacgtagtaggggcttagaaattgtaaccagcaactgactaatggaaagacgtacacctcctcaaccagcgcaaatcataagacaaggagttaactcttgcaactggtgggatgattccattaaaaacacaggtctcgccgggcatggtggctcacacttgtaatcccaatactttgggaagccgaagcaggaggatcacttgagcccaggagtttgagaccagctggggcaacatgtcgaaattttctctacaaaaaataaaaaattagctgagcaggatggtgccggcctgtcctcccagctcggggtggtgggggtggctgaggttggaggataccttgagcctaggagtttgaggctgtagtgagctatgatcacaacactgcactccagcctgggtgacaaagcaggacgtcatctctaaaaaacaaaggccgggcgcagtgactcaagcctgtaattccagcactttgggaggccgaggccggcggatcacttgaggtcaggagttcgagaccagcctggccaacatggtgaaactccgtctctactaaaaatacaaaaattagccgcacgtggtggcgcgcgcctgtaatcccagctactcgggaggcggaggttgcagcgagcagagatcgtgccattgcactccagtctgggcgacacagcgagactccgtctcaaaaaaaaaaaaaaaaaaaaaagtgggaggcgggaggatcacttgaactgcagtgagctataatcgcaccactgcactccatccagcctgggcgacagagtgagatcctgtctcaaaaacaaaacaaaacaaaacaaacaaaacaaaaaaaccccgcaggtcctaccacggggtctttgcgcaatttatttggtgcgtccttccccggactctgcgcgtcacgaccgaaaggcctgttacaacgcctgcccgggagggggcgctccaagaatgcctggcggatttaaagggcgaaagattggcgcgggcgcctctcccagagaatcctagaaacttggatcccatcagcttccccccattttacagctccagaaattgagtccctggccagcttattgccctgcgggtgcccacggcctggcgaggccacactgaccggcctcgatctgggatgcagtgtccttctcccccagattgatttccatggagctgccgcggtgcaactccagctccaccagcgcgtgctcgtccagttcctccggcttgtggctggccttgtacccctcgtccaacgagccccgccccgggctgtgccacccgcgggtcttgctaatgttgcggccctcctcgtcgaagccctcgcagacctcggacagcggcatgttcagctgtgcctgggacagcgtggtcgtggtccacaggtcccgagtgtcgctatgcacgctctcctcgtccgagccttggcggtcggaagacttgagcgacacctgtgggccacatacaaggagggagccaagggtcgcggatggctggagcgggaaggaagagcgggctggggaactgagccgggccgggttggggatcccgtagaacgtggggttgggtgggggctgcgggcagccaaggctgagtaagaaatagcgccaggggcccgagtcggaccaagggtgggttggagcggacagggtaaggggcctagggagacgtcttactttcgaaggcttttcctccatggttctgccccaacggacccagacgccacaggcctcgagacgagaagggagtcaacgctccaggaagggggcggggcagggtctctcgcgctgggagagttcaaacgacagccctccacgcgagatgccattctctctcccctgcctctccctccctgcaccccacccgccaatgtgtgtgcagaggctggagacgcgcagcccatcctggctgatccccacgccggaccctacacagtctcctccaggcagagacgcgggcctgagagggccgagacttgaccgacctgggtgcccggggaccctcggcctgggggtcacgggaggccagaggtgcccccacggtggcccgaggaaagcaattccacacccactcgcgtccgggagcgtcacgcccgcagcggtgcagaccgttttcatttattgatgcaggctttgaggcacagtcgtgaggtgctgtgagggatacacccgcccggggcagcgacacagaaagccttgggggggtctagagatggatggaagtgagggaagggccggggccagggaggaggcggagaggcaactgtagcctcctccccagacttcagtctcgtggaaagagggctctttggtcaaacaagccaggcatgccggggagagcagaaacgaagcccttgagaggcccggccagggatcctgcccctacaccggcacgcctttgtctcggggacgcccggggccgcggggccgcacgggcttcctggggggatttgggcggcggcgacctctcggcgcgcggggcagcgggcagccgcgctcgctctgcgtatccgaggactcgtcgatgaaggccaggttctcgctgggataatccagggccgaggccgtgggcggggaaggcggctgagccttctcggggggcgaaggggatcggggcctgcccagcggctgcgctggacagggcggtggaggcagcagtggctgctccttctccggcggcggggcggcgggcccggctcgctgggtcacgcgcgctgtcaccgtgccagtccagctggcagcctgagccgtgaggccgcccatctgcacggagagggaaagcagccctcgactagaggtctagaccccctccgcgaccccccgggaacctgccccttcaccagcagggatcaaaccccaaccctcttttctgcctggtcctccagcctcagccagccccaaggatggaagggctcctccactgggtgctcccagcagggtggcaaaatacaaatcgcctggctaaatgtgaatttcagagaaacaacaaataaaattttagtataaatatatctcgtgcaatatttgggacatgctttttttttttttttttttttttcttctttttttgagacaagtctagctctgtcatcccggctggggtgcagtggtgtgatttcagctcactgcaacctctgcctccccggttcaagcgattctcctgcctcagccctccaagtagcttggattacaggcgcccgccaccacgtccaggtaatttttgtatttttagtagagacggggtttcactgtgttggccaggctggtctcgaactcctgacctcgtgatccacccgcctcagcctcccaaaatgctcggattacaagcatgagccactgccccccgccataataaaattttatttatttggaattcaaatttaactgagttttgtttttgttgttgttgttaatgtttgtttgtttgagaccagggcttactctgtcacccaggctggagtgcagtggtgcaatcatgacccactgctgcctcgacctcccctggctcaagcgatcctcccatctcagcctcccgagtagctgggactacaggcacacaccaccacgcagggctaatttttgtgccttttctagaggcgggatctcaccatgttgcctgtgctggctttctgcatttttatttgctaaatccggcaatcctacccatgaaggaagaggtggtgaaggtacccacaaacttatacccctctgttccctg

SEQ ID NO: 915644 - DNA, 4001 bp, Homo sapiens
cgccgcctcccgctccttgcgggcgtcctcgatgaggctctgcctgcgcccaatgaaccgcggggactgtggggacaaggggcacccatgcctcctccacctgctgagacccggggacctccacccacagctggtcccacagtcgggcagcgctgatggcacacagaggcaggggatgagagcacgtttttgagcgcctactgtgtgcctgctggggcagatgctagccgaggtgcctgcgggcattgcacgcccttcccgatgggggcagcccagtcagaagcagtggtggtgggggaggagtgggggctgggaaggtgctcgcctgctccccactctgtggcgagcagacagacagagacgctgtgtcactcatccccaggccaggcgctaactggattagtgatgggaagagggcgatgtcttgatggacagtggcatcggctgccggggagggaacggcagctcaggaaggagctgcccccacagggccccagtgaacaacccccctaccctcctggctgccgcacaggggaccctttctcacactcccatcaggacacctgtcctcgggccctgcccctctgtgccaccccgcaggcgcccgctcctggctgccttgtcatccctccaccctttgtcatagctctgggcgcaggtgtctctccctgggctcagcgcctctgacccctcgatcccagagccgtcccaggcctggacagagggggacttggcagacacctggggctcatcccttggagctgaactcccaagaaggctctgggccccttgtaagagaagaatcagcttcatcctgagcttccagggttgtggaacatgaaggggagcagcagaagcccctcccagagtcccctcttacttacccttggggtgggggtgtaggatgcagctggggctgcagttccaggccacggagagcctgtgaggctgggccccggggcgccctggggaggggatgcctgatggggagcctggtgggggagggtaggggagggcgggggaggacgggggagggcgccctgtgtccctgagaaggtacctggaaatgacactgctacaactcacaccacatttcaatcaaggtccataaataaaaacccattttaaatgtgccagggagcccaaggttctgagtgcccaaggaggcaccgaagacccctcctgtgggctgaaaagctcccgattatccagcctggcccacacagtcccctgtacacagggcttccgagtgcaggtcacagggaacacagactccatggtgaatgaatgaatgaatgaatgaatgaatgagggaaataagggaggaacaggccaatgggaatcaccccagagcccagataccctttgaattttgccccctatttgcccaggaccccccaccatgagctgctgctagagcctgggaagggccttggggctgcctccccaagcaggcaggctggttggggtgctgactagggcagctggggcagagggaggcaggggcaggtgggagtagggtgggggctgggtgcagcagccggggacctctggccatcttggattttttggatggatttgtttccacattccgatcgttaagattcaagatgaaacaagacacagagacccacacgacccccgagagaggtcggcctaagaggggcacacacagggacaggcatcacctcaccctcccccaacagggactcaaacaccaggcacaggggatgccgctgtgcccaggcctccacatccacgccgcgtcccaggggtttgcatggaccctgagcctggggctgccagccaggctggggagtagcagaggcagctggcaccagccctgggctccggtccactgcggccgccgggcacctacctgccctcttaccatgatggcctctgcctgcttggcgtccagctcagacacggccctgcggaagcccttggcctgtggcgtggtggcgtcgggggtgggcatggctcagtgtggaggtccgggctccgtctccacagccctggcccagcagcctcttataagctgagctgacgtcaaagccccctctgggtcccccaccttcccctccttacatcccccacccctgcctgctgtgcctgatggaggcgggggtgggtgaggaaggagggaggcgcaggagaaagggctcgtccgtggaatctaattgccttcactccccagccctgtctgaatcatcctcagcccgcgggcttgcggggaccaggggctcgtgctctgcggggggctgagacagccagggtccccttggccccacagccctcaagagagcacacagggaggggctttctggcagcccaggggcacacttttaatgaacaccagaacctcgtggcagaccgacccagaaagccccaagacggggaatccagcctccagcctcagatgtcaggaggcaatttgtttgcttctccagaagattccaggccgtgtgtctcatagacgtggttcctaggagtgccatctgcccacagcccccgggccctgcaggtgtggcccttgcagcggcttcccaagctcgccccgtggggtccagaatgtcccaggagggcccacctgtccagtgtggaggaccctgggaggctgaagaagacatctctaaggagacgccacgcgtttccaaatggctgccacctcctgcatcacagtccccaccagggttgccagggcgaccagggccagggacggcttccacccaccccactcagcccctctatggcccactgctagctcctggcttccctcggggtcctgtggccccttctttaaagagcacgcacgtccctcagtgctgagggccctgatgccttccccttggagagacctttgcagtttctcctctaccccaccaggccccgggttgagggtgaccctggggtgacctgagaactcccttgaggacaaccccagcctagagcctcccccaagttccatgtccgccccgcaggcacccgcatccagcccacgcccactggcacctcctgctcccagccgctgccccacccagggagagtgatgcccctgcccagggtggcttctggcccttctggtggaaggggaggcctccccatccctctggggtcagcagagatggccagagcctgccttgacaatgctggactgtacagagggaaggacgtggccccagagtgcatggcctgcggctgaacgctgccaccgctgtccctcctggagaagaaccgtttccgacagggcttggggcttcctgtatctgctgggctttctggtgttggcagcccaagatgacaccctgggcccagcaggagccagaagccctagacgctccctgacttctcgaaggcctaccccggctggtcactgtggcagccagagctggcatctctcagggcccactctgctcctgtcagctgtgggactccccgctccccgttctctcttcaacaatagcccctgggacctttcctaaaactgcttcagccatggcatccctgtcccacacccctccgtggctcctcgctgccctctgcaggcaggctgagtgctcagtcaaagcaaagggaagaccccccaacccttcccacttcctggcccagaaggatttggggctccgtgatccccggtttgcagtgtcattcctcacccacctcttatccgggtgaactcctatgcatcccacaaaacccagttccgtcgctgctcactctgcaatgcctgccctttcttgccacgatattaatgcccctcccttgcgctcctctggaacatccctgggggcagggaagcctaccgctcggcccctgctgtctctcagcacccagtgcagaccctgtcctctctcggagatgctatgcccctccacagtgttccccaaaggcctccacctcctgtgggtcctgcccacagtaggtctgggtgcctgctcagaagggcgttggagggatttgcctccaagacctcagcctgaaggctcagcctctggcct

SEQ ID NO: 915645 - DNA, 4001 bp, Homo sapiens
tgagaaaatgcctggagcagagctctccataggctctgtgtttgggggtcccatgtttattccgcataattacagagcagccttcacacagattatgaagataacacaaaatggcagacagtgggtacgatggaaagaacactcagctcaaagttgaggccagtcttacttttgtctccttactgtgtgactttgggtgagtcacttcacctctctggcttcaatttccatactagtaaactggggatgagaatcttttcctacatagctgcatcaggtggttttgagattgcaatggacgtggatgttgtttacaactaatgagaccagtttgtgggagcagggctggcaggtggcacagaatcaaaactggcaggtgctgtggtccaatttctattaatactagtctttatccatgagtgaactagtggtgaccatgctagggccccttcccacctcctaccctctgccaccacctgcttgtctagcttgctgctcatccacactcaccaccccagcccctctgtgcatagacatgtaggcttagactggaacacatattcatatgtacatacaacagggcttcccaacaggcatgtctgcatactccagtttgcctggaatggattagagtgccatgactggtccctcggcttcccgtttggtgggttccaacctgggatggtcagagtacccccagcctgttgtagcagtactgcaagcagcctcacctatgtatccccatgtgccatataataattttccatgttctgtgacttgaaaaaatgttgggaaacactgtcacacaaatggaattcacaatgttcacttaaatcaatgtgcatgccttaggtaagttttttttttttttttgagatggagtctccctctgtcacctaggctggagtgcagtggcacaatctcagctcactgcaacctctgcctcccaggttcatgccattctcctgcctcagcctcccgagtagctgggactacaggcacccaccaccacgcccagctaattttttgtatttttagtagagattgggtttcaccatgttagccaggatggtctcaatctcctggcctcatgatccgcccgcctcggcctcccaaagtgctttggtgtgagccaccgcgcctggcccctcttcaattaaattcttaacaaagtcactgatgagaacacactcattcaattcacacatttacaagcattcacatactaataaatgcacacatgcacaaacacatatatgtgcatatgagatatgccctcacaggccacttttccctctgtttccatatcacttcattgcaattgccaatttgaggtcagaaggatagtaacacaggcctagtcttaggccctcctaggttgtggtcccaataccctgacccaagagtggctctgtctgaaagtcaggctgttcctctcccagtgggttgcaccactgccccctctcctctcctggaatgtccctttgtagactcacacccaccagcatggccaccattaccttccctagtgtccaaggtctaccaaacttgtcccgtcatttcctggtatttccttgtcacctcctgggctttctcggtgaggtgcatgaggatgtgatggaggctggagaagtgcaggtggaactgggcttccaggtccagctctcctgaggcactctcgtcctcgacttcctctgtctctgcggttccattctcttcgctgcctgccaccttggcctgccactcctcccgcggcagcagcccatggtccacatccacacagatggccttgagcatggtgaagtaggtgtagagatcaggggcctcagcctgggcctggcccccaggcccactcagctgcacgtcccgcagaaggctggggatcatcaccacctgctccatgttgtgcacctcggctgcataccggtccatgacggtcagcaggcagttcttggggtaacgcttggttagcacctgcatggttgcttcctctgacacaatgagaccagcagactgcccccgcactatttctaggctctcggcagattgacaggatgccaatgcccagctgttgggtcaacacagccctgttttgggccaatcccagggctcaggccccagcatctgtatcaggtgatccatctgcccagagacagatctgccagccttctacttgtcatcccagctctgcatgactgccccagcaagaacccgactcttcctctgtcagcttgctgagccagttggaaggaagcttttccctttggcaactggtatactggacttcagggcaataaataattctttcaggtcactggagaccaagctgtctctttgctgcctgcttagggcagccctccaaagcacagttcactccttcaacctggggtgactccattgtgaaatggagaggatttgaagtgaaacagcttgatgtggggcaaggaacactgaggttggagtcagaagcccagtactgcaatttcctagctgagtttttttttgtttgttttttgctggctaacatttattgagcacctactgcacatcagggtctgctgagctttttcgtgagtgatctcatttaatcttcaccacaacccttgtaaatgttttatttatttaatttttgtagagatggtcttgctatgttgcccagtctggttttgaacttctggactcaagcaatcctcccacctcagcctcccaaagtgctggaattgcaggtgtgaaccaccagtattcctgttttgccagtgaggaaatttaggtgcagacagctaaagtaacttgctcaaggtcccactggggctgggattccagcccaggaccacctctacccacctccaggcagtgctgtggactgacatgaggttacatagtcatacaagttaaccagatccatatcctctgtaaatttgaggtggtgtgaggattgaataagacaaactaataaaaatgctttgtatcagtccagacaagcggctgggatcaaaagaggaaaaaaaatgctttgtaaaccacaaagcccaatcctcagatgtattatctatgcagattctagattattgctaaggcttctcccaaatctaaccagtcattccataagctacaatgcttccactttattactgacctttccttggaccagcagtcttggaagataataatcttttgcgtggtcatattgtcatagtttacaaactgcatttgctatatattttttattagatatttaagaaaatggccgggcgcagtggctcacgcctgtaatcccagcactttgggaagcccaggcgggtggatcacgaggtcaggagatcgagaccatcttggctaacgtggtgaaaccctgtctctactaaaaatacaaaaaataagccgggcgtggtggtgggcgcctgcagtcccggctactcgggaggctgaggcagtagaatggcgtgaactcagaaggtggagcttgcagtgagccgagatgatgctgcaccactgcactccagcctgggcaacatagcgagactccgcctcaaaaaaaaaaaaagaaaaagaaaagaaaagaaaatgaaggcctggggaaaggcccaaagttgcacaacaagttagtggcagagtcaagtggagaataagacattctgaattctggctcaggtacctgcctcctccactgcctctggtgaaatctgctgaatgatgatacctcccacgcctgcaggagaggagagaggaggagggagcacagggaggggacgtggggctgaacagggcctctgtgttgtctcacctaagccaccctcacctccaccctagggcaggagcccactctgcaccctcccaactgacaatcattcactcctctgctccctcccactacagccagagctatgaaaaagcttatctttagactgaacaaaattccgcctcccagcccggcatggtggctcatgcctgtaatcccagtactttggaaggctgaggcaggaggatcatttgaacccagt

SEQ ID NO: 915646 - DNA, 4001 bp, Homo sapiens
tggcatatagcatacactccaaagatatttattgtgaatgaatgaatgaatctctctgaatcttacatacccaccgggttatgatgggggttaagaaaaacaaccaacatctggcgatgactgcttcatatacgtgagacacaaatccctaagtcactcgccatccccagtggatggctagataccattcaccatagctaaggatgctcccagatagggagcatctattcctatctggataggacacaagctaatcgtgttcctggaggagagaaagacatagtgatctccgattgtatgtgagccaaggatgcttcccaatgtccagctctctggagttcctgggactgcagttttccagcccagtttcaatagccaccctggataggctgtctgcctggtctttttttgttttttgcagccttggctgaaccaacccttggcgaggcgacgcggagccggtagtctagcctatctgcagagcagtgctcgcccaggagaggccacagaaggggcgtgcacccgcgagagcgcgcagggcattgcctcggttgagtgcgcccgggtgcgcagggcgcaccactagacgagttcagggtccctggcgctcagccccttgacgggtgaggctaggatcccgcggcggctgcagctacaatcaatgctctctctgtcccggggtggagctgctgccctgagccagatccaggaggaaggggggtcggcatctggcttttgaatcgaggactcttgtttgagatgttgtgcgggcttgggatctaggaggggaagggggagcaatggccagagcaagaaagggaagaaatgggtctggggctggagagggtagaagagccaggggaggggtggagagcggctggggaggtgcagtctgtattcatttcctctggtctgtgtcctcaggcggctccagacccagagaaggtctgctcttcctccctctcaagcccccggcgggcctcatccttaatccatttccgtattccaatcctctcctttcccaaatgagtcccccttccccctctctcatccttttccagctctcccctcccccgtccgcccgccttccacccagtccccgcctgcggcactgcggcttccttctcctccggtgccccgcacccagcccgccgcgaggtcacccggcagattccctctagctcgccatcctccatcctctccccgcagtttcatccgtcctcctccccgcctctgcgagctgggtttggggacgtctgggtggaatgtagacccacaggctgtccttggtgcccttcctccctgttctccagcgccccagccccagacaccagtcccccagcgggcgaaagcccgggagcgccttccccgaaagacatcagggtgccacgcggcccctgccctgcagaagcatccccctcccgcccctgcctggaaagcaggcccctccctaagctctgcgcccttcttccctgggcgccctcggaccgtggcccgaagcctagtgttgggaagtcttgcatgggcgcctgacggcggtccccgagccccaggtcccaccggctccagttcccacctggactggggtcttccgctgctgcagcctcctccagacgcgccgccgcctccggttgctgcacccagctcggagcccgcagttttcaccggggatggaggagagggggagcggggagccgggggctcagccaatcagaggcggagattgggggagaaaggacggcagggtggggtggggggtggggaaggaagagaaggcggtcccgcattggtgtgagagtggcaggttgcggcggaagggggccctcaccctgtggctggcaggcctggccagggacgggagggttcgggaccccggggatcagggtgcggcagcccaaagaacattatcctcctccctgagccccgcaatggttgttccccttttaaggctttaaccctttcttctgacctattcttcaggagtctgtgggaaaaccaaagtgtaagaggtgcaggatgcaggccgggagcgcccacgcctccacatttccttttcagctggagcccacctcctccggagcctccagtgagaagttttggaatattccagtctttctgaaaggaagctggttgggtgtttttcagtgttggagcagcccttcggaagcgaggcaggtgctggacccaccctgtccgtccctggtccccagccccatttcgccccctcatctattccagagcacccagcccttcagggggctgcaggcgctttttgctctgggcattacgtcttcttcagcccctgggctggcaccttctggtccagacagctggaaggttcttctggctttcctgagtacagtctgcttgtttggtcttcagaccaggaagggagtgttgccttttagcaggcactgtgctgggcacattacattcatggcgacctttaacccatggccgcctgctgggttcatcccatctcaatcctcacctcctgtcttggctggtaagtgggagagctggagaactgacctgggctatggaccccagctctcaagggtgagccattcctcttgctcatccctgcctagtgggagaagagagagaggaactctgggaaagaggaggagacagcacaaaaaggactgagtcgaggccaactcctgatcacctggggcactcctgataacccaccgattggatgtcaccagaagccctaggctcatttttagagacagtgctgatgactttctctcactcacaggtgtagtgaatttttttgaactaacgtttatttgattgatttgtatcctgccagcctctttatgaattctgatcacgacattctgtgggcctccccaatgtctgcctgcctgttctcctatttcttcatggaagtcagccctggcaccttccctgcagtttctgatactgcagtggcactgttggaagccactgttggaagcttgcaagtgggaggagattcgcttggtttcccagcatttagggtgatggaacactctaactggaatgagccttgcagatggttaagtccaaaggagctattcactttggtaaactgcagaggtttctagggcattttatgaaaaatgcagctggccttgcccacctaggacctccttaatctagtactagagccagctgagtctgcacttttctcacgctccccaggatctggggactctaacacatgatctggtaagactgtccctcttcataggtgagctaacctggcttcttgtttgtaggatactttttaaggccatgaatgtcctggcccctggctgctgacttccctcctccctccaactccatcccagccatcttcccattcatctacctgatgcattccagacacactggctctggcttctgtctgcctcttcatggcagcgcactccttcctgcttaacagctttctgattctgagtccagggatcttaactgcagaaggcatctgggctctgctggctgaggccctggatgctccgtttcccactctttggccctgtctctgagtgttgctgggtggaaggcctagcagtgctattttgataaggttatgaggacctggcctaatttctgggtccccaagcaccttgcttttaggcaggggaggggagtatagactgtagaaggtgtggcaattctgtgtctgccaagcaagatctctgattggatggaattaatggctctgattagacatctgaggtcaggggatagagcacaaggtggtggagggaggagattttaaaactccatttactgtggataggatcggagtgctgaaaccagcaaggctttagaggaatccagctaaggcaagacttcctgccagaagactgcggctgccctgttggtctcttagatctctcttttcccaccatctcctgttttcccacccagaaacatatggggataaaaactcttctaaaaacacacagtcctttagcatgacctagggactgccagccattccc

SEQ ID NO: 915647 - DNA, 4001 bp, Homo sapiens
ggaaaaagcttagctttggagtcagacctggattcaaatcatggatccattaccagctgtaggaacttaatcttactgttaagaagctttccttatctataaaaattagacaagaatacctaccttacagggtatcttctggattatctattcaatagggtaagaacaccttacagggttgttcaggattaaaggtccggacagtagtcaatacatgttttcctttcctcactctctcttctatgcctttgcataggaaagaggaaactgagcacctacttgcaactattttgaagcttaaatgaggtaatacaaagggcctagacaatgcctggcattacaataagtgcataataaaagcattattattctcatctcatacgtctttccttcttgctcactgtggctcctggcccatctcctttctgctccttgaaggtgccaataaaagttgaaagaaacagttcattcaggacattgtagaaaaatggtgatgattcgatttcatcccaagacaatcagaatgtgcctggaacacagtaggcattcagtagctaagttgttaaattactatatgacagggcccaaggtctatgtgttaccctaaccctaactcggttaatctacataacctgtgagatgttctactcttcatctgggaagcatgctccagatcacacatccagtaatggtggaatcaagatatgaggtcagcacctgtcactgaggtctatctgaagctacttaatgactatactgcctctgaatttagtcaaagtccctacatcaattgtcattaaataccatttatggctgtctaatgctctgaacccagcataccttcctaacctagtttcctaatggccccttaggagttaacaggcccactgcaaacaccacatattgataaataactgcaatgtgctgtagtatatctggaacccctgtcattcccaaaagaggtactttctgtaccttccaatgttcctcctcctccatccacttagaatgccatccatctttgtgattataaaaacgacatcacgttttcttagtactaaactttgcccgtggaaagtctcccattcttcaaggctgggctcaaattccacatccttctcgaggccttccccgtgattcctccctccataaacttaacaatccattttcctgaaccccatcacatctgtttgcagttcacccgcaagcaggcgctttatattctttagcacgccacctggtatctcaaagagtctttgtgcacaacaaccattgcctgaataaacaagaaaaaggaactgtaggtaggagcttggtgagacaagtaaagaagatggagagtgattaaggataatggagtaaaaatatcacaaagggttctcaaaaagcagggagtgaaaaatgagtactaaacaggctcttcgagaaaagttttttcttgggctgcctttgtgcagcctaggggcagctcacctgaaccagaagtcccagccagcctcttccggggtctcgacatggtcacgctgcaggggactttagtgcggacgattctggaatcaacggagatacaagaaagaatgctaatgtcctccaaaacccgcgcagagcgagatggaggcaacgagaggcagcctagaacgtctccaacttttgcgaaacacagacgcctacgtttgagccctcaaatccttccctccgttatctgcgccatttccatctcgcataacctgcccctaaactcttctcggttctgtccttggtccttctcatccaggaacccctatctcagtatgtagttcactgggaagtggctccacagagacacttttgttgggtgaatataagtaagccttgtgttaccttgttatccttgctaattaggatcaactgaatggataatctagatgatgaagtaatttgctggctacagacccaacactctgcagactcgactgcggtccgcctccgctgcgccgcaggctgtgcagcgcgacccccgcggcgcttggtgggcggtgcatctctgcggcgccgaggccccgaggacttctgggaattgtagtcctgtccccttgggagcccgcctggcacctgggttgttagggctcgtgggaggactacaacccccagggtgcagtgggacaggcgttgccgggtcgcaggtcccgccagtgcgagcgcaacggaggtcgaaggcgttcagactcttagctgaacgcggagctgcggcggctatgctgtggagcggctgccggcgtttcggggcgcgcctcggctgcctgcccggcggtctccgggtcctcgtccagaccggccaccggagcttgacctcctgcatcgaccgtaaggatctcctggcgggcagtaggacaggtgtccagaaccccggcggacatatgtccgcgaggggctgcagtctccccgttccatccagtcaccccggcgtcagctccccttccggccagtcacccccccggcctggctccctactccggccggtcacccccggcctggctgccccctccggtcggtcaccaccatccgggtccccatctggcccgtcacccctgcccgggtcctcctccggccggtcacccccgccccggtcctcctccggccggtcacccccgccccggtcctcctccggccggtcaccccccgcaggttcccctccggccggtcatccccccgcaggttcccctccggcccgggtcctcctgcggccggtcaccctcggatgcttagagaagtgaagaaacttggggcttggttgttgttgggttggttggtttttaatcataacagtaggtcataaaagcagtgagaatataagaagctggctgggtgctgatggtgacaactgcacaagaactccaggtcatacaagatttgctcacacacaaagatttggtatcttaacacctctggctataagacacttttagtgttgaaactcatgcaggaaaaataattattattgccagtgggaaactctaccagagctgacaaacttgagtgtctttaggctctgaacagtaatttgaatgtagcgaggagtggtggagacccggccagtttgtgacttctctgccaagaatgtttataaacacttttttcttctgaaatatttttaaatttattttaaataaatggcagttttctttacaacagaataagtcccttagatatcagatctataaagtacagtaaggcatagaatactgttttcttctgaatgtcctaaaactcattcaagaggtgctgccctggcctagcgcttagaatttgataacccagattaccctggttgataccgaagcagataaggaattatttagaggtgggttttgttattgtttgcatcttgcttacacttgagtggctctgcagtcaaaggcttttcccatttcatttggagtgtttttctatttagctttacctttttagtgtatatgtattggcatcttgagctctgctagtaactatgtattggcatcttgaactctgctagtaactggcaaagttcatgagtggtggtatttgttttgtttttatactgtatttccttctgggaacttgtgtttacttatgcatatgatttgcataaaactatttccttccattagaatgcaactcagatttatttcttaagcctgtggttccttgaactatttgttttaggaagtagccatttacagaagaagaagatttgttaacatttaatgagctcttgctaggattgaaatagtcatcctttgtgtgaatggatcttatttatttatttttttgagatggagtctctttctgttgcccaggctggagtacagtggtgcgatctcaactcaccgcaacctctgccccacgggttcaagcaattcttgtgcctcagcctcccaagtagctgggattacagcacatgccaccatgcccagctaatttttatatttttagtagagacggggtttcaccatgttggacaagctggacttgaactcctgacc

SEQ ID NO: 915648 - DNA, 4001 bp, Homo sapiens
tgcctgccccggcctcggccagcgaggtgccatccctctcgctttggatggcagccagtttgcccaacagccggtgtcggtaatgggccttaaaggcccggaccactgagctgggcaggggaggcgtggtgctagaggcggccagaggcaagagcttcacgtggtagagcccaggcaggcctgccagctcctccaccactcgggcagccagcagcaaagccacctgtcggccctgctgtcccatgtcccggtcaaactgtgccaaccactctaaccaggggatgcccaggtccgggtggtaggaggcaggcagagcctcactgcggatcccaaagaagcatctcggggcagcctggagcccacccagcagtacccgccgcttctcggtgcccctgctgttggcacacagcagcacctgtacttgatcacatgcaccaaagctgccgggcactgcccgatacagcaagggcaattcagcacagccaaacacgtcctctggagagaagtcttttagggaaagaggcagctgagcctgggatgtgagccccgggggaggtggctcaggggggaatgaaggcgcaagaacatggcgggccccaaagccgacgttgtttcggcgtttccagcggaccagccagccgatgctgggcacgaagtcctggcccatgatatcggccagctccttggctttgtggagcagcatgggccccgtcacgtcccaggccttggcccgggcaatgtggtaccagcagagcagagcctcgtcgatcccgctgtacttggactcccgcttgcgcttgcgctctcggttggctgtgccgctgcaccagtccgccagcagcttctccttattcttgcagatgcgcgagatctggggctgggaaacctggaagcgccgggccacctccgactgggacatcttggactcatccaggagttccagcacctggatcttctcggccagggacagggcgtgaagcttcttcttgctgctcagctccatggcctctccggggcacctgtgcggggaggaaagattgagcgggtagagtaatctgaggccggaagagctaggaaaggagcgcaggagggaaaagagattagatgaggacttgcgcaggcaccgggtgagactggacccgctgaaagaggaagtggctaggccgagtggaagccggctggccccgtccccaggatgccagggcagagctggggagggggcgtctctccactcagaaggacaggggagtctgggctggggtctggcctcactcgggaagaaggatgaaaagtgcaggggacagctgcagagataacaaaggcatacggacgggggagggcctgggactggggccgagggggcaggtgtggggctacggggctgcgggggaggagcccccgggagggagtgggaggcggcttgggctggattcagatgacgccgctggggggtgggaggtgggtggatgcacacagagttgaggtgacaggtgtacagacgacaaaggggacagagggtgtctgaaggagcgaggctaatttggtgccgggtcctgagagggaggctaggcgacggtcagtcctgaggggagcgagagggcagggccgagggcgcaggtgcacgagcgacaaagggcgggaggcctgaggaggctgcgggcagcggaggggcggggtgtccccgcggggagggtggtggcctgggagggtcccagggcgcgggaacgaacgcccggacccaggcaggccggcagccggactccgtgccctggccggtcactccccctcgacccggagtatgtcggcggggcggccccaggcgcccgcccgcccggcctcccgctccgcacccacctcaggcgctggtcccgcggctccagcccctgcccccagcccggctcccgagcccctgtccgggcggcgacagcagaacaggggagggatgggcgccacgaccccgagggcagagcggaccgagggcctgcgcggacggcgggcgggcgggcgcgcgcacagcagagtcccgtgcgcgccgcccgcgccgggctctctcccggctgcgaagtccgcggtgcggcccctctgcacccacccgccgcagccccgccccggcccaagcagattggtcctcagtggcgccccgtccctcccccggctaagtttcattggacgttgcggaagtggcggttcgtcgagcccctctgggggcggggcttctagcgcggaggggcgggaggcggagccaggaaccagcaggactcccctgggcgcctccagcagccgccgaccccgagggcccgacgagccctgtaggtggtgtggtgaccgccgagctgacttggcgtcccaaagcctccctggccgtgaccctagaccgcatcggcttcttcgtctaccaagcagggctaacagccctcacggaattgttttgggaaaacgatgaaaggagaaaatggatgcaagctttaagccacacaaaagctggttaccatggacagcgctggctcgagtctgtcggccacggaaacactgcatgcttgggccagtaatgatttaggacgagtattttattagatttggtactttacaagattcaagttcttaaactcaagatctggcatcgttcccttccctgctaaccttcagtcccgaattaaacgcagacgtcttgacccgcagcccagctgctctccagcctcgctgctccctccgctcacagctccgcatcctctgccttcctcacaggcttccgtccgcacccccgtcctaccggctgacactgtccaactctccaagacccatctcaaatcctacctcccgcaaacccttcctaaatttcctcacctaggcctgctacagcgttcttattttccacatttcttttctggctctcggactactcagctgccaaagcgcatccattgctgtactccctctctgcctggcctacttcagtggaaaagcatgaggacgggctgcgctctgctcctcacacaatccccagcccagagcaccctgcttatttattgaacataacagtgcaggccggcctaggcttcccataggcaaggatgactttcagaatgttctagaaaaaaggatacttcagggggcccataactgcttgattcaaatctttcctttaaaaacataaaaacaacagttggacttctaaaacacacactgaagacatacgcgctgccacgtaagctctccacatgttcactttgccttcagggaaactgtgtgcacatcaacgtgccctgggaaaggctgcagggctgcactgcgggcagttcagatcctagagcacttgctctggcctgggagcgctgcaggcaactgaagccacacagaccctgctcctgcaagaacttttgtgtgtgtcccatggtgatgtcattagtttgcttattaattatatttatataaacttctggtcctgttttaaatgtctgagattgcaaggtcaactgttataaacctgtcatcacttccatctatgtatccaagactaggagaattctccaaatcaactgaaacataaaaatagatgttaaagttgattttaacccaaattttgtattgatcaaaacagcttcattgttctttataacaaagaattgttataaacttgaatttatgtaacaaaacaaaataaccaattttatattcgctttacatattggggttccacaaaaaaattttaatttggggggaaaaaagctgtatttcaaaacattaaaaaaaaaaaccaccatcatggaaatcttaggatgaaatggccttcttaatggagaaaggcaggagataaaccatccagcagagggctctgtgtaaaaacatttatttttactaatgtttagaatacaggaactaaagaaagaaaaaaaaaagacacctcaactccaaagcgacagtgagttagggcctgcccacggccaagggggaaggctactccagggtgtcctggcatggactgtccccccactacttaatgt

SEQ ID NO: 915649 - DNA, 4001 bp, Homo sapiens
tcatcctgcatagacaactctgtcaactttttgcccatccgctcatggatgtccaggtacttagagacacatcggtccaggcacacagactcgcccttggagagctctgcttccttgtagtgaggaggcacacacttccggtggcaggcactggtcattctggagggagggaggggcaaggtcatgtcagcagcatcctgtgacatcccaggaaccttgaccattccagccctgctatattgatttcacctcccccaagaaagcagtgtaaatcctcagtttacacctcaaccactggaaggtccttgcaagtaggaaacttgtctaagtccatgtatatgactaactaagtagaaaccatttgttgaggactggctacatgccaggcatcctgctaagtgctttacctgcattctgttatgcaatgcttacaataaccctaagagacatgtatccccattttacagatgaggaaattaaggcaaacagaggctcagtaattttctaaggatcacacagagctgggttatgaagccaggtcatctgacctcacagtctacacttaaaaatccttctaatttatagccttcaggataaaccaaccaatcaagagagcttaagccaataaaaatagcagacatttcactaagtgttgggcttgaggctaagggctttcatatatttttagatttaatatttatgatgtcctatgaggtaggtatcattatgtcttcttcataatgaggaaaccaattgtcaaacagtgcaagtaacatgtccaattatactgctggtgattggtggagccaggatttgttcccaaatttgccaaatggttatgagcactagttgcagaatcagactgaggtgctagttctggcattgttactgaccagctgccgaccctaaggaagttacttaacctctagaatcatcaatttcctcattttaagacgggactaataaaattaacccactggattattttgaagattaacaagtgcctgacacagaataaagggttttaaaatgttaactactaaatgggctggctatgtgctatttgtcaagaggcaaatactcagcttttcttggaacctaaccagagcctggattggagtttctcttcctgcttggctcctgcattgccagttccatccccatctaaatgcccaactcattctagtgaccctttactgcatctacattaggatcaaccttgaaggtgggtgtggggagggtaagcatgggcctcaggctcccctacattcaggaaggaatttgtcataagtcattcaccttcgataagggtgaccaagacttattttccaagacagggtagcacatagttctctttacctgttgtacatatcggccatcatctccacctccagctccgcagccagctgttgggccctgagaggatccatctcagcctagcaccgtggaagggatctccttctggcctcctaatcctgggagcagacatcaccatcagcacccaccgccgccgttcactctcctacccctggggctagaggatacagaggactcacagggcgccagaccaccacgggccactaacctcagtgagcttaaccaccccatttcacggatgtggaaactgaggcctagcccaaggtcgcacaggacgtctatggcgagcctggaaatcgagccccggatctctgatgccccagttcctggaggtcacctctattcaggagatcgaggaccggaggagaactctctaacccacgaacctgaacctccagggccctgggaatgggatcatacgctgaacagaggcgaccgggacccagcccaaaggctacacctctgaaatggcgacgccatcatcagggccacattgaattcagaggtcatgtgtcacttaccactgcctgggacggatcacaatgcccacggagaccccaacttctgacaaatactataacgttacccgcctcccgagaggctccagcggaagcacgtgggttacttccgggaggaaagtcccgcctcttctttgattcaaactcgcttccggaattaaataccaacgagacggcgccgggaactcggcgatcatagagagggagcggctggcgccgggcgaagaggaaggcgacttgccagtgctagagaggacaccaaagtaccatagaagcttgggcggggtgcagagcgtctgcagcccgatcagaattcaagtcctttgggatgtcaccgagcggcttcagtttattggttctgtaggaagaggcgtggcgacagacacctgtgaacctcacccccgttccagacagccgactcctgtgcgcaaatcaggcgtggagaaggaagaacgcccccaaacagcggttctgtttttgtttcgcgttaaaatcacctggaacgtttttaaacatcccagtgcccaggactcacctcatttcaattaaatcagaatctctgggagtacagtttaaaattcctcaggcagcaatacaatttaaaattccccaggtgattcgtatgtacagccaaatttgagaagcagtgctccacgggacgttgtgcgattactgctgtgtgtaggtcacactaagccccgtctggggttgcaaagataagcgagataggcttcctgttcgcagaaagacaagacgtgtaaaatatgttttcttcaacagttagaggtcctcagccacaaagagataataaaagcaatttcggctgccaccagggctaatcttgggtgagggaaagaagggtactggtgaactttccaactttcaagacttaatgtgttcttcaaactgcaccattcactcattccccactaaaaagaaggaaacaaggaaacaatactcagtcccttgatttgtcacacaatttcctggtaaaataaatttacaagatgtaaattaatgacgcaagggcacattgcccattggaaaaggtgggctagacattttctgtgtggtcatcataagcttccctaattgtccaagaccatcctaattttaaacaattgacctttctactgctttgaagactcatctttgccaaacttgtgccctgatttttaaagattggggtataacattcataaagtgcataaaatacacgaatgttaagcttaattaaatatatatgtatctatatatgtacatttgtataaccgccatccagatcaagatataaaatacttcctgcaccccaaaaagttatcttgtgttccttccccatcaataccccctctcgaagttaaccactattctgacctctatcaccatcaattagttttccttgttcttgaacttcgtgtaaatggaattatacattattttctattttgtgcctgacttctttagctcaatgtacctgtaagatttcctccatattgttgtgtgcatctgttattccttctgttttattgctgtctagtgtttgattgtatgagtatgccacaattcatctatccattctcccgttggtggatgtttggattgtttccagtttttgcctattatgcaataatgctgctatgatactcttgtacagatggacatatcttgccttggtttttgcctttgaaaatatagtcaacattggccgggtgcagtggctcacgcctgtaatcccagcactttgggaggctgaggtgggtggatcacctgaggtcaggagttcgagaccagcctggccaacttggtgaaaccccatctctactaaaaatacaaaaaagtagcccggtgtggtgacgggtgcttgtaatcccagctactcaagaggctaagcaggaggctaaggcaggagaaacacttgaacccgggaggcagaggttgcagtgagccaagatcgcaccattgcactccagcctgggcaacaagagtgaaactccgaccccccactccccgcaaaaaagaaacattatggaaagttaagaaactgcgtgggaaaaggagatggtttcttacaagaggaatcttgcaatatctactgggccttatgaa

SEQ ID NO: 915650 - DNA, 4001 bp, Homo sapiens
atggccaatggtggcaagaaaatggggtgatggaatgatatgctatccaggctgctgaatacagaagtaaattacacaaagttggggggcgggggaggcaataatgagaaaagaatggagaggctggaattagaaatcacagaatgtactcaatgggaccaatgtggggcagatgatagaaagctggatttaggagtttctagacgagcagtgaaacattaacgtagcattaaagaagtcccgaagatttagttttatccctttttatcataaccattgccatctacttctcccttcagtttctcttcctcggatttggctgcattgcagaatatggtccccagctctctcccttcctgattgcccgtgaagacaaccacacagacctttgttcaaaggttttactgctcatcctgagaagactgtacatactaagaaagtaacaacctggggaaatggctgaagttccaaaagactccagacttcttacaggtttcatctctcttctgtggccactaacttcccaaggaggcagtgcccaaaagccctgtggttttttgatccgttgtacttcgatagctcctcctttccctagatccagcagaactctagacatgtaagacatagttcacaaaacaacagttatgaaccaacaaatacttggctcacggttatgagccactgaagtcagtcagacttaaggacaactagacagagctcccattttctgtcatctgggcaggaaccaatctcctgttgtataaaatgaccttctggtactttctggaatcttgcttcctcatctgttaagtgaggctaataccgcttactcatagttttgttgtgaagatgaactaagagcatgacatattacccgttttaaaattgtacacacagaccctgctttaaccagatgcctgcaaatgctcaggttttccttctacatatagaaaacaatttctcagctgccagggctgaagccagcagatatgcactaaacgacagaacaacggattgtgccaataaagtaggcaaagcttccttgcccagaatataaatcaaactgagtaaaaactgggtatattggctccaggaaaaggagcaaggacacccagctttcaggcaacctcgaattctctctgtttaggattcaccaaccccaaggtccaccgggtccttcaatctgagggtccatccaaggccttccttcctggggttgggtatggctagctgcctgatggagagaccccaggctgttcagcagcaacgcctggcacagccgaggcagcctcgtagtctgcgatgcggcgctgtaccagggcaggcatgagctgcacgtaagcggccatgaggcggtggttggaatggatcagcttcccagcacagctgtgcagacaggcctcctagaaggaagatagggtttaagtggaggataaaggtgccctgtcgggtccgcctcctttcttccccatgcccagcctaggggtgagggtcgtgggaaggccagggccagaggtacgggaagtggggtgaggagggaagcagtctaccgctaaactcttcttgcagcgtaacctccctacacagttccccacctcctcagcgtccagagctcggtggtgcaagctgggcacacagcgctggaagcagagttctgtcatccgattgtagaccaacaggaagtcacgcagctgagagaaaagggggaccacaaactcagcgataagggccccacacttctagtcaaggtcgcgccgcccaaagtttcccaggcccgcgcgccatagcccgaagtttccagccctcaaatccctggccctgtggggttcccgcgatgtgtgcaggaatgcgagctgaacgtctggcctcgaaacgacttagttctcacttacgtttcgcagttgctgttgctgctgctgctgccgctccatcacgccaccggcgcatgccgtacgccacttccgtttcagcttctcggtgccgccccggaagtaacctctcgctgatctcgagagctagctcgagtatcgccctgccctggctgcgacgtcagctccgcccttataatctgcgacgtggccggcttcttctgcccggagaggacgtcatttccgccgagtccctgacctgctgctaggatcgcgacgggaactggagcccgaggtccccgcgcggcccgggcctggcgccctgaggggaagagcggcccggcccgaggtgagaggaacatgcttgggcgacgggaagttgaacgcacaaacctgtccagagggcaagatgccccgagccccggggaaggatgaggacacacctgatgtccaggtgtatgggggtgggggcggggactcacacacctgggagacataactgactgtggaagggtcaccgatatcctgggagagagaggcttttaccagagactgggaacatacacccactgatctaactaaggcctggtggggagggcccgaggaagacgaggtgtatgagacggaggaggggagaccccctgaaggaagggggaagaaacgctaaaggaatgtgaaaggccaagcaatggagaacaaacctgaataggggggtgaagacctgagccctggaaagggttcatctcctcagcataaacacgcctgcatggagataagttctaagagagcagactttccctcttcactgttgtattttcattgtcacaaatagtgcctgacacatagtaggcactcactaaatgtctgctgaatgagtgtagaaataatcaccagagtcctggtgaggttgggggcttgtgagaagacaccgtgctttggtgtgcctgtttcaaatgtgcgttttggaggggagaaatacatatatctgaagaaaggaatgatggccaaacgctgggacactcaaaccctgggacagcctttaaagaaatgacagaggaggcctccttcttctagagtgctggccagtgtccagaacttctgtgttgggctttgcagggtgctggggtggagagttttactccaatacctttcctagccatgacggacgggatcctagggaaggcagccacaatggagatccctatccacgggaacggcgaagccaggcagcttcctgaagatgatgggctggagcaggtgcttctgtttgattcttctaattgtttcaatttaggaatccaatttataaatcctaggttctcaccctccattccagtagccttcccctgacttatctgactcccttcattctttttacgtatcattttgattctgtgcagacttcccttgtgtactatctttatgatgcttgaatccaaacttgttcccacctccaaaatgcttctgcagcccctatgttcctgaagcaacccctcttctctggcctataggacctccagcaggtgatggtgtcaggacccaacctcaatgaaaccagcattgtgtctggtggctatgggggctctggtgatggactcatccccacaggtatgaatgttcagaaacaggaatcttgggtggaggaggggacaggaatggtttggggaagcataggatatgtctaggaaagcttgaattatgtctggagatcttgggaacttctgcttgtaggaacctcatggactctcctcagcccaaaagcaactcccagcgttgtccatccatttcccttttgccacttagcccctgaaatggctcatttgtcctttccctgccaccacctgagtcaagttaagacctgcttcacaggaatgccccccctctacagcttgaggctgagttggaactttgtgaagcttctcagaatttttagattctaaagtttagaggaacaaacagccctgaatctcacactaagattccacatgggaatgcaaccaggtttcttgttatcatgacccaccatccttgactcctgctgcccccaaactcagtgtattttcttctgtttcctctgcccctgtacaccaacaactccctgcaaacccctcctctaacccccaaggaggccat

SEQ ID NO: 915651 - DNA, 4001 bp, Homo sapiens
ctttttttttttttttttgccatgttttccttttcttggtcatgtataagcaataaagctgttttttgttcttcatctttcttaaccccaaattttcttctatgccttaggcttcgatggttcttccaacccccttaatatggcttagggtggtttttcaaaacctacaatcccccatttgcactactggccatggaacatttatttctagtgttcctgccaatcagagatctctatattaaattctaaaatgggattaaaagaagagttggagaattcacacttattgagtaactgatgtcatacaacctggaatttctgaattccaaataaataaatttcactctttgaacatttcatcttttactttttagcaccaacagacttgataacagcctgatgctgatctgacaatgggttgatagccttcccccactgacccttaaatctgcttagtaacaagtcctttgcttctgtcattctcctgggggatggcctactgccctcctttctgtacaatctgggcaaaccgactggtgatggcaagagtggtgtcaatgaagcggtctacacagctggagagacaattttcagtgcgagagtctaggcgattccctggcttctccacacatttatcccaacataactccatgaagtgatgcacctaaaaggaaagaaaaatagtaaccattggggtctgcagataggcctaactcttgtttattaacttctcactttttgacacctgacaaaaccattctttaaatcaaccacggagtcactttgggctcttctctttcttcatttcctaattagtcaccaatattgatccagatcctcgtccctacagattgtacattctcaggtaggactaataaccttttatattccccaaagtagctagcaccattgtgaaccaactagggaaccaattaattttcccaaactattgcactcattttattccaaacctatcccctagacaaggtaattcttccattaaccttttgggggttatggatccactccccagaaaaatgcacatacaggcacagaaattatgtgcactgtcattagaatgttcagggcccaaagatttctagccagggttcttgctggtcatccgagcaccctcttcctcccacccaaaaggaaaaaaccattttaccaagagcttactatttgtgaggctgggtactaagaaatcagttctctctaaggtcctcaaggatagctgtcatcacctcccatttaagaggcgtgattatgtagtccaaggtcatgtagccagcaagaagtcaggccgcgttagaaccatgtccgaagggctccaaacccttgttctacatccatagtctacagcgactacttcagagtccaccttcctccgataatgttctagtcgttttcaaatacattgtcgcatatgatcctcacaatccagtgaggcagtggggtgacggcgacaccaaaacccacagtggatgagtatcttttctacgggcacgtggcctgcaaggagcagagggaggatgagaacccagatctttcgaatgccagcccagtcatgtcgccggctaactagtctcccgtacccttgcgtcgcccaaatcttccctgttttacaccttttcttttctccacgctacgcttatatacctggcacctgagcactaccggtcaccagggacaggagagccataactttgtctttcgtgaggggaatgggatgcagccgggatcgagcaccagtgagccgccagtgtacagacctccgagcgtgcccaggaccaccaaggaaggtgaaacttcctttcccttcaccctccccgtccccgcacctgtgcagtaaactgcgccttctgctgctcggcggccaccaggcgctgcaactccgcttcatcggcttcgcccagctccgccattgttcgcctcaggctcgccaccttccgacagctgtgtttgcgcatgcgcgacgggtgtgcaccgcctctcgacttccggttcacccagcatttcctcttccctgttttctttcgtcgtcgtgggtgggaattgtcgcctaagtggttccgggttggtggatgaccttgagccctcaggaacgagatggcggttctctggaggctgagtgccgtttgcggtgccctaggaggccgaggtgaggggtcttcccaccctgaggtgcttagcgtagcctccagccagggaaggggatggaagtgaggactcatctgccgggtgggagatctcttgaggagaagaaaataccgaaatcacagcaatgaccactgtagtctaggggtccagatgtttacccgaaggtatatttcacttgctgtgagctgacgagttgagggaataatcagaaagagagctccctctggaagtcgcagtcctgatgaggctaatccacatagcagttctgttttctccccgttcactgtccctagaatgctccccactcgctcccaccctgagtcgggaaagagggttaggagcttgcccatttcttctggagttggtgtgtttggatgtgggagtggaggggggatcagttcgaaaatcatttaacctgggcatttgtgttacctcaggtactgtagtaatgctaggatacaaatgtgaagaaaacgtagttcccgccctcaacgagctttcattctgatgaggaaaacactgtcatagtagtccgggcaagatgaggtcctgaactaggaaagtagcacaaagaaaagaagattgtctcaagaactgttaaagagatacgccaataggatttggcgattgaatttaggggaaaagtctctcatgatttccagattactgagttaggttaaagaatgcctgaggtgtcattaaataaagtagggaacatgcagatgttccctggtcttaacttcacagtaaccccagtgaaatagatgctatcttcattttacaaataagatgttatcccctatttattgttaagtagcttacctatggtcatttagaaagtttgtcagtcctgttaaaggagaggttcttatgatcatcctaatgactctttcctcagctctgttgcttcgaactccagtggtcagacctgctcatatctcagcatttcttcaggaccgacctatcccagaatggtgtggagtgcagcacatacacttgtcaccgagccaccattgtatgttctctccatcgctgctgctttctgggctctagccatctttaccttcactaatggtcatgcctttagcaggacttcctacctgtaggggggactcttgtgtccaactttgtcaaatgaagacctagtttacacctttgggcagacagtgccattatggttgaatgatgccatttataatcatagaagaccttctagcctaagtctttacaaatttttttcttttgttttctttttttttgagacagagtctcgctctgttatgcaggctggagtgcagtggtgcgatctcggctcactgcaacctccaccttctgagttcaagcaattctcctgcccctgcctcccgactagctgggattacaggcgcccaccaccatgcccagctaagttttgtacttttagtagagacgggtttcaccgtgttggccgggctggtctcaaactcctgacctcctcaaactcctgacctcaggtgatctgcccacctcagcctcccaaagtgctgggattgcaggcgtgagccaccacgcctggaccactaacttacattcataaggtgtctgttcacttcactgaaccaagactggcttaattctgtagcaatacagcaattctgttttttatccatcttcttggatctgtcttctaatcaatatgtaggcattgagatacccttgtgctaaaagacttcaaaaaacagagataaagccttcaaaaaacagagatagcttctctcaactactattttgatattttacttcctttgtactcagagttatatcctatatgtacactgcctgtcagtttgggttactgtgtg

SEQ ID NO: 915652 - DNA, 4001 bp, Homo sapiens
gtcatcagagaaatgcaaactaaaacctcaatgcatcactgctgggcactcagccaaatggctacagagaaaaagactatcaagtagtggtaagagtgtgcagggatgggaactcgaacactgccggtggagaagtgtttggccatagactaagatgagcatacacacatcagcaatttcagtcctacgaatatactcaaacagcagtgcttacatatttttttttttttttttgagacggagtctccctctgtcgcccgggctggagtgcagtggcataatctcggctccctgcaacctctgcctcccacgttcaagcgattctcctgcctcaacctcccaaatagctgggactaccgacacccgccatcacgcctggctgatttttgtatttttagtagagacggggtttcaccatattgactaggctggtctcgaactcctgacctcgtaatctgcctgcctcagcctcccaaagtgctgggattacaggtgtgagccactgttccccgcctgcttacagatgtttaccaaaagacattcacaagaatgtctgtagcagcaagatacaaaataaccccacagtggaaacgactgtccatcaacccgtgtccagtagaatggataaataaattgtggtctagccatacaatggaatattatataccaacaagaataaactgctaactaaacatgggtgaatatcacaaaacatactgaatgtcagacgtcacacacgtaagagtacatgaagggctgggcgcagtggttcacgcctgtaatcccagcactctggaaggctgaggcaggcggatcacctgagttcaggagttcgagaccaccctggccaatatggcgaaaccccgtcgctactgaaaatgcaacaattagccgggcgtggtggcaggcgcctgtaatcccagctactcgggaggaggcaggagaatcgcttgaacccacaaggcggaggctgcagtgaaccgagattgcgccactgcactccagcccagaggacaaaggcgaaactccatctcaaaaaaaaaaaaaaaaaaaagaagtacatgatatatgattccatggatggaaaatccaaaacaggcaaacctattttatggcgttagaagccagggatgtagtcatgttttattgattgctctgaatcaggaaatgtgcgtgttgtggaaaatggttgagctgtacacttaggatttgtgtgcctacgtatcaactcttttaaatctaaaaactaactagatgtggttccctctgagtcattcctgatcctggtgtcccctaggtttggtgtttcaacgggagttctccacacttccccctctctgttgcacttctagggtatgctgtgattctagcgtacctgtctgtcccctggggaccagaagactggatctgtctggtccaccgcggtcaccctagtcgttggcacagtggctgcccagcccgtgtgtagctgcccatgactgtggtgtaatgcctcgataggtccctgaccctaactaatgttatgcacttgctgaatcactgccacaatgacaacccgaagagcagaggaagaggctgtgaccggagcagagaagaacgtgaggagaaacgatatccacaacgcactgagcgccaggctcttccagcgaggcaagcgaaaggggagccgccccgcgcgagcttctttgcgacagaaaaggtgacattctcctcggagggccctttcatgccgcttgcgtgttgcgggtgccagaaaggtgaagaagggaagcggatgtgccgccagcagggcaaggccggaccagaggcggcgcgcacccctgcggctctcggtggggccgggactctggggcccaggccggccgcgctccgtcgcccaccccacggagccccgccgcgcctcccggtcccccgcgaccccgccccgggctcacctgcgcgcgggcccagttgcgatgagggctgcgcggactgcgcgggctccgcggggaagagcagcgcgcaggccccgctctccggaagcgccgcccgccgcactgcccctcccacgccgccaggcccagtccagacccgggagactctcgggcacaatccggctgcgggagacgcgggacggggcagcccctgtgtccactgcggcccgagcccctgccagcctggcttctgcatgactccgggctcccgtcctctccgcttgcgttggggcggtccgcagcaactcggagaggagcccgtggccagggtcccccggcgcccaccgtgacaacctgaaacctgggttttgttctaggcgggggagaaggaaaaaaaaacaccctattccgcccatttaatcttcctaacaccctgcaaggggggtgttcatacctttttccttttatacaaatgagaaacatgaagcttggagagatggaacttttccaaaggtcacacacagcgaggggtgtacggggctgcagtgtgggaggggcagacccgggcggcagctgggaagccaggccgcagcggccgccagttcccgtcccagacactggttgatgccgaggagggtggaaaccccgtcttctgccaaagtgctttctttgcttctctaagcggtgatcccacatgggcgttatgaacagcgctgcagtatgctgcagagccgctgcaaacagcgtggtgtaggcaagatgctggaagtcctgggtgaaagagatgcctttgcctcccacttctgagagctcttcagatgttcgtgagcgctgtgaagcaccttggggagaagggaacggagcattccccacacttgtttcactctacaagaaatgtgaatgtcttcctgagcgtcttgctccaggccatgccagtttgggaaaccctatcctaaaactatgtgcacgaaatgctggagagtggaggtagtttaattaggccatgtaagattcatgatctccccctccaatttgatttcctccttttctcaccagcccgccaaagcggatgagctgcccatcctgggagggctctggagtcaactgcctgggttcacaaccagcgctcatcgcttactagttgtgtggccttggtgaagtcacgcaacttttctaggcttgcttccttcatcacattatggtatctggttgctggtgttcttgcaaggattagtctacataaagtagatcaggcacttggcactgcacccaaatgcccagtttgctttgactctacctgactctaccaagtacacctccgcccagggccctccttttccccagctccgctctgcaaaacgcccttcttctagcaaggcctatttttggggtttttttgtttcctttttcttttttttcccatcacacgggtaacaacccttaacaaggtttaagggaggcacacctcacacatgtgcgtgaacacccagtcatcttgcttatgagctacaaagggatcaaggcccatttttgcagcttattcaggaaagctttgcttaacccagcccttcccacctccatccctcaaaggccatagtgcttttcattgtaaagagcctgtgctctgctgcttatctcccactttagagtaaaaattccccgaggccagggatggttcttcaggctccagccagagcagaaggacactcgaggaacactcagataaacaggccttgacggcgccaagtatgggccaagtgttggggcagctgagtgtcaggcaaggatgaagaaggcttggtcccagctctgcacagctcaggggggaagacagatgcacggaggcgatggtaagggcttgcccacagcttgaagtacagccctgtgggaggacaggagagttgctcagtgctttttttttttttttgagatggagtttcactcttgttgcccaggctggagtgcaatggcgcaatctcagctcactgcaacctccgcctccagggttcaagcaattctcctgcctctgcctcctgagtagctggaattacaggcacacgccaccatgcccggctaattttgtatttt

SEQ ID NO: 915653 - DNA, 4001 bp, Homo sapiens
gacatgctgtatatattttacttatttttttctgtctttcccaccagaatgtaggctctctgcagcaaagatgcttttttgcctctaactttatttttgtctcccagtacctaggcacaggtggattgaacaaatgtttgtggaatatgaatggttaatgactcgcatctgcacagttttggccctgccctgcccaagcgctgctcacccaccctaaccctccccctggcctgaggccagctcagtcaagcccaacatacccagccgatgaggccgggtcgcagttcacagaaatatttgaagtcgaagaaacagatacgagggttgagctctcgtcccagaaaaaagtcgtaaatcggattgcctggagaatattggagagtgaatgtacaggcagacgccccaatctgcctccgtctccaccccaggacccctctcacctgagttccccccaggtgccagggccgaaactggggctacctgcgccttcatgtagagaaagaggctgaagatgaaagcggtgagggtggcgacaaacgccaagggcaggagcatttccgggagcgcccccagaggcagccccgctgacatccccagccccaccaacagggctgtcagcaccagggcctggaagcctgaaccacagcgcacagtgagccctggggctgcgcgcctccacatccccaccccgcaaacacacgcagagcccaaaactcaggggggccacagaccctgccccaagcattaggctgccaccctggccttcagaggatcaccccagccactgctgtggtgcacggagtagcagtaaatggggtaaggctgtggggacgaggggcatagggagagcccccggcgtctgtcctgggcgtaacagaggcacacaaaggagcctggggtgggggccaatctccgtggacctccccgctaggcctggagctccacccccggccgcttaactccagcgcgagggcccgtcccctaggcaccgttaataggatagcgcaggcgactcttgtccttcaattcctgcccctcggccacctgcgggtccaagggggctctgataaggcccggggcgtcctttccctcgccgagcccattcgcttccctcccccgagcgtccgcgagcggggcccgcaccttgcgcgccggcagtaggtagagcgccgcctgcaggccgagccaggcgagccacagcagcagcgcccgtgggctccacagcacctccagccccggcagggacgcgggtggacccagcaggcgcgcggggcccgaacgggccgccaggagcaggtggaacatggtggcgggcagcagcagtagcagagccgcggcgcctgcgggaagggccatcacgtcgggcgtccgcccctagccccccagctccccgccggcccgcacgggcgccctgacgtctctgcgggaccctctcggcattcccagagtgcgcctccgcaccccgtcctcagccctcggcccccaggcaccccgctgcctcccagttcccttcccaggcgtccatcttagtcccccgcccccaggcccctcgaagaccctcctcctgctcccagtcgacaccataaatccccgttctgcagcccccagaaccggcccctcctcagctctccctctccagacacccttcgctgcaaacccccgggtccctctgcctccgacacccccaaagccttccatcctcagatctcgcccccgctcttagttcacccgctccagctctccttcgcttagcctttgccccaggtcccatctctctgccccattacccaggggccctccgaattccagcggggcccgggggccctgagtgggggccatggtctccgctccgccggagagagagggcgctcacaatagtcagtcaaggaaacactgtccgccccatttcccaggagatggactcggccgcgcggaggatccggccccgcggcgcctgcacctgcctggacacggaacgcagacaaggaccgctctcgtcccagggtttttaagtggaaccgccccctgcccatgctgggcccagcacaccagccaatcggcgctcgggggcggacccgacgcgggcgcctcagaagcctcagcttcaaaaccccgcccccggaaaggcccgcccagcaagcgagaggaggaggccacacatgtttattaggccggtcctgacacctgcctgcggggaaggaccaccgagaccagatcctgggtgccatggggtgcagggacagaccggtgcatggcagcggctgcgcctagccgcgctcgcagatgacctcaaccacactgggctccatgggcacagggtctgggcagcgcagggcagcagaggccaccacttcgtccagcagcaagtgcacgagttcttcgtcggccacaaaacgccacaggtagagctgcagaaagtggcagtccacttgcacctgctgcagcccgaagcgcccaaaggtgcgcagccgcacacactccagcagcgtcttcaggctgatcttgatgatgccggtcagcaccgacacctgcaggcagggacacagggatgcagcttggggactgcaggtgtgtgtgggggacacccaagttccaagcaggggcccgggagacatacgatggaagtagctgggatgaggcagaaagtctccggggccagataagaagggagggatacaatattagcgccgtcatctggagggcaggggacaggtagggcccagcaatcagaggcatccctgagcttggagtgaggcggggcagggaccatgggtgaacagaaaaccctggggaggacccaagactactgtggggataaggacaagggcaaacagtaatcccaggtcagcacccagactcaggctgggcatacaccaagactgggacaagggctgtgggatttggaggcagggcactctgtactacctaaaaacagccctagagacagagactggagggtcagggtcacccccagttggtcacagagtcctggggctccttgggcaggtgtggggctgctccagccaaccctccccgggatccctggaagtctgagtcacgttggaagtcggaccttgttgaactccacagggctgaacacatcaatacgttcagagaatagcttctggatattgctcaagaggttggtgtccatcggggcactggattggggaagacaaggaatcagagcccgccctgcaccctcgccctcttttgtcccttccccctggggctcccctgaccagccagacctgggggtatagctgggggcgtagcggccctgctgccgagagctgctgtacacggagaaagtcctcttgctggagtcgctgctctgggccttgcgaacaccctcttcgtacaggagccccacctggtggtaaaaagaggtactgcaaggaggcccgagtcaggggaaaccaccagcccatcggtgctgaggatgccctaagtcagctactcaagcatcacaaggatcacagggtaatcaccgcggggcccgctatttagtaggtacatggtcgctatttatagaaccagtggagtggggcaaaggcaggatacaagagttggtctgaggtctaatcttcagcaccagcaccaaccctgccctgacttcctgggtaaccctgagcctctgcttctccacaggtaaaataggggcgaagatgtcataatcctgggctgagaaggaacaagaccgtggacataggcactccccagcccgtttggtcttcatccttggagacttgttcccctggggttccctcacggacgccctggctacagaactggccccgtgagaagcccagatacacatgtcccctcctccaggcagggactgccagtgatcctctgctgccccagcccctcttgaagggacagtacccccagcctgcgtcagggctaccccggccagcctgggcagcacctgcacgtcgatggcggtggtatcctccaccacccgcttcatgacggcccgcacattccggggctccaga

SEQ ID NO: 915654 - DNA, 4001 bp, Homo sapiens
tcggcagctgcaatatggctcaggtgggtctggagagcccagcctggctggggaaacagctttacttattgtgttagtgagaaggcgccactgcttatgtttagctgtggtttgctacaagggtaggatggggcatttcgcgcccccccctcccaatcaaggctccttcctcctcttctctttccttttgttagtttcatttcatgctatgaatcaccaggtggcaggaggggcggcaaaaagtgccctctaccggctctgactgtcccgccgctgctcatagctgcccctaaggagcggcggttctcaactttggctgcccatcggaactgcctgtgcagcctgttaaacaaggacgtctgccccacccagggctactcactcagactcttccagagagggactcagccctttgttttgcaaagctcctcaggaatttcggatgcatagccagcagctcagggaaaagtctaagcaaagcttcaaaagtgcagcagtgtacaaaggacccctgacttccgtcccaggctcaagtgtgccacggactagaagctactaccttacgcctgttacttaacctgcctgagttgcagtctcctcaaacgtaaaagggagtgaacccaggtgaagagttgctgtaaggagttaagatatttctgcagcaagcgctttgtaaactaaacatctatagaaatgttgcagcacacacattaccactgactatatatcgtagcataatttagcagtttatcaacctgccttccccagtagaccgagcgactcccggttagacttgacatgttggaatccccagcgcctagtaggaaagatgactaataaatgtttattaaatgaatattagcaacctgccaagaaaccgtgagggtcgaacgagaaagccatggagaggtgaggagggaggttattttaatagtagatccaaatatacagcagccacacgagaagcacagctgagtctaaaggaaggtcctaaacaaggcgaagccgccactgcagagaatgaagtcagcgccctggcaggttgggggcagctcccactaaacccctgacagctgctgcccagcaactgtttgggggcagggcgacggcaaaggggcagcttccctgccgctccgcgccctaaccggggcgcagcctcccggagacagggtgtcagtggcatgtgctatttcgaacggcgcgtcccctgccaagcgctgaggggtagcgtcgctggcaaggaacgtggcgcgacccatgagtttggggccccccgaagggctcgagccgaggctgcaggaggctgggccgtgggtcggggttcgggggctcgggcttggcgctggcctggtccccacgcccgggagccgctccacctctgccggacctcggaacctcgccgcaaccctcttctccccggaaacgtgcgcctcccgggttgcctggaaacgacgcccccggttgcatagcaacggggatccgggtccccggtttgtttcgcacgctgggcgcgcggacccctccccactcggactctccaggcctcgcggctccgcctggtgccgcctgcagcggctgctgtctccccttcccgtgcgctgccccacattccgacctcggcccgctctcacctttctcaggccactgctatccttcacgtgcgacttcgctgaaacgcgccaccaaacccgcgcctcaactcggggcgctggtttaccttctccgcatgcgcaaggcgggatgagctcggagactagccggccttcctcacaatcgaagcctgtgccgggagcgcatgcgccccgctttatctattgcgtttctttttccccccacaagcattcccaccgagagaagaatgggatcggaagttccagcagggaacggaagtctctggctggaaaggggaaataagtgactatatctgggctgtagagtgggtaaactggatctttgaaatcggagtggaagctaatcctcctcttgccaccactcggcattttgggtcatgtagttctagagctacaaatgttccctggggcattgtgggcaatgtagttctaaccgagccgctaacgagcacctagtcttcccatacacttttcgcgctaaaaaggcacaaaagagaaagatattaaaggagcaattaaaagcacactgctctaggaaaacgaatgcgctcccccagagagaaaattcatacctgaatactgtagacggctcccaaatgttagctcagaatttcagagaaagagaggaaccaactctcactctcctttttctgccacaaaggcagtgcatagggacaggaggcagataaatgctaggtagaaaagagcgggtccctggtgaaaccccaccctcaagccaaaaagcctgaaaccatggcccaaagtgagaacttctatccatgtttttccagttgaatgttgccttttcctaagccacccatggctctgccctgcctcatcctgtgcctagaaagaccccagactcatctggcagagaggagaagcagctggatgaggggacgaccatggctggatgtcagagagaagcagcttgtcttcagagggacagcttaaggcgtaacttctgagacgaatctggctggagatagctggacttcaagggaagactacataccggcctgtcccacccccctcttttcagctcaccttccctctgaaatccactttgatcagcaataaaatcccaggcatttgtcctttaatttgttcgtgcagctttatttttcttggacgctggacaagagctcgggagccacgagtgcggatacaaaagctgtcacgctggccctctgcccttgctggtggagggcaaccgcgggcccacggagctgttaacacttaagctgtccacggacgacagagccaaaagaacactgtaacatgccctctggggcttcaggagcctcaggcactctgcctggacactgccccggggcctgcacggagttcgctcctgccggtgtccaaaagcgcacgctctggctcctgcacccactcacctgcacgctccctcctatgaggggtggaacgcggtgaatcttgagtgagtggagtgtgatcccactggtgctgaaaaacggctggcttgttccagcgcttgtgcactccagttcccgccttgttcacttgcgtactccctcccatgaggagttgagagcagcgggctgagtaaacggggcacccctgttgtgagtcctgtgaaaggtcagggcaatatcctgcttcagcagcaccgtgaaggagaatgaacagggcttcagaatgaggtgatctcttgcctgtcgtgtgatcctgagcacacagcttcatttctctgagccttcattgcttgacgttcaagaactataaaggacctaaaaataccacttcacagtaggtgtgaagtttcaaggaagcaacaagcatgaacattaaaaaaaaaaaaaaaaatccaggttgctgactgaatgtttttatcaccatcaagagctgtcataggagagcttccttttgatgttaaaacttgtttctcaaactcaaccctctaaaacgtaactcttccctcccacccccaaccattcagccttccagttctgccttcctcctagagtacacactctgtaggctcccaatctgtcacctcacccagttgtttctttccatcagatgttcctcagacacatccatcttcatctgagctcttgtcacttcctgcccctcagctaagagtccttcttccaggacaggctctggtagcatcctaaacctcaccttccagcttttctaacagtttcaattttacatttgcttgtgcgatcctttctgatgtctaagattaacaatctcaggtcacagactttcctgggaaagaaatttaacctttttttttttctatgacaaattaatttcttttcaactctcttttccatgtgggtagtagaaacagtctcagacagttcagggttcttcccatccttgattttcaggtcg

SEQ ID NO: 915655 - DNA, 4001 bp, Homo sapiens
tgaattcagggctcgcctactgtagagcatttcaagttttgcaaatgggactaacctctagtaagacattaagtaataaacagaacaaacagtgctaaaatagggcaaaaaaaatctgtgttatcagggcaaaagaaagaaaagcatggtcactcacagtttctctaatcggtaattcattgaaacagtaaggcttatcttcacaaacacagcaacaaatttttaaaaatggagacctcacctcatgagataattggtataaaattaggaccaagatacacgatggacatgattttaccactttttttcttaaatgatctcaaaattaggtctgcgaagccagtttgtcacacgcacaattaagcaaacaaaaaaacttcagcaaaacaaagaaaaattgttaattcacccaggttattccagaaaaagcaagtgttgtgcctgaaccttccagatttacaaactgcctttttcttttgctggataaaacgaacctaaggctaacatatacagtggatggatagaacttaaaaccatgaaaaccttgggttacttaacttatcctagtttactgaccattacctagggacctgacttctctaacagttgacaaaggaaaacagtatttacacaacaaatcccaacttcctggtttcatccaaaaagggctgtttgaagtctccaaagggccaagggcctaaaacgaaacaaattccgccctacacagaaaagcaaagtcaacatcatcctgttacgaccttactagcgacgacaagggccaccggcgaccgtgcagctgtgcccttaacgctgcgcagctgccgcgcgcctcggccgggtgtttatggcacacgaggggtggagagcgccccgccatgggggcggccgcctcaactaccgcgagggcggggcgcgctccccaaaagctcccaactagctccaagagccccgaagtctaacttcgagcgtcagggggacctaaagattgtaattcatctggataatactgcataatattagacgctgaaatgcctgggggacgcttgaaaagctccccgactaactgggagacgtttccgcgggcctaggtagacatatttttcaactcagctaatcttgtttacaaacggaagccttagaaactctaacctcggcaaacattaacttcagggaaaggctgtaaaaaccaacttgcggtaactcaacaggttatgcgcacccgtcccggcctgcgaccgccgcatccaaaaagcgagaggggaagcaccaggcaatttcctcagcaggcggccccggggccagcgggtgactggtccaaacctcagtttcccccaccccgcccggtcacctctgggtccgccccgagcgttcggccagacacacgcggaactttctgtaccagagcccaacttgggaacccaagcctcggcagcgcgctgcctcccacgaacggggctgacgacccccgcagccacttacccgccatggctgcgctttcatgggcggcccccagcagcgctagcacctgcagcgtccccaggagcagcgcggcccaagcacctcgcgcgccgagtcccattgttccgagggcaggatgcggcagcctcgtgggctcccagccgaggtggcggcggcgagagcggctcctctgcgcagccggcgccggctccgcttccccttcggccgcgcacgtttcccctcccgccgcttgccccccgaatgaccaaatagggcgcaggagcggggcctggagggggcgtcgcgtgcgcagccggggcggcggggccgggctgggtggcgcgggggcgggctcggggttctgggcgtggcgactcggctcgcggcctccctcgcaggcgcgcgcttgggaaccccagaaaccgcgagccgtttcctttctcttcggaaatggcagttttgttgtcctggatgaaggcgagcgccgctgcctccctgaatgctgagcacgctggcttcgcggtgcccggaaggaagcctttgaagagtagttttgcgggcagggaggggacaggggtgcgtgcgactcagagtgagagggaggagttgcagggcaaaggcgggaggagggggagattctggagaggaacttgaggggatgggattcactctaaggagtcctgggcggtcggagctttcccctcgcgtgacccagcctaagggggaagtggagaaaaacagctcgacagatttgttgcttaaattcaaacgtaaaacacctacgatcttcttatcccagttgtacttcatcttctccacgggttccctgtatctctgattaagacacgagattagtggagtgggcgggtgggggcgcgcgcaggagttggtagcaactctcagtgaaatacagtagagccatggaaagcgggggctgcattaatccaaccagccttttctctccttgtgccctgctgtcccagttcagatgaaatggccagttttgaacagtttttggctgagttccttttaaacccttggagccaatgctaatcacttgtcttgacttgaagtgcttgtaaagtctgcattttcatcgtgctcagaactctgaagtgacatagctacctgtggctaatgcatgagaataacaaaggctgagtcctggcttgggtgggaaccctcagctgaagtagaagactgaaggatccaaggaacctaaaatcacagtgaatccccacctgcaaaggtcttaatgttgcagatctttggcacctgagccagatttcatcacataaaggccacattgcagttaacttttgaaaactgtgttatgagaggtagaactttctcatgtcaggcaaatccatcattacagaggtctgactggtcctagagattaactgagacaatctgtcctaaatttacagagacttccatctgtggattcagtcagccaacctgcaaatgtttcccctgcagcttatcatggacaaaaagcaagcattgcacatttcgattttggttattctatttaactggggaatctggtttaggaataaaccgttctggtgactaccccattatccaagcatttcccaatctaggcccaacctgtctttccagccttggttctgttgcccatggagaagggtgctttctggttcctggcatttgcatacgttgttctttccttctggaattctcttcaccaacccacagctaatacttcctttaaggctcagtgtacttatagcctgggaatctggggtggaataagaggtctggatgtttatatccccaccacattcatgtgttgaaacctaatcctcaaggtgatgataataagatgtgggacttgggtgggcatagtggctcatgcctgtaatcccagcactttgggaggctgagaagggtagatcgtttgaggtcaggagttgaagaccagcctgaccaacatggtgaaaccccgcctctactaaaaatacaattatctgggcgtggtgggacgtgcctataatcccagctactcgggaggctcccgagtagctgggaggctgaggcacaggaatcgcttgaacctgggaggtggaggttacagtgagccgagatcacgccactgcactccagcctgggagacagagtgagacttgtctcaagagaaaaaaaaaaagatgtgaggctttccggaggtgatttggttgctaatgaatgggattagtgcccttgtaaaggaggcctgagggaacttgtttcacccttctgtactgtgagggcacagcaggaagacgccatctgtgaggcagagggccctcaccagacaccaaatctgttgaggccttgctctgtcaacttcccagcctccagaactgggacaaatagatttctattgtttataaatttgttgataaagtatcccatttaaggtatttgtgttatagcagcagaaacggactaagacagtgtggagaacaagatatttatttacttggacagtttttcccgggtactgacctgttggagacaccttcagatctctgcta

SEQ ID NO: 915656 - DNA, 4001 bp, Homo sapiens
aaaatgcaatagaactgacaaaagagtagttagtacccagaacatacatggaactacatatcaacatgaaaaaggtaagcagccctacggaaaaactgacaaaatatttgaacaggcacttcacaaaaaggaaagttaaatggccaataaacatgaaaatatgctcaccttcattataactgggggaacaacccacagtgagataccaataggtacccataggttagctaaaatcaaaatctgacaattccaattattggcaagaatgcggggtagctaaaactacattctgtgtacattctgtggggtagctttacccaaactgtacagtcactttgggaaagaatttggtattatttagcagatagaagacacacatagctagcaatttcatttctaggtatacctgagatcagggctcagcaaactttaaagggccagatgtaaatgtggtaggctttgcaggtaacatacagcctttgttgaatatttgtttttaaaaaaactataaaaacataaaaatcattcttagctgggtggctgtaccaaggcaagctataggctgcatatggcctacatgccagtagtttgttgatgtctgcactagttagggtgaaaatgtgaagggaatggtgaatgatgaagatttggctcaggtttcagggtaacagttaagaaaaacaaaggctggatgcagtggctcacgcctgtaatcccagcaccttgggaggccaaggcagacggatcacctgaggtcaggagttcgagaccagcctggccaacatggtgaaactccctgtcttttaaaaatacaaaaattagccaggcacggcggcagctgcctgtaatcccagctactcgggaggctgaggcaggagaatcgcttgaacctgggaggtggaggttgcagtgtgccgagatctcgccactgcactccagcctgggtgagagcgagactcggtctacaaaaaaaaaaaaaaaaacagttcagggataacaacaaaggaaaacatgcttttatgaaaccagattttctcatttcctacaacattacaggcactcgtttaaatatttattgctacctgttttatatcgataagaggtcatttggaaatgttgattaccttgacattccatatctctagacttaaagctaacctaataagtacaaagcagccttagaaatttatgtctaggtttctggtagtcaaatttttgagggccttggctacgataagatgataagacacaatctctgctgtacaggagctctgaatgattttgtgtatggggtggtgaaatatataatcaaatttagtatgtatatattgtactgagggcaattaagtcactcaattcagtataagtgctgactgggcagcccctgtgggcattttgtctccgatattaataacaaatatctatcaaagacaacgccgcctgtaaaaactacaaatatttcgaaagatttttgtgttacctatctcatgtcattcttggaagagctctgagagataggcagtgtggggcctatctgaaagagaagtaaagtgggacctctgaaaatcaaatttggccgtggtcaccttgtaaattgacagtaaacctgggattaaattcaatctcaggcatttctcctttctactgagttaatttaaatataaggtctttccttctagagtgcaaagtgaaaagacagcaggaagagctaactacacttctacttgctctcatttacgcgcagcgctgctggtagctagcgtgtcaccgcgtcgtgcttctcctgacaccgggacatttacttcaccccctcccccggaataccagtaccttatgctctcctcccagcagcctgtgggtgcctcctccttcctcagccacgccggagttcactgtggcctttgctcaaattacctgggcgcagccatctttggctgactcgtgacgcggcgtgggcgggcgccgggtcgcggctgctaattggactgcgggacggaggttgcagccagcagcggctttgggctgagaagcttccggccctaggaggtgccgggaggctaagcgttgaggtttgtttgcctggcgtagagtgtgctcgtttcacctactcttgcctcccaggacagaacttgtagaaattgtgaaatttcgagatataagttgggtgaccctcagtcagcctcttccattgaaaacgtacctcgggcatattacttaacttcctggtcagtagagcctacttacgttcttggcatggggtaaatgaaaactgcacagctcttggcatatgatagctactcaggttaaaaataagtcaaaggtgagctatttcttggctctatcgattttctactctccctaggaacttaagctccctgtgccatgttttgatctgtattgattgccctaccataatcagcacctcagagctgcagcttatttttctgaggatttctcgtgttctccagagtactgcttatttggaagcagtgttgggtgaaagtcatcttatttcttcttgctttttaagtataaatactagaaaatttagaattatatatgtggcttgcattatatttctattggacagtgctgttcagaaggtacctctaatgctctcctcccagcagccagtggatgcctcaccaggtcttcctcagccatgctggggctccctgcaacctttgctcagttcgcttggactaattaacccaatagaagggaaaaatgcctacaattgaattttatcttaactccattaagattagcaggtaaacattgtgccaaaaaatatataactaactgtagcaataaatacatgatcataacacattatcagaaatcttaattattctcatcctctcaaatttctgaacaagtgataaagtgttgcattgtccagataatttttatactgtctctccattgcagggttgcttgaccattaggctccatagtgccaagaagtctgtaattgcagtttctaaacttgcacaaatagaaagacttattttcacgaaggtgtacaagaaggaaaattcctagtcttttttttatttttattttttattttttagacagagttttgctctcgtcggccaggctggagtgcaatggcctgatctcagctcattgcaacttctgccttccaggttcaagcgattctcctgcttcagcctccagagtagctgggattacaggcgtgtgccaccacgcccagctgatcagctgatttttttttttgtttttgagactgagtctcgttctgtcacccaggctggagtgtagtggtgtgatttcggctcactgcaagccccgcctcctgggttcacagcattctcctgcctcagcctcccaagtagctgggactacaggctcctgccaccacgcctggctaatttttttgtatttctagtagagacggggtttcactgtgttagccgggatggtctctatctcctgacctcgtgatccacccgcctcggcctcccaaagtgctgggataacaggcgtgagccaccgtgcccagcctcggcttattttttagtaaagacaggatttcaccacgttagccaggctggtctcgaactcctgacctcaggtgatccacccgcctcggtctcccaaagtgcagggattacaggcgtgaaccagcgtgcctggtcatctagtcttttactcactttgcttttcatctcaaggttttaagcaaacaaatcacaatattctgcttactacctttgccttaatggaatttcactaggccttctctgtaactgtctgtgtttcctaattatgtagaaactataaaccaccatcttgtagagaataatggccaataaggttgaaaagttaaaaaaaaaaaaaaaaaagagccagagtgtggaatacttcaaatgccagactaagaatttgctcccttttgtttgctttattttctgggaaacgttagttattaaaaatgggagttaaaaaattcatagttacactatgataagatg

SEQ ID NO: 915657 - DNA, 4001 bp, Homo sapiens
ctgggcaagactctagagtctctgtgaaaagtcttaataacatttgttaaatccaaacacgtggttgcaaatgtttacctactacagcagccaagtggaaggtctattgctgctaaattcagtgctttttactctttttcctccagattagctaaatagtctctttacaaatttacactaatctcaattttaatgtttatattaaagggaaatactaaatctcaaatttaaggagtcctagacaagaggattagaggggataaagcataatgaacacacaagatacttaataaatcagtggttctcaaccttcagcatgcacaagaatcacatggggtatttatttgaaatgcagtctcatgaattccctcctgagatacctggattcagcaggagtaggatgaggcctagaatctgcattttaatagcacttagtgcttctgatgctgtagtcaatggacacatgttgaatatcactgtaatactcatttgctgaatgagcggtatgtaccaatcctaactatagaaggccagttcattatacacagttcctggcatcaacatacagaaggtatgagctcctttgaaccttcttatggtgttacacaatgagtaataatggaccagtttctttctctgcatcatggcagaaatgtactcaatctttttctgtaacatttctggagagggcagggggaaaaaaaggtaaaatattttacaaattacaatttttcagtgactagacttacatcttttccctctccctgacacccaaatggaaagtataagggatagtaacatctaagggagattctatacctaacccatctattgtactaagacatctgctgtcttggcagacgtcaataacatgagtaaccataaaccatagataaatttttgttttgctctcatccaattcattgaaatcctccaccttccaccaaaaacaaaaaacaaaacaaacttccaggcaatatcttctactaatctcctacctagtctacaccctaaagtctctatagggaaaacagacacccaggattatgattacaggacagcaaatactgaaatactggaaagaacacaggaaatatttgagtgcttaagctttgcaaggcactgtcaaagactccagtgctttcattacaccccttcccccttaaggccactcaactagtcaccacgcttataccagtaagagtgcatttatgtaggtttatagtttgcaaatcatctaacggttttgtagtgctttcatgtgtattattttacctaataataaatttttcacctaataataaatttcacctttagaattttattcaacattcgctcataatttagggagcacgtggtatatgccagacctccgggtaatcaagatacagtcatcccatcctcaggaatccacaacgcagtgggagttcagaacaaaaaagctggcaatttaaacacagaatgagagagtgacataaacgaaaaacccaacaacctaagaaaaagcaaacaatctagccagaggaagcgtgggaaggcttcccggaagaagtgacatttaaatcaataaccgaaagagaacagtttggcaggggagttgggacggatagaagcagggaaatactccaagttgaagaaaaagcctgtgcaaaggcctggagacaagagaaaacaaactgcagataatgaggactagaatttaggtcatctacgttctctccgcctctttccacagcaactggagacttaatcgactgctccttgcatggacttgggagctgttttaacttttcaaatctcctttaaaggtatcatcttagaagagtctgccaacactttgaaggtgcagaaatcaccccccataccacttcggatttccgcctaccttgggcgcttcctcagttcccaccggcaccacacctgaatcccttggcttagtcccagcctcatacccgaacaccaccattttggtggctcatgtgacttgccggtgggcggggacccagaacgccctgggcgggaagtggtgctgatttacggctcaacgcctctcgattgcagcccgggcccgcccccactcagtcaaaagccgcgccctccatcctgactgtgattgggcgcggcgtctagaaattacggccacttattcgcttagaggaggtccaggcgcctgtgggcctgcccccctcgccagccgagtatttccttccctgactatttatcagcttagctccctgatctcttcgcgtcctgcgggaaagatggggcggcccgaatgttgtaatgttactgcgctcctgcctctcctcagggcagctgggaactagctgcctgcccctttcagtccttgagggaactcgcccctttgccctggcctgtgtggtgttaaagctctgtttctcgggcacctcctcctccaaaccccggaccagccgcccagcgccgtcagagcagccccgactagcctcctctcctctcagccgtctgactcctctccccagtctgtagtcccctcaatttgcatcctttagccccgcttggaaagagaccggagagaaatttgcccactacccccgcgagaagacccacttgtcagccgtgtctcggggtggggggcactgcaaggcctggcgctgttttgtgcacgttaaatgcccagcagtatctcccagaccggcaacccccgaccctccagtctccatgtcttacagaagccaaattcgagagttatataatttctagtgctgctgttgctcctgcctgaggaaacacttcatcgcgtggagggtgcaggacatttcagtgctcttccctaaaagaacggggcttgggcaggggtggccagcggtggcaaagaaatgtcttgtcttttctgcaaaaggaaggtgggtagtttgaagagagattgagagaaaaggtggatgtgaaagccaagcagctgcactttctcatttaggaaatcgcggaccgtttacatagcttatgcttacatgtctaatactactacggcgtctctgaaaacacctttgggggaaggtttggcttctctcgaagtctcagtgtttttcctcgccggatagggagctgcttgaatgcgaagagatggcatgatgtgaatgactccagtgtgaagaaatctgcttcgccaactcatcctgcatcaagtgcccattgagtagcactgtcactttaatgtctccatgccaagggattgctttccttttttttcaatcctctcggttaatacatgggaggatcagaatcagaggggcattaaggatcaagcctgggggcttggagagcacagaagaaaaaaatgaaagggacagcaagctggattctgagttactgagggggtgagatccggaacttctgatcagtaaatataagggggcctttcaatgtgtgttctgccacagaaaactgttcaaactcacctatctttttagagactggagtcaaagagatttttaaaagtatttttggggaggtggggttacatttttctctacagatttgagtatctttatcatcatctttgaatttgaccatgtataaagtaatgagacctgtctaaatttggtttgtgccttaattgagttagtcattgaacttccaaaaatgttgctgcctgaagaggaatttcagtaacgttcttcatgtttacaataattttcccagtttgtaaaaacagtctaaatattttctgaaaattgaaaaacttgaaaaactaaaaaattacgttgctgtaaactctgtgggcggtgtaaaaagtttagttgtggaaaaaatacatcattattttctttgtctgacatagaagactcagcctggatttcaaaactgaacactgaagtggtttgcaacagttacctggctcttggcctcaatccagctggatcaaactgagacctgaaaagagatattgactcctgtggcagtggaaagacccaagaatgccagtcaagaagacaggtgggccataaggttgctatataata

SEQ ID NO: 915658 - DNA, 4001 bp, Homo sapiens
tgtatgtatatgaactctttgagtctttgtaataattctgtgaaccaggttctattatgatgaatcccattttgtggatgtagaaaatgaggccgagaggttaaggtatttgcctgtggttccacagctggagagtgaaggagctgggggttgatcccaggtattagccactagaccatccggcgtctccacctgccacttctctctccactctccactgccacggtgcaccctgcaggcttcatgccctggagcgcacctcctctcctctgctctgcccggtggcacctccctcctcattcagggccatgagtgaatactgcctccttctgaaggaagccctccttggttactcaccttcccaccagtctcctgtcttttgcaaccctgggtgcctcctctgaattagtaatcttcctataaacaagggaccctgtcttgctcatcctggaattcccccaaactaggaagcgctccctagagaggatttcctgggagcctggagacctgaatttaaattgatgaaacttgggtcaggcattaacattttgaagcctgtttcctcacttgtaaaaggggcaggagcattaggtggcactgtggacaggacagggctgtgtaaactgtggagtgctgtctggagggagcaggcattattgctgctgcataatggatttgacaaggttttcctcctctctctattaggactcccatggcgtccctcgggatggggagcaggtggctgaaagcaaccccacagctagctccctctcagccccacagctggactgtgggtgggggtgggggaattggtttcaacctccttcctggccctccccaccaaggagcatatgactgacaggctctccctgccccctgccccaagcgtaacaagtgaccactgctctctgggggcagccactggcttcaggttcgcctcctactccattgcctccataattacaagatgctcttagcctgactcccacggactcccatcacccagcgctcggctctctcggtggggagggcagagaatgtttcactgtccctctgtcttctgtggcatcctttgccttgcagccacagcccagctagcccaggccaagggagtccgacccccaccccgaagcacagggaagttgctgccctttcccgcagtgacaggaatcctctcaaaggttctggaaggcaaggatgcggccatccctggagacgccaaggtcagggagccctgggggaagggggagggagggcttgcgtctgttgcaggtcccaggcaaaggggctgctttccactcccgaggggggtgggttggtggcggcggaaggaggctaggagggtgcagcgctacagaccacagtgagggagtggggatgacgctagtgcgcccgggaccggggccgccgggttcgatgcccgggctgaggggtccctcgcagaaggtgcgggacggggaagcccctgcgccgggctgccccgggtcaggaaggagttgccgggtcgtgcaaggtgaaggaagccttaggggcgagtggctgggggcaggttcccgagggcaagaactctccgaccttcagggcgctgcggggcgaccccgctcagggttcagtccgagaacccaaaggttggtggctcccgggcatcactcgctcccactcggccgggcccggccgcccctcgccccggccctcccctcccgctgacctctcacgacgtccagggcgagggccaccaggaggcagagccaggggccgtagggcccccgaggggccgctgttgtgcgaccggccatccgcgcgcacatccttcccacagaaggcggggacgaggcgggcggctcaggtggccccagtcccgcacggcatctcccgcacccgctccgcgccgtccccacctggcccgctgggtcccggccgccgccgccgccgccgccgcccgccccgcggctgcaattcccagacaatggagcgggagcagtggggtgggagggagcgaatcgcagcacatgggctgccccctccgccccgccgggtcctagtgccctacggatccccaatccctgcgcgctcaggcgaccgaggtcgggaagagggccacgtccctggaagcaacagaggacggccgcctctgccaggagggactcggtgagttctgtgtggctccctcacggaagcttctgatcagggaagaaaaagccactttctctgcctcacccacccccacaagcagctcacttgtgaaggcatctgacacctgagtcagaaccagaattcagggacacatgggacgggagctgcagggacaggaaaggagggagggggtcaaacggggccagatgccaaccacctgagcctgccctgacagagctaggccaccgccgtggaggaagggctctaggtgcaggcagctctagtctcttgaccagctccacctgggcagcgtcctgcagcgcttaggagggttgagggttgcccaacactcccgagggaaggccagcctcaagggtcctgacccagtgttgcctaccaggcagtttggggagaggcccagagcaggggccccagctgcacactctcatgccctgggcagcttacaaagaaaaaattatgtctgaggccctccgcaaaattggtccagcctgtgggccgactggaaaccttggcacaggaaagtcctcaggtgggtggtgaaggggagggcaggcaagtcttctccaggctgcccacccacctcagcacactgcagggaaggggtgacccctctgcccagcaagcacacgcatttccagcagtgccagtcgttcctacgttttgtaatgggggcatgctttcctaattccttgtgctcctggagggaagggtacctggtaccagcctgccttttcagctctcccctctgccagcttcacactgcccccacagggagaaattgggaggcggagctgcactacagaaatgggtttagcagtagaggagacatggaagcaatccagacttggagtaaatacattttattcagaacaagataataaaatagcgtgcactttatttaaaaccaaccaagcactgataaaaaatatatatcactgcagctgtgattccacatcaaacctgaacagtaagaattgggcatttattcttcacatcatgtgccaagcctggcagagaaggacatccacctccactagagcctcaaaggaaaagtggcccctaaccaccaagacagggtaccctggtggagaggggcagctggcagctcaccctgctctctgcagaccacgtgaagggaaaggagctgcctgtgttcctcccgggctgccggggtgggcactggtcagcaactccttctcggtttcaggttgtggagcgatggggagagaagtgcatgcagttgtgcagacaaggaggcgggtcctccctcctctttcagggtctctgaaacccccacagggcatataatgcccagcaaggtcccacttgcaggcacatgcctacaaagcagcagccatcttttgctttggctgatggggaatcaagattctgagagtgactgctcttttcttgacacaaagcagccacagaacactttcctacatacagtatggcagcaggcaagcagaaggccctgctggctcggattaaggcacttgaaagagacacaaggtacatcctcctcccctgcagcccccacaggcctcaggggaccctgtttccccaccctttatcctcaggtccccttacccctgcccctccctactgctgggcaatgaggaggacaggagcgtgccttaaaggaccatggtttggtgggagtacagggtaggaggatgaggaaaacaagaagggagctggagatttggccaaggagcaacttcagaaggacaggagagcacgagcattaggaggaagccaaggcagcagcagagggaagccagttaagtcatgagagaccaacggcagtgatgtttgctggcgcagatgcagaagccagagggagg

SEQ ID NO: 915659 - DNA, 4001 bp, Homo sapiens
aggagaaggtcaccaaattctgctatgatttagccataccaaagtgatcactcacagtaccagaaactttgttttttctctacatgaagccaagacaattgccctccaacacagtgggtcttcaagtacaaagactaaattaaaatctgcttacaaagtttatttttaaagtaatttaaaacacagtgtaaccatacattaaaaatattgtggcaatttagattaggaataaacatgaggttatttacatgttggcatatgtatgtgtgtatatatacacaaagtgcagataaatacagaacactacaaaataaacaaaaaattcaatgataatttatggacaatcacttttatatttattacttaatttgtcatgttaatgactgcaaagaagctcctagtactgaaatataatatcttaacatccgacttttatataaactacagtacctcaaattttaacagtatataaatagggttctgaattaaaaacccaggtgtcttccctgccaaattccctatttgttaaggtttcagctcagaaatcaagaaggactctgaaaatcccaacctttgatatgtggtggtatattggattttaagcatcaatcatgtgcagacagtgttcttagaccagttcctgtggggatcgttctctgcaaaaaggaggcagttgagggtacacgggcagatataaagcctcaaaaatgctgccatatagagattaaaagtgtgcattttatatatatatatgtatatgctgccatatagagattaaaggtgtgcatttttatataaaatgcatctttatataaaatgcacatttttaatttataagactgagtaaattcaaggcaaaattgagttgttgtcaactctggatgcaaaaacaccatgggaaacactcatgaaagatggcagatggtccaaaggggagaaaggggttatcctactgaggaggttttgacaccttcagcccctgcctcctccaacacttaagtttcccaaatagccgtgtacacaggcatcttgaatggtggagaatatttatgatggcagtaaatgaaaatggtctctggtttttgggactcttcagtaagcacacagactccatttctccatagagcaccaagaaaaatccacactgaacttggcatctctctcatgagtgccaaggggaaaaggaatgatgggctgggccccctaaaccacagacaccttgtaatcattggtctaggacatgcagatcaattttctgccaatggcttactgtgaatgttgtcaacattcttatgtaagattctttatttaaaacagtgagggcagctgccctcaaaaaataaaaaatccaatttattgatttgatcctctaaaagtccacatcattcataaacctgcattttcccaacgttattaccaagtggaactggcacattttgaagcagggggataacggtgacaatgagggatacagtgaatgtgttcaggaaattgagaccagttgatgaatactcgatattacatctgcgaatcaacaggagacaggcaggacacagaatgttcagaaaactatctttgtttcttaaaagtgtcttgattttggaaggtaacaaaaaagggtaggaggcaaagttaaatagcaatgtgtaccctaaggggaaacctttagtcaaggggaaagtaacttctggacaatagtcaagcctgtgttctttttcgtgacctgaccaggagatgtgatttccgggtcctacgcagtgatgtgaggtcatgctaacagctgtgagttacaaatgtatcataaaagcaaagaacaaaatctgttccctaaattggtctgcctctgactttagtcaaagtataagtctagttggggttctaaatgctaaagaaggcatcctgaatacatgatttaaggtatcactacaatttgaaattgcttgaggcaaagctctgagggactcttctaaactgaaaccacatgaatgatacccttttcaacacagaccagaagaacggtgctaggagtgagaaggtgagcagggtacactggatgatagtgagaaatctgtttgcctcacaacatagtgaatttttatgaaggatgccacattatataaagctaattatcatcgaataataataaaagtcatatgtatctttatttttcctacttggaaacctagataatttggggttttaatacattttttttccttcactatctctgaaaagagtcagcagacaaatcattgttgagaaacctggttgtgttcatgcaagttacaaagcacagggaacccatgcaacaagcaaaaccactcacatcaaacaaggagaaacccacttcctcatacttcgtgaatgttacaggaatacacagatgattttactgttcagacatttacacataacacaacagaaaaatccttcagttgactagtttccataaacttggtagcattacggcaaaacaagagagtcatctgtgaaacacacaaatgttttgtactgagggatattttcacataactcaggagataaggaacttaaatttagaccccctcaatctcatcatcatactgattataccgtaagcagttattagggtgcagaggttgcgtgttttgaagatatggatgtggcaattctaatgtatcttcacattgttcctgaaaagctaaggttttgttattgaactactattaaaagttgaatgtgatcctctttcaatgtctggcattgccttcctgtggaattaacattctgtgtgatttagagtacatgtcctgactttctcagtgctcataaataccttatctgtaggaaacttactttaagggaaaagcagctttagcccgtctccagtatatggccatgacttgcttacattgtaatccattatgaaggaaaaagagccatcctcacaaatctagaagattaaaagttcaagcacaagcacaacttgaatcagtgcttctgtagcttgtttcagcaaagggaccatagccagtactgtggctgcaacatatgccttgccatcagatacaatagttaggcttcctatccacatcctatgcagtaaaaaagctttaaatctgaatggaacatctgcagaattagcttacagacaactcagaagcaggaacactttggtccgtgttcaaataaaatgaaggttgagattctttatgcagcagcaggagaagtaggattctgaatctctctttggagtcaagttggtctttgaaagaaaaccaatttgcttttaagagattctagtctagcaggataccagatgatggcaagtgtgcttaaaccaagggtgctgtatagactaagggactggtacactggaaaactaccttctgttccagcagagggcaattagggtgtcagcaatgctgttattactactaaggtcaccaaggacctcgaccaagaagatccagcaacacaccttattacagtgcacagaggtcaacagtaagagataaaagaaaaagatactcttttatcaaacgtttacattacattgctaatttttattacataatatttttcattcttttgattcactgatatttattcctgattctgactctgcctaccgttattctctctacttgttaattctaatcttattctttttatttgtaaaagcctaacttttctgaggcatagttgtgtgtgtgtatgtgtatttaacctattaattctagaaacattaatttaaagtagaagagatagagattacagataataatggcatgtaaagagttttttacagttaatacctgagagtctgcacagtggggaactctgaagtaatatgcaagatgtcaagaacaagcagttcaggactgtggcactcaaagggcaggtaaccagcttttcaggatcttgagaagaaaggctctttgccacatacagatattacatttatagaaataatatattagaattattgaaatagaaatatagaattaatggttcgtgca

SEQ ID NO: 915660 - DNA, 4001 bp, Homo sapiens
gcccctcttgaccccaaccctcagggccactcacccagccccagcagcaggagcaggaaggaggccagcaccactcggcggttcttctggatcaaagggtgttgggtccagctgggtggcaggagagcagggtgaatgtgaaggaggtggagggagggggtgcaggaggctgtgggggtggagccagggctgctcggctgggggcttaggcgggcaggctcacctgcagcaggtgttgtaggagcgctgggtgctgctgctgatggtgctgaaggaccactgggagctgcggatggaagttcggctggaatccctgccaggacaggcgcccagtgaggggcagggaggcaaggacggggttgctttgggacaggagtcctgatgaagtgcagggcatggtgcagggactggggctggccccttgcaggatagtgggccctgagaggcctcggtgggtgagcatgaattcaggggctggggatgagctaggggattctgtaggacaggtgacctgtatgaaggtgggggccagaccagactgggggtttctgaaagaggtgagtacagctgggcactagggtagggtgaccctacagtgtaggagaccctgtgaggaaagtgagggtcaggctaggaatcaataggacgggatggaagagagtgagtgaagtggggtgggtgactgagcagggtccctggggataggagctggggctggggtacagggttgggtccccacctggccctaacctggtgccgactcccccatccggctccggagaggcctgggctccatcctcatcgttctccaggttctgttgcagaacacaggtctcaggggggttgctgggctggggcccttcctcactccctcccgggaagagaaaagcaggcctacacaaccatttgcctggccgcctggcagctgttcacctggccctctgccctccccgcagaacgggtttggtgattcacagaaaccaggtaggaggtgggtggatgccagggctttggggagcaggagcctgcatagatcccagggaaaggagagctcccaactttgggttagggtggagctctcattcagtggcctagaatgggagcttgggaattggggtgccaggaaaggccaggcccagagttcccaggttcaaggcacagggttctggtccaggtctccaagaaaagcagcctagggttggtggaggttttctgggaaaatgggtttttctggtttagtgggagccaaagggtgggcaaggactggtcatgtgagaggagctccagctcttaggggtggtggtgggattagggagagggctttcagaatagagaaaggcgtgcgggttcccatcagcttagctggcctggggcacaggggatgctcctgcgtgtggggcaaggtctggttcagatacagaggagctcccccaacccagcgggggccaggtgcgagtagccaggatgagtggggaatccggttgggttccccagctggagctgagggatgagctcccgggcccgggcactgggctcttcccggctggctggggcccggtatgggaaccgggagggcctgggcagggctctggatcaagagtcacgtccgcggggcgggggggcggtctcgcgcttcagctggggcctctaggcagatgcttccccgagttgaggcctttggggcccggcctggggtcccgtccggccgggggcagggggttaggtgggccgggcggttcacctggtagcgcagccgggactgcttgtcctcgtcagccacctcgaaccgggcccgacgctcgaagtgcagcggcccaaagcgcgcgaccccgctggactcgggcccagggcccccgtcctccagggacagctcgaaggcatcatcaatgctgaactggggccgggcggcgctcatggccccggcccgctcaggcgccgtgcgccgccgccatctgcgcccacacacccagcgtcgccgctgccccgcccccgcatgccccgcccctccgaccctggctccgccccacgcgccggtcccgcccccgtccgccctaagcaggccagagttgccgagccctgagcgggctgatgggtgggagcctcttccagacggagcgcgcccgccccgtgacgccactcagtggccgccatggcaagcgacagcccgtgccgggctcggacacatcccccaggcgtgtatgtgcgggggcttggaggggcttccacgccccaacctccaggtccctgacagggccttttgcaccgcagcctgttcctcgagtgccaaggagactcctgggaactgtttccccaccttactcacaacagccccgcaccggaggggtgctctccccatttttgcaaatgtggaaaccgaggctcagagagcttatgtgtcttccaatttccagtcagtctccacgcagcagccgaagtgatcttttaaaacaaatctttttatctgcgtgtgttattctgaaaaccctttttaaaaattttgctgctggcctggctcggtggctcactcctgtaatcccagcactttgggaggccgaggcgggtggatcacttgaggtcaggagttcaagaccagcctggccaaaaggcgaaaccccgtctttactaaaaatacaaaaattagccgggcgtggtagtgcatgcctatagtcccagctacttgggaggctgaggcagaagaattgcttgaacccgggaggcagatgttgcagtgagccgagattgagccactgcactccagcctgggcgacagagcaagactccgtctcaaaaaacaaaacaaaacaaacaaaaaaaccttcccttggttttccattgcacttagaataaaatctgaactcttggcagggcacggtggctcacactttgggaggccaaggagagtggatcacttgaggtcaggagtttgagaccagcctggccaacatggtgaaacccagtctctactaaaaatacaaaaattagctgggcacggtgaccagtgcctgtaatcccagctacttgggaggctgaggcaggagaatcgcttgtaccctggaggcagaggttgtagtgagtggagatcacaccactgcactccagcctgggcaacagagcaagactccataaaaaaaaaatgaaccgtggtggggggcggtgggggtggaagagcagaagtactctatgaattaggtggacctggtttcaaatccccattctaccacttgtaagtacttgggactttggcaaacccctcattcatttctgccacaagtatttattaagcatctatttagggccaaacactgttttgggcactatagatacagtggtgaataaaacagtgcaaaatgagacagtttcaagtgctgtgtgatgcaaaactgactttagatttcgtactcaaagatgacctttccaagaggtgacatttgagcaggaatgccgatgatgaaggagccagctgtgagaaaagcaaggttcagtgttttcctggcaccagggaacagcacgttcaaaggccaggaggtgggaaggagcttggcctgtggaggaagaatgtgagaaaaccagtgtggctgagcagcaaggaaaggggcaggccgacttgatgagcctgggaggagtagatgggccccagagccttgagagctttatggaccttagtcaagagttcttttttgtttttgtttttttcgacacagggtctcgctctgttgcccaagctggagtgcgatctcagctcactgcaacctccacctcctgggttcaagtgattctcctgcctcagcctcccgaggaggctgggattacaggcatgagccacagtgccctgccttattattattattattattattattatttttgagacagagtctcgcaccgtcacccgggctggagtgcagtggcaagatctcggcttgctgcaacctccgccccctgggttcaagcgattctcctgcctcagcctcccctgtagctaggattacaggcgtgatctg

SEQ ID NO: 915661 - DNA, 4001 bp, Homo sapiens
caacaaatatttgttaagtgaatgaattaatgaatgaaaagtgctatggattttcagagggagaagtagatagcataaactctctttccacctatatcataatcctctcacagcaggaacaatcttttctatagttgtatatcaagagctcaataatgtttgtagatgttttattttttacaaatctgagccttatgcagtgagccgtgattgcgccactgcactccagccagaatggcaatacaacaaggccctgtatccaaaaataaaaagaaaaattctgagacatagactggccacagtgaatgtggaaaagcagataaacatgaatctttgccaaagaaaatcaaggaaaaaatttccagctccaataacaattactggcctctactctagatctttattattcaaagtgcagcccccaccatcagcattaccacgagtttgttaggaaagcagaggttcaggccccaccaggacctaatgaattagaacccccattttaacataatcctcagaggattcctaacatacatgaaaatgtgagaagcatcagtctatacaataaaaatgaaatgggtgcctgcaacctcaaacaaagtcatcaccttctcctgtgttatctctgaaatacataatcagacttttcaagaagtactacagatacagccatgacacactttcaggaacattagggtataaatctaaattacttcaatgagaaataataattgatcatctgctgaatattgaaacttttagaagacatacaaaaaatatgatctgtcttcttaggacacaaactgtaaggcaagaaaatgagacaatgcacttcaatggccaaagtaataataaatctttaatatcaaggataagattattgaaaaaaagattttgcggagaacatttaagagcatctttaatagtcctcagtgttacatatacatactgccaaatattccctattaattgccctgtatgtaaagttgtgtaacagaaggtcctaggtgacacaaagtcagatgtcctaaccaagttcactgactgaaagactggcatcaccctttaaatcaccacacacaatctcaacccaggagtctgttctgtgaacttgcaaaaacacttgcaaaacccccaaatcacaatcctgtcatctcaaaactgagtcaagatctgaggccacagggacttagggccaaatatgccttcttcattaaaaaaaaaaaaaaaaaaaagcaaaataaaacaggggaaactagatgaggaaagattgcaggtccttctcatagcctcgctgacctacaaatacctctccatcacaaggcaggccagaggaaaataaggctggtctttgaattaacgtttttaagtgtcctaaacttaattctaaaagttgggagccatcctcttcctagcaacaggcattcagatgacagctcaatctctaattcccctcctccttctcccttgcaggaattggtatatccttcccttgcgacctcccccttccccctaccgaccccccaaaacactccgacccctccaaaagagagcccgacacaaggcaagtcccccagagcccctcgggagcaccaactgcagcccccggcccatcttccagactaaactcgccctgcgggacgggtgacgggtctcaccaagtacagaggagcatagatcttcagggactcctccagggcgcccccggtgatctgcaggaaggagacccggcaggaagggtgccaagtgtggccgatctcatagcagttatgagggatggacttgctgagggccgccatgacgaggaacagcgcggagaagacaggagggggagagcctgagccctgcagggaggggcgcgagagcccagccgccagcctctcgcccggccagcactcggaggtgcggaatggaggggaaaggtcacgagagcggggttactctgggccaaagtcctcggatgttgagcgctcggcgtatcgcagctcaagggggcgggacgcgcaccggggaggcggggagaggcggcgcgtgcgcgctccctcaagagggcatccgctggggcgcgttcccgcgcggcggcgcggctgggtgagcggaggcagagaggatcttcgcacccagagccgaggctgtacgcgagggagcgcagctcggggacgagccgcctccccacccccgcgacgccgtgcccggctccggggcgcaagcgctatggcaggtgcgcagtagggggtggcttgggtcaaattgtacttcagcttccaactgcaagccaagtagagcggagggtagtggaagaaagggattaaatgtctttgttgggagctggtggaggaagagggttgccagaggaatgcctgggacaaacgtcctccccagcaccgggagcttgccttcccgagagtcccaggtaataaacagctagggctgcctgctagttgcaactaactacccccaagtgctgggctttccaagctctgtgatacctgcgaaggcttgaaaagtctcagctatgttcataccccgaccgtgtgtggggaagggcaataggtcatcctgtccaaaccttaggccacggagcaatcctgtctacagcatctttgataggtgcttatcaaccaaacagcacacacagtagaggcggcagtcgtgtgttagaactcagacctggctagggaacttggccaacaattagcaagacaagggtcctgtgttgcttgagtcatataacccctctgtcaatctcctcacatgtaacaaacctgccagtttctttggatttctaaattccatagtctcttaaagcagaaacgaactacctttagaagaattccattcgaatcttctagtcttcattcattcatctacaaatatttactgagtcattactatttaccaggcactgtgctaaggaaacaaacagaaacaagagagacaagatttttattttcacgaagctagtattctagagggagaagacagaaaataacaaagaaaactgaacaagataatatcagataggtgtagttgtttgaagaaaataaaagagaaatactcagatgaaaagtccaaaacaacaatggcaaaaagataaaagtatctttctctcaggtaaaggtaggcagtcctagaataaaatggtggctccataacgattagggatcccagcctctttgtgacagtttgctatgccatctgctacctgtgatttccaccctaacttagaaaataacatgacatcaacatgctagccaggaagaccagcaaaaggggaagagaggccgggcgcggtggctcacacctgtaatcctagtactttgagaggctgaggcgggtggatcacttgaggtcaggagtttgagaccagcctggccaacatggtgaaaccctgtctctactaaaaatacaaaaatttgccagaaatggtgacacgctcctgtaatcgtagctactcagggactgaggcaggagaatcgcttgaactcaggaggcagaggttgcagtgggccaagatcacaccactgttgccttggcaacagagagagactctatctcaaaaaaaaaaaaaaaaaaaaaacgggggggcgggggcggggagaaaagggcatacttcctgtttttaaaaaaacttcccagaagatccatacaaactactacaacttacgttccttggacaaagcttaatcacatggccacacttcattgcaagagaggatggtgaatacaatcttttttaattaatgggacaaatgcccagctaacatttgaggttttattactgagcaaaatggaaaaaacagatattagaggcaactagcagtgtctgccatagttctatgtctctggctacccaaatatccgggcacaccattctttctacagatagacataccttcccttttccaagggagacaacctaaaattccatgcagttgctgaatcctagccaaagtccagaatattcctcaggaccagatgcagatctcatgataaagtta

SEQ ID NO: 915662 - DNA, 4001 bp, Homo sapiens
tgactgaccttgggcaataatacacagaaaataaagcacatgtattaaataatgtcttcacagttcaaaaaccccaatgaaacgcactcatgaaaaaacagaacactgccacgttggtttctgctagaggtcacatgacacatggcagtttaatgtggttttaagctgatactaaattcagctgaggtttggatttgggtcacaggttcatcagtcaaaaacaaaacttgggataaacttaaatacagaactaaacaaagagtccagacatcttggaggttggggggaaatcctggctttattcagttctgaaatccgacccaaagatttgccaagagtgaagcagaaggattctaaggttcaagaggaggggagtttttgttgagatctaaaaatatccttaaggcaattattcagttaaaaatgaaatgaagccagaaagctgtaccttggaacttttactggtgacaaatacgttaggacaagaacaactataactgagtcaatttagtcacacaggactaaaatctaaatgagcaagatgttgttattagttagtattcattagctcctccattgaaacgtacaaataaaaagtcaaaaacatatcagatatctacttcatctcagcagacattttctgcatggctatgcttattgcttaaccttattctgaccagtgaaatagttatctgtggacgtcaatacacaagccacttcccaagaatgctatccagagagggcttcatgaaggtcaagttctgtacagctttcatctgaaatcagatttccattcaagaaaaccgtaggtgtccataatagacctgggttccaattctgtctctgtccctagagagactagccataagagtgtgggcaaatcactttaacctctagaaccacagttaaaaaaaaaaagaagaaattaaagaaaagaaaagaaggaagaggaaggggaggaagggaaaggaaagaaagagactaggactgaagaactctacagtccggtccagttctgacatggagttctgagataaactttgtaaaacatcaaggccaattctcagagtaagggccagaaatacaaagtatcccaggtgaagagaactgccctcccttatctccttctaaaggccagggtcactggccagtaatgcggatcagctcatttggatatgcctattagtatttttagagtcttcttctctgaatcctaattccttggcagaacagagaaaacagtagcccatttacaaacacttaaataaaagaacagacattcgtaaatggcagacacaactctgtgaccttgggaactccctgtgtgggtttcggctttttgctcttggtttttgccaaagaacggaagggcatttggaaggccatcgcggctcagaggtccaaggctcctctcctggtttctcccgttccagggccagactggcgaggaggagccttggagcaggcgtggctggcggcgagcgcgggccccggggcctcgcagggacggcgatcgcatctccgcgcggcggtgcctgcgacgctcggccacgcccggaccaagagccggagccaggcaccgttatccccgcatcccgctggcgccgcagcctggcgcaggaaggcctcgggcgtccgaggcaggaggaggcccgctccccttcggaggcgagcccgggccctctgccgcctccttccccaccaatgggccgcgcgggccccgtgcccaccccggccgggcagttcgcgccgagcggttacctggcggagcgcaccgggaagcctcgggcgcccgggcgcccgcagctcccggcccggatcgcggcaacaggaagcggaggagccagaggcggaggacgaggctgtgacggcggcggaggaggagccgggggtctgggggcacctgctggctgggaggatggagcgcagagccggagccgggccaccgacgctccgaaagggcgcgggagggtcctccttctctggcgggggggtcaagagggatctagcggtgacgtgagacctggaggccgctgctcttgtttagctgttgttgtttgtttaaatcattatccacttctcccctcccctcaatgggacagctcatccaatcaatttatcgagtacctactaagtacttgcacccttactaggcattgtgggggatgtaagacatcgttcttgccctcgtgcttgaatttaagtcgtgaaacaggaattgatgagcaggaaagtgctcaggcctgagaattagaagttacagtattccagtcagccctgtaaccaacttgacagtaaagcataaggcttgaaagtgaaccttgcttggtacctctttgggcaagttacttttctgttgcctccctttcctcgatcctgaggatggggatagtaataacacctatctcatatggttattttgagaattttaaaatattacatgtgtaaagtgctttgaacaatgactggcacatggaagtcactacataaataccaactgttttatttcactttgggtaaatccttttcttctctggttctattttaataccaagcagagtaagtttgagcgataagaatggaggctcgaatggggtaaagacggtgtctgtcttgattgatcaggacaggcaatcccgggtgctgaggaacctagacattctcaaaggagaagaccgttagcagaggtgtgagtgtttaggccgtgcctggggaatagtaaatattctagttttggtcatttatcttaccaactcttcaaaggtaaggatggcactggtttcatctttgtttccctagtacctagcatgaggcaggtacaataaatgtttgtatgttgaattaatgtgaaatgagcctgggaaactatcttggaagcatatcacagttcctaaagtgtgttgatcaactatgccacttgggaagtgttttcaaataccctgtgcaggctgtaccttgaatattatgatttattaggtctggtatggggtccagggatctgtattttttaaaacctgcccaggagtcattcagacgatcacatttgataaccattgctgttagagtccttaaatgcctctgatgccagcctaagatgccaggctgagagagcttattatgtggaagctcatgatgttattgaacaagggaatcatattatcatgctctccaagcccttgctactcaaagtgtggtctatggaccagcaaaatctgcatcaccttggagttcattagagactcagaatctcagaacctacccctggacctaccaaactagaatgtgcattttaacaagttccccagtgattcgtatacacatttgggtcgtagttcttaatcttgatagcatggtagtatcacttgggagctatttaaaatcctaatacccagggcacactccgaaaaaagtaaatcagaatctctgtgtagatatcaatcaatttaaaagctccctgggtgattccaatgtgcaaccaaagttgagaaccccagctctagcaatactcaattaaaatcagtgtaagatgaattgcagaaggcctgttacacatgtgttaggatagaccggataacaggtaatgatagtctggagaagtaaaacatggaaggctccacttcactgaatggagagtatgcagagctcaccctttcccccatttgttttgttgcagtattttttttctagtatctgaatctggactttcttcttgctgccatcatttcccacaaaagtagggtactaaagccttcaggagcctaaaggctgagggggtaaggtaaaagggaaggagccagttcttcctaaaatattgggcctttatcctagggtgactgggattctaggttcaagcttcatgacctaggattaaattttgttgatgtatgtatctttggccacaatccctgttccaccaaatcagatccttgtcaccggtagcatcccccagaaattctgggctgttaaggagagcaggggacaggaagctctccaccaattta

SEQ ID NO: 915663 - DNA, 4001 bp, Homo sapiens
ctggtcatgtagtagcggtggtaacaaaaatggcagcaaatccttatacattgcttacaatgtgccagggagtgttctacaagcactaacattatttaaacctcacaaggtagatgacataatacattattaccttccccattttacagatgagaaatttgaggccaagagaggtaaaataatttgtccaaggtcacgtcgttagtaagtggcagagctagtattcagatgcaggctgcacgggtccacagtctgtgctcttaactactggactaagctgtctcttacataattgatagactagtatttaactaggcaggaaaaatgccagcaaagaagtgtgaagtgccctaggcagaaaaagcagagaggaaacaggggtctcctggaaagctttatctttagggttatggttgcaacacagtggcagttgtttcttttcatctattccaagacccacaagttgctctgggggtgtcctatgacccgctgctgtgccaaatctataaagaaatttcaaaatgctctggagtgttagcgattaaattagcatcggtaaaatgttttgcaatttataagctcttttcatatttctaaccttacgtaatcctacaaccatcttgagaagtagccattacaatgtatattatccccattttacacagaggctccggaaggttaaggcacctcctccacctcagctggtgaagtcccaccttattggacatatgttcgcggtttcctcattcattaaattttagagagagagagagtgtctcgctctgtcgccaggctggagtgcagtggcatgatcttggctcactgcaacctccgcctctcgggttcaagcgattctcctgcctcagcctcccaagtagctgggactacaggtgcgtgccaccacgcctggctaattttttgtatttttagtagagacggggtttcaccatgttagccaggatggtctcgatctcctgacctcgtgatcctcccgcctcggcctcccaaagtgctgggattacaggcgtgagccactgcgcccggccgcattaaataacactgatagctactacctaggtactcacaccacgataaacttgtcaaccaagatcgtttcctttaatcctccctacaagtctgcaaggtgggaattattcctattctacaggaaaggacacagaagtcagagctcaaggcattcctccaggtctcaagtcagcagaacccggcttcataactgtgacgccaaacccgtgctcttaaccactactcataggccaccatccagggctgttttgaggatccgttatgcagaaacgcccatgcctgtctctacgtacgacgatcccctccagtttagggcagtggagactcacaagctcatgaagctctttaattcgtccaccgctacctgccgccttccctttgtacctagggcagtattcctcacgcttcccaatccacttaaaaacgaggcttccttggcaaacaacaacaaagcataaaacccaagcccaaaacaacagcaccaaaaattctgacttctggtcacttaacccactcctcgtcaatcactctcacctccaaactccaacgtcggttgtcatgcggacatcgtcccggcttccggaagccggctttaaattccggaagtaaatggaggaggcgggccccgtctgcgccgtgcggcctgctagtccccggctttctcttcccgctctatggccagtctggccgccatgttggagctttcgctgttcggggcccggcctgctccgggccctcccagcgtcgccgctagctgacttagggctcccgcccacactgcgcacggccttgctgagggccggctcgtagtgggaggcttcgcgttcacctgaacatttccgcctcctctggatgggggatgagaggcggggctgatgcatcgcagcagtcctggaccctgacttcggacttggagaagaaacgccgaggaggaacgggagttagggggttagcagcttggcgcgctgggagccggccacccctggtctccggacttcacttcccaggaggcctcgcgcgcgactggaagtgctgcgagcctataagaaggcgaggcggcacccgccgctctgctctggggcggcattgccagccggctgtaggcattcagggcagtgtcttctgcatctcctaggaacctcgggagcggcagctccggcgcctggtagcgagaggcgggttccggagatcccggcctcacttcgtcccactgtggttaggggtgagaaggatcccggggctgggagttcagggacctgggttcgaatgctggttccgctgctatctcgcttcgcactgtcgcgatccccttgctcggcctcaattttctcttttagaaagtgggcacctttctccgcgctcttccttccaacgcggtggttataaaggcacgaaagctcttcagaggacgcagaaagcacctggagctcctcaccccaattttcacccattgttagctggcacgagcacccagcagaggagtcagggatcacccctcgggtgcctggaacggttctttggacacctgagccggacctaggcacagcctgaagtcggggtctataattattccggtgctaaggggtaacttgttcacctacctccttggcaggaatattgagcccttcactcctcatgttccgactttaacagaagctacctttgagaataaggaatcctcagagctgagagggagtggacccgaattcctgtaccagctcggccacttaccttggctaagtcattttcttgttttgggccccagtgtcacagtgtttttgatttgtaagatgagggtttagggcttgtatcctaaatctggtcctcaagattcttgaagtcccccagtccatcggggagggagagcaacaaactgattttctaccccttcatttatttgtagttctaaattataaaagtaacactgcaagagtttggagtagagcctttttctttttctttcttttttttttttctgagacagagtctcactctgtcgcccaggctggaatgcagtggcacgatctcggctcactgcaacctccgcctcccgggttcaagcgattcccctgcctcagcctcccaagtagctgggattacaggcgcccgctaccgcgcccggctaatttttgtatttttagtagagacggggtttctccatgttggtcaggctggtctcgaactcctgacctcatgtgatccgcccgcctcggcttcccaaagtgctgggattacaggcgtgagctaccgcgcccagcctgcgtagagcctttttctaagactaagggctggatgggaactagcatttcttacccctggatgtgacctgttttagctcagccgggagaatcctttttcgcaagaagttaataatatcttgtgacgtgaaaattatgtgaaactcagacttcagtgtccataaataaatattactggaacacagccgtggtgctcatttgttaagatgtttatgtggctgctcttgcatgggcagagttgatgacatagttgtgacagaccatgtgctctacaaagcctagaatatttactacctggacctttacagaagagcttgctgactgctcccttagaatggggctctgcaaagtgagcacaccctgggatcacagcccagcctgcccttagaacaaatgagaggatattttcaagcatttgcattgcagttttcacggtttttttgttttgttttgtttttgagacagagtctagctctgtcgcccaggctagagtgcagtggtgcgatctcggctcacttcagccttctcctgggctcaagccatcctcccacctcagcctcctgagtagctgagactacaggtggatgccatcacgcccagctaatttttttttttttttaagagatgagggctcactgttgctcaggctggtctggaactcctgggtatttatttatagacagagtctatctctgt

SEQ ID NO: 915664 - DNA, 4001 bp, Homo sapiens
gtggaaggggtctgaggtgtaaacagcatgggctttggagttccactgcccaggagccagtgctggctccactacttactgtatgacttgggcaggtccctcatcctctctggacctcaatttcctcatctgtaaactggttctattgtgaggattcaacaagatcatatgtgtgaagaagtgagcacagggtctggccatgggaataaatatgatcaccattaccctgagactccctctggtcccttgttccatagggactcagaagtctcggcagaggcttttgagttgatgagaaagagggagcctcaagaacgggggaggtgcgagtcttggggtggggagcagatggagggccatcctccactccccatctgtgctgagcaagggggtgggacacagctactgggcagcaggggccactccctggctcagagggcttgccacaccctccctggcagggctgccagcctagccacctcaccctcaggtgccatggagagagaagcaggtagggataaagtggggcgaggggaagggtaaaaaggggaggaaaaaagtggaaacaacaaaaggggggttaaggggccacctctcctaccccagacctaccaggcctccagaggcccaagaggagaggaaccaccccctagcccagcccagatacagcctgtccccatcacccagcatgggagcacagcgccagctgacctgcaaggcctgtcaggtgcacacacacttgtccacgcccctccaacacatgctcatcacagacccacccaccgtggagggccacactgcctgtcacccaggaaactccagaccctcgcctgtccccagggcacagactcccagaaccgtagcatggtacacacacatacacacacacacgcacacaccacatacccatccaccacaggacacacacgtgcacatacacgttgcacgtgcagtgaagcccagagacataccagaccttcacctgaccacagtgcacatctccccaccccccactgcaaactgacccccaggctcctcagactccacagggagagacctgcccacaaagggactcactcacatgcgcacacctagaccactgggtgacaacccgagccaggcacccactcgcccctcacctgactacagggcgcacacacccaattcacacacccacacaacacacacacagaagcaggctacattcacccaaatgcatgcacagccccactcaccaccctatcaccccacacatcactcggggccccaggtcctgcagaccttcctggctagggctgaggaggggccgtcgggggtcccagccagcagaatgggccctcaatcctcacctcgaggacaaggagaaggggtacccaggcgcctcccttcctcttcccctcctcccctctaggctctgcgactgctgctgcattgcaggcgctgcccggacacctcgtgagcggctgggccgggctggggacctgaccccgcggccctgggggtgggggcagcatcccccgctgcgctgcggcactgggacgcgtgggggccaggcactgacgtcacaggacgggcgaggctggatgaggggacgccgggggcggaagtcgccccgcatattgctgtccagccgccccacccctacccccaacgcgggcccctggacccttggcagggcgcaggtgaccccaatgacgtcattggccgtaggggctctgggacttccctcctcagcccctctcttggggtcgccttttgcactggtccctctcacgccgccccaggcccggctccggcccccccagcgccggtacctcttcccgcagcggctcgccgtccgggatgagcgcgggcacctccccgccgtcgccagcgccgtcctcgggcatggtgtcctggctgcttgggcggccccagcctgggcaccgggcatgataggggggagcacggagggctgcgacgcggcccccgggggcgtccgctcggctcagcggccgcggagggagtgcgcggagctcgagcccgagcgcggcggcagcggcggcggcggcgttggcggcccgggtgccaggcgccccgccctccgctgaccccgcccccgcggcaccggcggcgccgccggcagcgcctggcaccgcgggcgctccgcccgtccccgagaagcccccgctgggcggctggacccctgggttctcctccggccgcgctcgcgctcgcgaccttgagctggtctaaccctctggcgcctgagcttcccgggctgtaaaaccctcgaggaaggagaatctccaaggtgggtgggcgctcgcggggtcccatctctaaggagtaggcccagagttaagcccacccagatcccatccctgaagcctcacttggagaagagggtagttacagctgagaaaagcgtgacgagtctcactggctgggcaggggtgctgggctcagcttaggacaggcaggctggggccaggacacaagggaccctaggctgcgtgaccttgggccagcatgctccactctcaacctcagttttcccatctgaaaaatggggataaaagctggactgagtggctcatgcctgtaatcccagcactttgggagaccgaggtgggaggatcactggagtccaggaattccagcagccttggaaacatggcgaaaccctgcctatacaaaaaattaaaaaatgagctgggcatgatggtgtggtgtgcacctgtattcccagctacttgggaggctaagacaggaggatcaattgagtctgggagtaagaggctgcagtgagctgtgtttgcaccactgttctccagctgcgtgataaagtgagaccctgcctagaaggagaagaagaatgagaaggagaaggagaagaagaagaagacagaaagaaagggagaaaaagaaataaagaaagaaagaaggaaaagaaaagacatagaaaggttttggattcagtttacaagtatccattgtgccctgcagtgacatgggaactgacttgcattagatgaccccctcccaggtacacgtggccccagtgctacctcctagccctccagggcctcagatcttcacatctgtgtctgggtctggctttgctcccaaactagacaatatgggcagaaaatgagctgcaatactggtgggttaattcatttttgtatgtgcgtgtgttcaggcaaagagcaactcaaagaccattcaattaaacatccttacccacttaaagattaggtaattgagatgtggacacaggaaaggactggtccagggttttatctatttattatgaatttcttggacacagatgtttattgggtgtcttccatatgcaagtattgtgcttggcactgggaagacaagggtggaagtggagaatgacaacagggcctgtcctcatggaacttacatgcagggcaaattgggtgcacccagagggggcctagaacccaacctatgacctccacccctgaccgggtcaggtctctgtcccctttgtccctctgagaggcacgagatgaactaactcttaaagataactaggcttatggacaagtggatatgagggggaagggcatcccaggtggaggggacctctgggcaatggcactgcaatcagaccacgtgggctgagtttggggagcaggaaggtcatctggtgtaactggatacctggtagctaattagagaggtcgcagagaacctgctcatgctctctagaaagcggtggctgaaggtctgtgagagggaggcccctgaagactgtctccgcggggttgggagtgatcagaacctgggtggagagaaaggaacccccgggactacaagtgaggcttaggggcctcacttcaagaagaccacaggcccggcgatgactcaggagtttaggctgcagcttcaggacgcaaatcagcacacctctgcccccaaatctgctggactacgggagagtctatgggacaggcccggggcaggatcctgccccacctatacca

SEQ ID NO: 915665 - DNA, 4001 bp, Homo sapiens
atggagttgcagagagacctggtgccaaatcgaaggatacaggcagacaccaagaccaggaagacggctatagctgagatggccagtgcaatgcgcagccctatagcacctctgaaagggagagaacaagccttgtggtggaggtgaggctcatcctacctcagcccctggccctcagggttaggcagtcacctgtgggagtcctcgatgcagctgctgtagatccagaagagcaaaagcaggaggcagtagagggccaagaggccagaggccccagctacaaagtagcacagggatggtgctgagggacgggataaggccagggaggagccattcagggtggccacaccatacaggggacatctaccactgaaggagccctgtggagagaagctgctgagtcctagatttcaggttaatgtctctagatacagtctcttggtagggtgttagtgataacttaggaatggtcctgcattccaggaagttatttgtgcaccgtcaattcctatttctgggacagggatattgatggagagggcctgctggggaatcacaccggcagtggccagaaggatcagaaaataggcaatgaatatagaatgcaatgagcttcagagaagcctcacaagttatggtctctgtgcagaaaccttagagtaaacccaggccttgtatatccttcaacaaataactatctgtgaggtgctttttttttttttttttgctggagtgcagtggcgccatctcggctcactgcacgctctgccttctgggttcatgccattctcctgcctcagcctcctgagtagctgggactacaggcacccgccaccatgcctggctaattgtttgtatttttagtagagacagggtttcaccgtgttggccaggatggtcttgatctcctgacctcgtgatccgcctgccacggcctcccaaagtgctgggattacaggcgtgagccaccaggcccggccagtgtttttgtttttgtttttgcgatggagattcgctcgtcacccaggctggagtgcaatggcacgatctcgactcactgcaacctccgcctcccaggttcaagcgattctcctgcctcagcctccgaagtagctgggattacaggcatgagccaccacacccggctaatttttgtatttttagtagagacagagttttgccatgttggccaggctggtctcgaactcctgacctcaagtgatccgcctgcctcagcctcccaaagtgctgggattacaggcgtgagtcaccgcgcccggcggatctctgaggttttctcatggtgtaaaataggcacactagtgcctactttataggcattaaatgaacccatgtttattaaccagattacctggctggggtaaacgatgtaaattattggcttctacctttacgtcagcgttttctccatctctcattttgtcatttaacacactgtgctacaatcatgtggcagcttgatcatctccactacactatgctttatttctcgacaaagctcagcacaaatggcttctgatttaacggatggacgcaggttctgcactgacttctgtttcggaaccacagtaaggctgtgcagcaggagccacgaaacccgactccacctagtgctttaagacgctactgacccgtccctttggcgaggggacaacttcgaagtatgacctggccaggaggagccacaaagcgcgattagcctcgctgcatttcaggtacaggccggcgccagccgtgcctcaccaggtccaccggctccgagcagcagcaagcccggtcggaaagcgaaagtggcctcgccatgtccagaccggccagctcccccgcctacctgaccccgccccgcagccgcacctgggtccgagtcatcgccgcggccgccacggccccgcacaggaaggcggcagcaaagagcgcaagctcgacgcgctgcagccaggacagcgccatggcgccctgaccaccaggaagcgccgctgcagcagcaccccgcccaaagcccaccttatccggcgcgacccacgaaggtggagacgtcatttccgggggcgggatttatttacaaggaacgaaggggccactgactcagagcggcaagtacagcgagtagtccgagagcgcccaccggcgggcggggcggctggtacggccgatcatgggcagtttctgcacgtagcgcgaggccgggctaggcccgtacggcgcggggaaggcagtctggaaaaggcgcccgcggcagcgcctcccagcctgccgcccggctatgatgaaacgaaagtgcggggcgccgcgcggggcgaaacggctcttctggaaaacgtcgcgggtgccggtcccggggccctgctgccggggtgccccgcgcgcccgatgcacgcgcggcaagggcctgctctcagaggcggcgggcccagaggccgacgcggggccgcctccgccgctgccccgggggctctcgtcgccgtgcgggctgactatggcgcttgccgtcagctgcggcatcttccgcaccgagtccggggctgccgccggctccttcttgtccccgggcggccgcggagccgtgggtgcaggctggccggtgccaaagcgtgtggccaagctgtcaccgaagaaggcgtagagctcccggtagatgtcggccagggtcaccgaaagagaagggtcctccggccccgcgccccctggcggcagcgggaggccggacccaaagctgggttctgcaccgcccccggaggacgactcttgaaagagaaggctgtcccatggcaggtcgtccaggcgccggcaccccctgccacctgggccacccctgttgggctctgctgcctgggccttcatcttcagcagtcgctctaccgccacctgtaagagccaaggactaagataggcaaaaaattcgaggaacctgggcccatcaaatattccaaagtaagcctgcttggctgctaagctcatgcagggaagggaggctggaaggggacggtactcaccagaatggctccatagactttgtgtccatctgctttgacctgggcattagatactgaataatcatccagcacagcctgcaagtttgtccagtaggtggacaggtgtgggtacaggactcgttctactgcctggaaggaagagaaggaatacagttagcatgtctttgatacttattccctctcaaggaccctttcccatgaaagacctacctttatctctgatcctagacagggctcaatcctcctaaattccctgattggcatattcaaccatatatttatttggaacctactgtatacctaagctaggcattgggaataaagataaggtacaaagggagacaataaaaaatatacccaatatcactgccctgtgtgctaaataatgctcattactgacaactccaaaatttagtttgcatactgctaccctatacaatcaggcaagtactggcttcacttagatgtaaactgagactcagttcaaacaatctgcataaaaacaaccaaccagagacttggactctgattatacaatttaaaatcctgtgattggacaggcgctgtggctcacgcctgtaatcccagcactttgggaggccgaggccagtggatcacctgaggtcaggagttcaagaccagcttggccaagatggtgaaaccccatctctactaaaaatacaaaaattagctgggcgcagtagcagttgcctgtaatctcaactacttgggaggctgaggcaggagaatcacttgaactcggggggcagaggttgcagtgagccgagatcacaccaccgcactccaccctgggaagcaaagtgagactccgtctcaaaaaaaaaaaaaagaattaactataaggaaaataccagctgggcctataaggaaaataccagccgggcgctgtggctcacgcctgtaatcccagcactttgggaggccaaggcaggcggatcaggaggtcaggagttcgagacgagccct

SEQ ID NO: 915666 - DNA, 4001 bp, Homo sapiens
gagatccttattcagagaattgttagggatcttagtactgatctgtacaggatacactgcctgccctgacgtggagttacaactgaacctattcccctaagaatactagtgagaagaaccaagcactcttcttgcagttaggcagctgggaaggaatcatctaatatcccattctattgcccatctctagccttacagagcaacaaacaggtaaatcttgacccaatgtatgaagcagcaacttgaaacttcagagacggagtaataggatatacagatccagtctatgatagtcaacctaggttatgtacttttcttgttaatcaagttacagataccagcttgtctcataaggagtggaaatattctctggacaacacttaccaaaaaacaggcgaattacttcaattccaagataaaggaggagcatcaccacatccagtactaggttagctgttggatatggtagcaggacacctgccaatacaaaagccagagtttgcaaacagcatataacagcacccacaagaactgccacacacttgggaaaaaagaggacatcagtctcagctttccatgaactagttagtgagatgtgggcattattacagcagcaggatacataaactcacaatgcgactcaggctcattattatggtgttttactcctaactccaaaagtctctggggactccactctccaaaatgattggatgtacatgggtacacaggccactgaatagtttctaagggtcaccagtgggcttacagtggagctcagcaaagagcagtgatgtgggcagagtcagaatggagaagcccacatttctcaaactcaagaaattcttgctgaggggctgcctatggaatcatactcaaagaagccatctgatgaggaggcctgccttgcagcgacaaagaactgcagggggcagaaaagaacggaaaataagaaggttcttggtaggaattggctctgagctgaagtggggaagggatgctgtcgtcaagccccaagccttccttacctttatacagaaatatgaaaagttccagcaggaaataggtagcattataccacccgttcagaaagaacaggatttccagcggggtggaggacaaccgtttacctgaaaaaggagcacagagaagtgggatgggccggaaggcagctccctctctgctcgtatgggttggtgtctaactttggggaaactagacgctgcaactaatgggaccggccactcaggggcacttctggttgctgataatgagggggcgagggtacgggggtgggagtggagggggcttccctcctttcctaggaatcaccgtgaaactcgactcttcggcttcaggaataaaagtcaagaggtaactcgcagctgacagacatctcaaagatctcactctgtcactatttgggaggggaagttggggcgcagagaccaacagattcgcacctgagccagcctagaagtggcccagccaaggatctgcgtttatttgagctgtgcaccttgagaccttcaggcacccagggtgggcgggaccgcggaagccggctttggaccagggaggcgcgacgtccctaacgctagagaatggagggtttaggtcaagctctgggacagaggtgggagggagcgaccgaagggaaagggaccagcgactcacacacctccggaatctcacctcgcggcgccatcttcagtccccgtggcagcatacgctgccacagcggctcccggagcagcgcggcgctgccggaaacagggacgaagcggcctgggtttccggcccctctgcccgcccgcggcactctgtggtcacccggagctggacgagctcgggcctggccgcaagtggccctcgctcggatgtcccctctccagacctaagggataacggtgaccacccacgacgccgtcgtctgcaggacctcaggggtgcgggggaggaccttggaggctctcagactaccgggcgttgggcggaagtggccagttgtgatagtgttaccaggagattggcaaataggtcctactcccacgattctcttttttcaacggaagacaagaaaaggtgtgagcgacggatctctgcaaatgcagggtggagttagcattggtcttttctgcggccgatttacctaccaggtagagacacgaaggaaatagagcgtcctttccaggaacacacataaataaaatgaaacgagtcaccacgcgatccataaagtggtgcagtgggagctgagaggacaaagtgctcccaggtggaaatctaagttagtttccaagagacggcctgtgagctgggcttcaaagcctgcctgatccggatttgcagcggtaaaagcgtgttgctggccgggcttagtggctcacgcctgtaatcccagcactttgggaggccgaggtgatggatcacctgaggtcaggagttcgaaatcagcctggccaacatggcgaaaccccgtctctactaaaaatacaaaaattagccgggcgtactggcgcgcgccagtagttacagctacttgggaggctgaggtaggagaatcgctcgaacccgggaggcggaggttgcagtgagctgagatcgcgccaccgcactccagcctgggcgacagtgagactctgtctcaaaaaaaaaaaaaaacagaaaactgtgttgctgcaggcaggggagtgcaaaaagaagggttttgagaggactcaggttgacttgacttggctgttagcccgttgtcaatcagggtaaagcaggaaacagatggcacgctccaaccaggtagcctgaggaaggtgactaagctttattttatttatttcattttatttttgagacggagttttgctcttgtaacccaggctggagtgcaatggcgctatctctggtcactgcaacctccgcctcctgggttcaagcgattctccagtctcagcctcccaagtagcggggattacaggtgccccccaccacacccggctaaatatttttgcatttttagtagagacggggtttcaccatgttggccaggctggtctggaactcctgacctcaggtgacccgccccccccccccccccccccccccccccccgcctcccaaagtgctgggattacaggtgtgattaatgcccccggccaagagtgactaagctttaagcaaagtgctgtacccctggctaattgggatgtggtggggcggtaattgttacttctaggcttaaaagggaagggcctgaaacaattccctgaagctggagagtaatatgtgcatagaaggcctcccactaggaaccctcacactctaggaggctagtggataaatatagcagggacctccatttcccttctcccatctctgatctctgcttatgtctcccgctgacacaacttaactgcaagctggagggcaaggaagccctttagggtaagtaggaaagcgcagagcacagaggttaaggtggaaaggaatccagatcctgcttccccatcttcgctgcctgcaagacaagagacattagaaaagttcctgctctgagcctgatatggaaagaaagtgggccagctgcacctggcgcggtggctcacacctgtaatcccagcactttgggaggctgaggcgggtggatcacttgaggtcaggaattcaagaccagcctgaccaacatggtgaaaccccatctctactaaaaatacaaaattagccgggcatgatggcacatgcctctaatcccagctacttggggggctgaggcataagaatcgcttgaacctgggaggcggaggttgcagtgagctgagaccaagccattgcactccagcctgggcaacaagagtgaaactatgtctcaaaagaaaaacaaagaaagtgggccagctgcttgtttttgtaaataaaagttctttggagaacgtcatcatggtcacttacttacatgttattatatattgcagctttcatgctattatggcaatgttaagtagttg

SEQ ID NO: 915667 - DNA, 4001 bp, Homo sapiens
catctcaaaaaaaaaaaacaaaaaactcctacagagatccttattcagagaattgttagggatcttagtactgatctgtacaggatacactgcctgccctgacgtggagttacaactgaacctattcccctaagaatactagtgagaagaaccaagcactcttcttgcagttaggcagctgggaaggaatcatctaatatcccattctattgcccatctctagccttacagagcaacaaacaggtaaatcttgacccaatgtatgaagcagcaacttgaaacttcagagacggagtaataggatatacagatccagtctatgatagtcaacctaggttatgtacttttcttgttaatcaagttacagataccagcttgtctcataaggagtggaaatattctctggacaacacttaccaaaaaacaggcgaattacttcaattccaagataaaggaggagcatcaccacatccagtactaggttagctgttggatatggtagcaggacacctgccaatacaaaagccagagtttgcaaacagcatataacagcacccacaagaactgccacacacttgggaaaaaagaggacatcagtctcagctttccatgaactagttagtgagatgtgggcattattacagcagcaggatacataaactcacaatgcgactcaggctcattattatggtgttttactcctaactccaaaagtctctggggactccactctccaaaatgattggatgtacatgggtacacaggccactgaatagtttctaagggtcaccagtgggcttacagtggagctcagcaaagagcagtgatgtgggcagagtcagaatggagaagcccacatttctcaaactcaagaaattcttgctgaggggctgcctatggaatcatactcaaagaagccatctgatgaggaggcctgccttgcagcgacaaagaactgcagggggcagaaaagaacggaaaataagaaggttcttggtaggaattggctctgagctgaagtggggaagggatgctgtcgtcaagccccaagccttccttacctttatacagaaatatgaaaagttccagcaggaaataggtagcattataccacccgttcagaaagaacaggatttccagcggggtggaggacaaccgtttacctgaaaaaggagcacagagaagtgggatgggccggaaggcagctccctctctgctcgtatgggttggtgtctaactttggggaaactagacgctgcaactaatgggaccggccactcaggggcacttctggttgctgataatgagggggcgagggtacgggggtgggagtggagggggcttccctcctttcctaggaatcaccgtgaaactcgactcttcggcttcaggaataaaagtcaagaggtaactcgcagctgacagacatctcaaagatctcactctgtcactatttgggaggggaagttggggcgcagagaccaacagattcgcacctgagccagcctagaagtggcccagccaaggatctgcgtttatttgagctgtgcaccttgagaccttcaggcacccagggtgggcgggaccgcggaagccggctttggaccagggaggcgcgacgtccctaacgctagagaatggagggtttaggtcaagctctgggacagaggtgggagggagcgaccgaagggaaagggaccagcgactcacacacctccggaatctcacctcgcggcgccatcttcagtccccgtggcagcatacgctgccacagcggctcccggagcagcgcggcgctgccggaaacagggacgaagcggcctgggtttccggcccctctgcccgcccgcggcactctgtggtcacccggagctggacgagctcgggcctggccgcaagtggccctcgctcggatgtcccctctccagacctaagggataacggtgaccacccacgacgccgtcgtctgcaggacctcaggggtgcgggggaggaccttggaggctctcagactaccgggcgttgggcggaagtggccagttgtgatagtgttaccaggagattggcaaataggtcctactcccacgattctcttttttcaacggaagacaagaaaaggtgtgagcgacggatctctgcaaatgcagggtggagttagcattggtcttttctgcggccgatttacctaccaggtagagacacgaaggaaatagagcgtcctttccaggaacacacataaataaaatgaaacgagtcaccacgcgatccataaagtggtgcagtgggagctgagaggacaaagtgctcccaggtggaaatctaagttagtttccaagagacggcctgtgagctgggcttcaaagcctgcctgatccggatttgcagcggtaaaagcgtgttgctggccgggcttagtggctcacgcctgtaatcccagcactttgggaggccgaggtgatggatcacctgaggtcaggagttcgaaatcagcctggccaacatggcgaaaccccgtctctactaaaaatacaaaaattagccgggcgtactggcgcgcgccagtagttacagctacttgggaggctgaggtaggagaatcgctcgaacccgggaggcggaggttgcagtgagctgagatcgcgccaccgcactccagcctgggcgacagtgagactctgtctcaaaaaaaaaaaaaaacagaaaactgtgttgctgcaggcaggggagtgcaaaaagaagggttttgagaggactcaggttgacttgacttggctgttagcccgttgtcaatcagggtaaagcaggaaacagatggcacgctccaaccaggtagcctgaggaaggtgactaagctttattttatttatttcattttatttttgagacggagttttgctcttgtaacccaggctggagtgcaatggcgctatctctggtcactgcaacctccgcctcctgggttcaagcgattctccagtctcagcctcccaagtagcggggattacaggtgccccccaccacacccggctaaatatttttgcatttttagtagagacggggtttcaccatgttggccaggctggtctggaactcctgacctcaggtgacccgccccccccccccccccccccccccccccccgcctcccaaagtgctgggattacaggtgtgattaatgcccccggccaagagtgactaagctttaagcaaagtgctgtacccctggctaattgggatgtggtggggcggtaattgttacttctaggcttaaaagggaagggcctgaaacaattccctgaagctggagagtaatatgtgcatagaaggcctcccactaggaaccctcacactctaggaggctagtggataaatatagcagggacctccatttcccttctcccatctctgatctctgcttatgtctcccgctgacacaacttaactgcaagctggagggcaaggaagccctttagggtaagtaggaaagcgcagagcacagaggttaaggtggaaaggaatccagatcctgcttccccatcttcgctgcctgcaagacaagagacattagaaaagttcctgctctgagcctgatatggaaagaaagtgggccagctgcacctggcgcggtggctcacacctgtaatcccagcactttgggaggctgaggcgggtggatcacttgaggtcaggaattcaagaccagcctgaccaacatggtgaaaccccatctctactaaaaatacaaaattagccgggcatgatggcacatgcctctaatcccagctacttggggggctgaggcataagaatcgcttgaacctgggaggcggaggttgcagtgagctgagaccaagccattgcactccagcctgggcaacaagagtgaaactatgtctcaaaagaaaaacaaagaaagtgggccagctgcttgtttttgtaaataaaagttctttggagaacgtcatcatggtcacttacttacatgttattatatattgcag

SEQ ID NO: 915668 - DNA, 4001 bp, Homo sapiens
tgttagaaatgacacaagtttctagcttagttgactgagctgatggtactgctcttaagaaaacaactatttaaatttaatttgtgctattctggatattacacaaataacccagaagacttggaccaactctaacagttagaatagagggcaaatggtagttgaagctggctggcgccattagaaatgttgcccttcaatcccccttagtagcttaagagttcgtgagacattggatttatatatggtatggctttaaagtaataagataaatattcccaagctcttttaagaatggagctcataattttataagcaaactatacattttcttactaagcatagaaaagaagggctgggtatagtatagagtgctgctatagaggaagagagaacatctagtcatttttatcttatttaaatgtgagaataatatctgtgataatttcccatattagaatagctaaattattgttattgagtacaatacaataaaatataaaaacgggttcatgccatcattaaaccttctttgagaagtgatggcttggccaacccgatttcaagggtaagtccatttacttaatatctgtggcatttaaagcaggtagactggagtgaaaaaaaataatttaaatttgaacagttcagcagctgacaacaaaagcaactacagggctaatgttttccttctgtgctcaatgctgtgaggtttttctctgagagagtttgttcaaaaccttttagatgtgtgtgttcatttaatggttgtttctacataccctttcatccagctgtcagagaaaataggaataaatggactgatccctgcacaggtaacctaatggattaaaaatacggtactcatcaccaggttgatcatcatgagcgagaatactaactgccattataagatgacttataagatgacttactatctaagacaaatgtggattcctcagagggtaatgtggcctaagtgctgctgctggagggagatatctcacccatcccccgattttcacactgactcaagcccttgaaagcaacagaaaacagtgggttacaaggagtgaagtgctcctctggaagagtccttttcactttgctttatagctgttttccaaaccttcaaaaataacggggggggggggttactttcacacttttatgtttctactttaaacacttcactatcttttgaattttaaaatattagaataacgcctctacctttgtaattagataaaatgcaagcctggggaaaaaatcagttgccaagctcccaaaatgccaccgatgtagcatctgctcttaacacgttgatagaaaaaggaggatcagtaaacctaggtctcttccttgcatccctctcctggacggtgttgtgggttggaagcgctgcagagcctcggtctatccgctctctggatctcacagcactgcagcctgggaacaccccacttgaactctaagcttctccccaaccctgttgcagattcaaactggcgacaggaaaacaatgccccccatgtctcgtcttcagaatgtgcacctggccacctcccaggagctagagagggattaaggtctcggtcataagagatctgaatcaggcactgacacttccttttcttaagagcatgaaacaaaacagtccttccttctctgcctccaattaagtatttattagccgggccttgggtccagatcagcggtaagggtggtctgcgaggtccgtgcaccgccgtccgcccacgccttcttccaaccacctcagcccgaccctccacttttctcccttccccgcagccgccccgctttcctcacctctgcccccttcacctggatccactctcccccaggctctactcacacctcagattccggcgcgttccagcccacggggctctggtttacttagggcgaatcacaagtgggctttcatttaggtgatttaagattcactaatcagcgttgctctttcaacggccaacttcttcctcattagcttacgcctagcgcggctcccggcaacgccgagcgcggtgggttggctcgtcacccttcgttacgccctccgattggtcggtgcctgtcagcctttggaccgacctcagttcggttgggtagcagcggtccgagctgcactccccgcccccccgccactccactgtcaatcacaccatctctccgtaactcattgggccattggtcagtctagcctgagggcgggttgttgggcggaagagagagacttcttccggcctcactcgctgtcaccatagagattgcccatccaggcagcgaagcagcagggccaggcagctcagatctcgaactccagagaactgcacagtcatctagacatcaatgccttttccggggcctgatgaacatctcaatccccaacccactagctcgagtggggcgcaagatgtggtggacaagtcagctcaggcccggtcattaagtgtccccaacaaccctcctggagggaactgaggacgaagcaccagttgtaataacggcacgcttcatttatctttatctcgacttgttttatttggtatttaattcttccattagccttgcgaaacagacaaaggcaaagatcattctacccacgggacagactggggaagaggcccagggtccatcaagtaaaccctctgccgccaggctgctggaactggagctggcccacgctattggcagactgctgttacctaactgccaactaaagcttgccatgactttgctttgaggctatggcctgttagaccaaaagatgcatcaatcaggacaaccaaaggaagtaggacagaggctgcgtgctccaccactgaatcaagaaggggaaacaaacaataatcaataccaaattggagagctgcaccgtttgaacctttgaccttaaacaaaattttaagaaatatcatgaagcaacctattcaatcttagagcactgaatctctgatttaaggaattctcctgaatcacagctttatgaaccaaaaagaagaagatgcttgaatttcatcaactgcacgtctcaaatttattcaactttcgaggcttcatttacaatcacataaagtaaccaatgatttgttgtgcgtttagcaacttaacattacttggcccagtgagaagctctgtggctaagaaatcctttattttgatgaattcatttcactggaactgagtgttgactgcagctatgttctgttaggaactgcgaagatatacaagaaatgagatgtgactcccatcttaatagcccgtggttttgtaatgttaggtcaacaacacatgaaacaagtaggaaacactttaaagcaagatataacaatgggccaaccctattgtacaattaatttctccaaaatataataatacttcatatttgcagaacatttcgtagtttccagagcacttcttcccttgtattatttgggggatattttgttatggctggaattaatgtgtgtgtctttatcatagagctagaactaatgctgggtcctagcatatgagtaggaacaggaaaggtggaacagaatccaggaggagaaagtagtttgagcaaagaggccaaggcaagaatgagcactgagtatctggagaataatatggagacaaatgatggaaagtaatgtgtagacaagctggtcagaactggctctgagaccttaatattttggaggaaagtggtcaaaagttcaaagtttgagattggaaaagttaacttccttacacttctaatgatcatactggcttcagttaagctataaattaaaaatgggcatggctcaacagaacttgagtcctgtcctctcgcttttctccttaggcagcatgagcttcaccatttgctttaccacctccaccaactaccagtccctgcattccatccagccacacagccacagcgtccagttcatcagcagcacagccaaagtctatgcagtcctcaggggcttgggctcccggacctc

SEQ ID NO: 915669 - DNA, 4001 bp, Homo sapiens
taagaaaacaactatttaaatttaatttgtgctattctggatattacacaaataacccagaagacttggaccaactctaacagttagaatagagggcaaatggtagttgaagctggctggcgccattagaaatgttgcccttcaatcccccttagtagcttaagagttcgtgagacattggatttatatatggtatggctttaaagtaataagataaatattcccaagctcttttaagaatggagctcataattttataagcaaactatacattttcttactaagcatagaaaagaagggctgggtatagtatagagtgctgctatagaggaagagagaacatctagtcatttttatcttatttaaatgtgagaataatatctgtgataatttcccatattagaatagctaaattattgttattgagtacaatacaataaaatataaaaacgggttcatgccatcattaaaccttctttgagaagtgatggcttggccaacccgatttcaagggtaagtccatttacttaatatctgtggcatttaaagcaggtagactggagtgaaaaaaaataatttaaatttgaacagttcagcagctgacaacaaaagcaactacagggctaatgttttccttctgtgctcaatgctgtgaggtttttctctgagagagtttgttcaaaaccttttagatgtgtgtgttcatttaatggttgtttctacataccctttcatccagctgtcagagaaaataggaataaatggactgatccctgcacaggtaacctaatggattaaaaatacggtactcatcaccaggttgatcatcatgagcgagaatactaactgccattataagatgacttataagatgacttactatctaagacaaatgtggattcctcagagggtaatgtggcctaagtgctgctgctggagggagatatctcacccatcccccgattttcacactgactcaagcccttgaaagcaacagaaaacagtgggttacaaggagtgaagtgctcctctggaagagtccttttcactttgctttatagctgttttccaaaccttcaaaaataacggggggggggggttactttcacacttttatgtttctactttaaacacttcactatcttttgaattttaaaatattagaataacgcctctacctttgtaattagataaaatgcaagcctggggaaaaaatcagttgccaagctcccaaaatgccaccgatgtagcatctgctcttaacacgttgatagaaaaaggaggatcagtaaacctaggtctcttccttgcatccctctcctggacggtgttgtgggttggaagcgctgcagagcctcggtctatccgctctctggatctcacagcactgcagcctgggaacaccccacttgaactctaagcttctccccaaccctgttgcagattcaaactggcgacaggaaaacaatgccccccatgtctcgtcttcagaatgtgcacctggccacctcccaggagctagagagggattaaggtctcggtcataagagatctgaatcaggcactgacacttccttttcttaagagcatgaaacaaaacagtccttccttctctgcctccaattaagtatttattagccgggccttgggtccagatcagcggtaagggtggtctgcgaggtccgtgcaccgccgtccgcccacgccttcttccaaccacctcagcccgaccctccacttttctcccttccccgcagccgccccgctttcctcacctctgcccccttcacctggatccactctcccccaggctctactcacacctcagattccggcgcgttccagcccacggggctctggtttacttagggcgaatcacaagtgggctttcatttaggtgatttaagattcactaatcagcgttgctctttcaacggccaacttcttcctcattagcttacgcctagcgcggctcccggcaacgccgagcgcggtgggttggctcgtcacccttcgttacgccctccgattggtcggtgcctgtcagcctttggaccgacctcagttcggttgggtagcagcggtccgagctgcactccccgcccccccgccactccactgtcaatcacaccatctctccgtaactcattgggccattggtcagtctagcctgagggcgggttgttgggcggaagagagagacttcttccggcctcactcgctgtcaccatagagattgcccatccaggcagcgaagcagcagggccaggcagctcagatctcgaactccagagaactgcacagtcatctagacatcaatgccttttccggggcctgatgaacatctcaatccccaacccactagctcgagtggggcgcaagatgtggtggacaagtcagctcaggcccggtcattaagtgtccccaacaaccctcctggagggaactgaggacgaagcaccagttgtaataacggcacgcttcatttatctttatctcgacttgttttatttggtatttaattcttccattagccttgcgaaacagacaaaggcaaagatcattctacccacgggacagactggggaagaggcccagggtccatcaagtaaaccctctgccgccaggctgctggaactggagctggcccacgctattggcagactgctgttacctaactgccaactaaagcttgccatgactttgctttgaggctatggcctgttagaccaaaagatgcatcaatcaggacaaccaaaggaagtaggacagaggctgcgtgctccaccactgaatcaagaaggggaaacaaacaataatcaataccaaattggagagctgcaccgtttgaacctttgaccttaaacaaaattttaagaaatatcatgaagcaacctattcaatcttagagcactgaatctctgatttaaggaattctcctgaatcacagctttatgaaccaaaaagaagaagatgcttgaatttcatcaactgcacgtctcaaatttattcaactttcgaggcttcatttacaatcacataaagtaaccaatgatttgttgtgcgtttagcaacttaacattacttggcccagtgagaagctctgtggctaagaaatcctttattttgatgaattcatttcactggaactgagtgttgactgcagctatgttctgttaggaactgcgaagatatacaagaaatgagatgtgactcccatcttaatagcccgtggttttgtaatgttaggtcaacaacacatgaaacaagtaggaaacactttaaagcaagatataacaatgggccaaccctattgtacaattaatttctccaaaatataataatacttcatatttgcagaacatttcgtagtttccagagcacttcttcccttgtattatttgggggatattttgttatggctggaattaatgtgtgtgtctttatcatagagctagaactaatgctgggtcctagcatatgagtaggaacaggaaaggtggaacagaatccaggaggagaaagtagtttgagcaaagaggccaaggcaagaatgagcactgagtatctggagaataatatggagacaaatgatggaaagtaatgtgtagacaagctggtcagaactggctctgagaccttaatattttggaggaaagtggtcaaaagttcaaagtttgagattggaaaagttaacttccttacacttctaatgatcatactggcttcagttaagctataaattaaaaatgggcatggctcaacagaacttgagtcctgtcctctcgcttttctccttaggcagcatgagcttcaccatttgctttaccacctccaccaactaccagtccctgcattccatccagccacacagccacagcgtccagttcatcagcagcacagccaaagtctatgcagtcctcaggggcttgggctcccggacctcagtgtccttctccaccagcttctggagtggctgggggtctggaggcctggctgca

SEQ ID NO: 915670 - DNA, 4001 bp, Homo sapiens
gctctcgttgggtcacgcctttcccattcctgaagaataagcggagtgcttcctgcagccgaagactccatgcccaagtgcctgtaatcccccccctcaaggccctgtttatgttgggagtcttagttttcctttcgttggggggtgggggggaaacataatgacaggcccccctccacctcttcctgcagctgtttttgtaccaaaatattatattactgtcttcatcttagtagtgagtttttgatgttaaagtacaactagataggaggaaggagtgaaggctaagcagacatggactgaaacttagaggtactgttaggcagctgccctagggatgactgctcctttatttgttgttaatgaatcttgacctccttgtgtgaccctggttgttactccattctaagattggcgtttttttttgtttttttttttgtaaatagagacaaggtctcgctatgttgcccagcctgggctcgagcagtgctcctgcctcaccctcccaaagtgctgggattacaacaggtgtgaaccaacacacctggctccccaaggttcagtttttatcctcctcttggagaggtgagtgacttgaggtcatttcttcacaagctccggtaggcacccacagtattgtcaaagagttttgtgttagggaagtgtccagttttgtccaagaggaaatagaagcgtcggcctttgactttcagaggtagcatggcagggacttcaccccggtgggccatgcaagatacctgcttcaaaggaactgtgaaatgggcccccaagccaaagggggcatgagtggtgagggtcacctgctgccctccagctcgaagcaccactgagcgcacagaccggagagagaagagaagaccagcaccgagtacgagggctcctgcaggcagggcagagattggggtgaggggttttcactgggcatctaagtaccgacctttccagtgccctctgaataagaaatttgtgggatgaaagtagtatttactgagcgcttttttttttgagactgagtctcactctgccggccaggctggagtgcagtactgagctcctgttatacccagtaatcttgttattcctcccaacaaccttaatagatgtccgtttccattttaatgggaagatggagagctttaaggaccttgctcaaggtcgcagagtgaagggcagccctcagcctaggctatgacagggcacggcgctcggagacatcactgtttcccaatttttttttttgagaggggagtctcgctcggtcgcttaggctggagtgcagtggcgtcatctcggctcactgcaacctccgcctcccaggttcaattgattctcctgcctcagcctcccgagtagctgggactacaggcgcttgctaccacgcccagctaattttttgtatttttagtagacacagggtttgacggtgttagccaggatggtctggatgtcctgacctagtgatccgcccgcctccggcctcccagcatttgagccgccgcgcccggccagtgtttcacatttctgtggggtaaagcccgcccgccactctcggatagggagtccctgactctccctgcctgtatagggaaggtcgtgtcccgccaccccacgttgtcacagtgggaagccagcccacgtcttaccgatggcgccgcagccgacggccagaccgtagcgccagagcgcggagcgcaggtcgaaggggccacgatttgggacctccgcatccagaggctgcaccggaaccgggggccgggacacggctgccacagccatggaagcccagaagacgccctggcccgcgcagaacagcccgaggatggtgaagaagcggccccgatcatgctcaaagagcagcacatcccgttgcagcgtcgtgccttgcaggggccggcaggtgagcaggggccgcagcacggctagcagccccgtgggccatcgcctccaaggcgccgccatggccagccgacttccggggtggggcttcctgccgcagagccgccttccgccctccctgggcgcccccgctagagggcccgcccccctcgctcagggctgggaggagacaaccaatccagcacgcagaacacgaaatacaacatcactctttatattaaaaagtgcagaacacgaaatacaacatcactctttatattaaaaagtaaggaggtcctggggttaagtacacaaagcacctaagtccttcgggtagtttagtgtcagttctacaaagtaagctttggcttcctggcaccagtgaggctcaatcttctgaagtcttccagaaggcaggcgaggagagggatcaggcagccctccctccctcggtcacagtcacggggcggcctcgggccagacaggaggagatgacagacgacaaccagacggtaatatccaaggactatttacaggggggactgcttctgaggcatgactacgatcacttcatgaatgccacttctgggatctcgcccttggcctggagaaaaatgaaggtcagtagaggtaggcctaccctcgccactcagcaaccccactcagctaacctgacctcctggaggcccagagatcctagtctttttgccactgtatttccagaccttaccttgagatgagtgaaggcctgggcagatctggtgtagtcccagttgttgtcctgaaggcacctggagtggaagaacaggcagctctgtaagaactctgactcgtaaatgccagctgaaagtccactccataaaagcacccaagtttgccaacaaatatgtacattcttatacatccttgcactatttatacaaatgagacattagtaaaagtccagatgttctaccaatggcttctcaaagataaggaatattaaatagctgtcaagaagctcaagatagtttttacagtggtagggaaagatgttcatggtgtaagtaaagaaactaagttgcagaacagtatatgaaaaggaacttccattttacctttaaagttttttatgttaatttatacacaggcaaattttttatagactatcaggtttgtgtttttctgtttgctttttttttttttttgagaccgagtcttgctctgtcaccaggctggagtgcagtggcgtgatctcggctcactgcaacctccgccttccaggttcaagcaattctcctgcctcagcctcccgagtagttgggactacaggcgtggaacgccaagccccgctaatttttgtatttttagtagagacgagatttcaccatgttgtccaggatggtcttgatctcttgacctcgtgatctggccgcctcagcctcccaaagtgctgggattacaggtgtgagccacctctcccagccaactattaggtttttttaagcagccaaaagttttgccttttaaaatttcaggagcccaggcacagtaactcacacctataaccgcagcactttgggaggcctaggtgggcaacatggtgaaaccccatctctgcaaagaaatacaaaaaaattagccaggtgctgtggcctatgcctgtagtcccagctactcaggtggctgaggtgggagaatcacctgagccctagcagttgaggctgcagtgaactgtgatcacaccactgtactccagcctgggcatcagagtgagaccctgtctcaaaacaaacaagcaaataaaaatttggctgggtgcagtgcctcatgcctgtaatcccagcactttgggaggccgaggtaggcagatcacaaggtcaggagttcgagaccagcctggccaacatgatgaaagcccgtctctactaaaaaaaaaaaaaaaaaaaaaaaatacaaaaattagccaggcatggtggtgtgtgcctgtaatcccagctactcgggaggctgagattggagaattgcttgaacccgggaggcagaggttacaatgagccaagatcgcaccactgcactccagcctgggcaacatagcaagactccacctccaaaaaaaaaaaata

SEQ ID NO: 915671 - DNA, 4001 bp, Homo sapiens
gagacttcggtttcggtagatggccatctagcatcagatgttgtttctctctgccctcaaactgccttgacactacactgtactcccaaggtcactgttcctctccacagaggctgagcattctgtctcagacacccaccttggtcatgactttggtggttatctctgccccaaagcggggagggtgtgaaaggcaaataaaaggcggagatggggagctaccctctgaggccaggcacagcagacatctcacataggcctgacctcccactcttcttggaggaactgtcatcagagaatgaatccaggtgagctgcagccttttaaaatgcaaggtttggcacttttccctctattctcatctttttacccttccctctgtcggggatggattggttcttaacacccttcaggggccctggagacactcaccacagacagacaagaagaaaacatttaagtaagcagtatacatgatccaggtgatcctataactagagaagtgcatggattgaccttgcttcagcttattgtgatatagtatgagtgcccagagcagagagatacctgatgtccagacaaaaaaaaaaaaaaaaaaagaaaaagaaaaaagtcccttctgaggaactttggctccttgatgcaagtcttcattccatatacacttgacttcccaacccccacccggtccaactacaccttgcccaaagactgatcctgatcctgcttttatggtagatctaactcagaagctacatatatatatatatagttttcagagactgcagcctgaacccacccatcaaagtacacctacaagcttgtgttaggggagccaggaagttacctgagaagaaactgaggatggtagtgaagagttgtatatatttattttgaggaatcagataggtgaatttcatacccaggattaagttaaggaggaaggaaaggccaaggctcgacgtcatcataatcctgaccactttcaggtcatctgttggaaagcaaaagctgttttgagaggacagatatttcttctagactcatttctacctggggtccagaagtctctaggtgaaaattggaatagggtgaaagatttgattaaacaataagaaagaagttggaaaataacaagcaggggaaccttaagctgaataagagaaccaaaaacattttctctatcctgatgtctctctatgtgtctttctcttctattattttcttcaaactctattcttgttaaataccgcaattcactccatcatctagtggcaatacagattacttaatgccagttacgtttctttcttacccacatgtctagttgtgtggatcaccctgctgctactgctgagacttctcaaatgcccagcagttaaggctgtgaacatataaacttttctccagaacacctaaatggtgagattttggaatctgccttgactgtattgactatggaaggaaggaagaacactgcaacttgagaagctgcaccagaaaataatgggtacactggtgagattaatgcaagttaaggaaagccaagttaaggacacacccttcctttccacccgtctctttctagagtacagttctgaccttctggccaaagagcagggcaacacatcatccaaggactgtggttcatcttggctctttcatcttctgaaatcaattcaacccatttatctaaggtgattcccatcaccattaagactacggcccaggaggagaaaagtatgttcataccctggatacttctatttgaaacatgcaccattgtgagtgaaaatttctagctggaaccaccaccactattttgtagatctcttccttgatttgattagttacaagaagggtgatatctgaactttcagtggttgctgaggcattggtaacagcagaagctgaagtagtctataaaacagagaagatagataactctcacccttcctcacttccgttatctatcagggccagcctgctgtcaggactgccaactgccatggaatcatctattggtttgacccttgaccctggggcctagtggagtgaaagaaccaaggggtccagaagtcctgagagagctatcagatatagggatctgacatcacatgtagaaagagctgtcacatacagggatcattagaggccttgaattaagttagacgtgcatgactaaagaggtccaatttaggagttagaattacacgctccaagattagttaacattttgtaggggccagtgaagaggaaaaggatttcaagatcattgagataaatagttagctagctagtatcacaacagggaatgaccactcaaaatttaggatgtttgaagaaatgtgtgttcccattgggaggtcccagtgacatttagttagggagtcatccaggaaataaaccatcatcctgaaaccaaactactggcctgatagatacactgagccattatagcccaatctcatttataaggcatggacaatcatttcttgacagaattgcctctaacttggcatataaaacagttttcgattccttgagtaggcaaacatggtaggcctcagagtcaagagctagaggacttctgctacaatccaaaaaaaaaaaaaaaatttgccttttacacaactaagatgaacttcatctccaaaggcctcactctgcgtattttctgacctcaatgcaggtgactttccttggctcaaaatagacttttttttattacctcaaacatgtcaagctgtctttcttctagatctctctacacatctttgtatactttattattattatttatcgttttcatttttaagcacaatactcaacaatacacttaatcttatgaggaaggctttagggttaagaaaacggactaaggatcctggttttaaattgtagctctaccactcagtagctgtgtggtcttagagataataatgcttcctactacctagggattttgtaaagattaaatacgtttagagacataaagcacttgaaagagtccttggcacatagtatatgatctgtcagcaattaccatagtattaatttgggttttctgggaaaaggctctgaggcaggaatttgtatccagggagtttttttgtgaagcacttttgggaaccacacctgtaattgtttaagggaagcaggtttgagcagaagttgaactgaggtgtgggtgcaacagaagaagccctggctgaccccacgaggtgctctggctctggggtggtccttcagagtcattctttatagaggcaagaatgcctagcctttacactgagcatctggctgcccctagggtgtgatttcccttctttctcaagagatattcctaaatctcctagaaactgcaagccacagcagctaacacttctggtagctgtggggatgaactcccacccttcaccaatcccatatcagggtcagcttgtttttagggttgccagctgccatgaaattaactattggtttgacccttgaccctggggcctaggggagtggggggaccaagagggtatatgggaaactcctattatgctctttcatgttgataattttatttctatgccatcgattcttaagagtagaattcctgtgctgaaaggcttttgtttcattttggttttaactggtagtggcagtaaagatttaaagatgtagccaaattagagaaagagataggatgtgaaggatgagtaagatacatgtcaaaaagaaatcaagtttttagctagggagaactagtcaaagattccattccagatggcattccagctgccattccacctgccattccagctagtcaaaggtgccatatagtaagcactggtctggttaagctgaaggtgcttagaacaggcaatatacagaaaaaatttacttctggaacttgacaggagattagagggttatcaaccttgaatgagattgggtgcattcagggagtaatagacaacgggttatcagacttgagatagcaattgaaa

SEQ ID NO: 915672 - DNA, 4001 bp, Homo sapiens
tgcgcatccagcaccaggaagtcagaggtgttgacagtcactggcccatcctggtcgatccaggtgacattggccggcgggttggcacgcaccagggcaaacaggacaaccaggaggcctgggccctgagcttcctggtacttggcgccgacttgggcaatctctggcttgactggtacaaagcagaggccaatatgctctcaccacagcccctcatacttctagccctttcttcccaaacccagatgggagccaggggcctgggcctctcctcagaggggatgctgaggaacaggatggctgggtctgccagagaggcagcatttcggagtgattatgagtgtaaatactagagccaaatgcccagatgtgaatcctggctctgcttcttaccagcgggatcatcaccctgggcagattgcttacctctttctgcctcagttttcttatttgtaaaatggtgacgacaatagtaatgacctcatggggttactcagaggatcaaatgagttcatatttgcaaagtgcttaagtgtctgctaaatgtcctgcggaccacctgcctggtgggtgctgggggtccctgggcaaagaacctatctccctgcccacctcagggccactcacattgcacattaaggatgacagaggcgttggctgatcggccacttctggggtcctgcagagagcagttgagctcatgctgggcccgatgggcagtgacagtgaaggtgctggtgcctccagagaaggcctcccctcccacgctcagcagtcttgaggtgctggcctcctgcagctgtccatccagataccaggccaatctgggggtgccaggcccccctgccacccggcaggtgaaggcgtggcgttcattctcccgaagtgcccgctcagcccaggtctgaccatctatttgtggctccaactccccccaacctggaacacagcaggaggcctctgggaagggctcaggcacggttggtactgtgctgtgaccaggaattggcccagtgagaagagcagcaggccaaaggaaagggcacctgagtcctctcaccagggactggctggttggacctagggtaggtgggtgaaggggacagggactccagggcttggggcctggagtgggtacccaaacagaagtgcagacaggggagagagggggctttggaacccagaaggacttggtcaacgactgaacaggggtgtacctgagctcagaagggctggcaggagcagcagtgtgtgccggagggcggctgggcctggaggcagcgccatggtggcccgggcctaggccctaggctgctgagagaagggggcgggcctgtcagccaggtgacagcaggcaggcctagcaattgctccaggaatttactctccagaaacaaaaagaaccatgtacggaaacgcaaatgtagaccagcccccagtggcgaaggcacggacacgaacggcaaagcccaaaggcacagacccacccagcagacacatggacatcctgcaggcgcagaagcgagcactgactccaggctacaatacaaagaggcacacacccgcagatacgcagaagcaacgagcatccgtgcaaccacaccttgcacacacgcacactcacacacatactccacgcgcccctcccccaaagggatcgcctttctcctaatcctattctctctcctgccctgttcccatcctctctcctgccctgttctctctcccatccctcgccctacgccccctttcctgatgttggtggctccggtggatgtcggcggaagaggagagggtcggagggtggggtcgccgagcatcccgcccccgccccccgccaccggggcggctcacctggctccctccccgagcgccgccggagcaactgctcaggtctgatgagcaccgcagtccgctgcaggggcgggggctgcgccaggcggggccaatcgatgcccgaccacgggcccgaggggcccttacccggcaggtgggcggccgcggctcaccaccccccggctggtccccagcccgcgccgagtacccccgagtgcccttctctccgggcgcgggcaggacgcaggagcaggcggagtcggtgaggcccgacggctttattggttcagggcccagtcccgtcccctcgcccgcggacgcccgggtccgcggcgctcagcggctgtcacgggggcggcgcagctgccccatcatgtcggccagcatgcggttgcacagcgcggcgtaggggttgagcagcaccagctggcgccgcgcgaaggggctgcccagccgtgccgccctctcgaagtccctgcgggcgtcgtcgtctcggccctgcagccgcgccaggagtccgcgctgcacaaagctctggcgggcggcgcggccccggccgccgctcagctccaccgcgcgttccagatcctccagggcgcctgcgggaccgacgagacgggcggggcgggggtcagcggaggccagggcggccttgcccgagccccagcccacctgcggccgcgcggatcaccgtggttcttgcggctcccgggcgtggccatttacaacccgcctcgcacctgctagaggtacggatcgttattcccattacacagatgaagactgtggaagagttaagctctacagccaagccacttagtggcagagctgggactgaagtccaggtctcgccttgttcctattattttccaccgctaatacacgaaaacatgaacgttgcaggattctgaatggccactatgtttatgagtctggcccactgcccgggcaagtagcagccaatttattccacacctgttattaagcatccactatgtgccaggtgactgactctgaatgtcagggttcaaaaaataatattaaccgcacaatcatttcttacaagtacaatcaagacagtttctcattgttttccttttgagggccgttttctcttttccattgctttctttagaacaccttctctctcccctgtatcctggactgattgcctttcatcattctttggttatctccatgtatctaatttccttggtcctggagccagagctggcctgcaccatttttattgttattattctcataaaatacttgggttgggcctcagaactctgaactcagaacttcaggcagccagccaccttcttaaagtccaccaggctggcttctttcgggctctgcttcaattcactcatgttctctagtcccccaaagagcctgagcctccggagaagcgctcagaatgcagtactccttggtttccctcggaggagctggtctggaggaatctccagttggaatcaccactgcatctctctggggttttggtctgcaggctgtctccagtgatctggggcagataagcctggataaggggctcctgggaggttcccattgttcctggagtggactcaaaactccctagcctggcattgctggttctgggagcacctgtgtcaccactgctcctaacagtcaagtagtactaggtttccgtggtttataccttcacattagcctcatctttggtccccagcatggtcccattgtcttcacttaattagaataacctgaatgcagcaggagttttggacctctacagactgtaccttctccacccaccaactaactcccactcatccttcaaaactcgcccttcaggaacaggtcccacgctgacccctctcgaacttgttttgctggtctcagaattatgtgtctgccctgcctcctggactgggagcttttcgaggagcagtatcatgtggggattaagagcacacactcgagccctaccacctggttgacatcccagctctgctgctgcctgactgtatgatagtgggcaagttacttagcctcttcatgcttcagtttcttcatctataaactggggataacaatagtacatactttttagggttgttgtgaggattgatttactagtttgtatgtaaagtgattaatgcctggtacatagtgac

SEQ ID NO: 915673 - DNA, 4001 bp, Homo sapiens
aaagagatcagagctatcaaagaatcccacgatttcagcctggagagaacatgcggttatcaaggagcctggtgctgccgtgaaacagaggctgattttagcccggaaatgtagctgcagatcaatggcccttattagcattttctgaggccaataatctgaccactatgaaaacgtgactaaaggtacgaactctctgcctgagaaaaaccacatacaagaaaaagtttgcctacaatttccggagctttgtggaccagtgtctatagacaccaagctgagaacccccgctataagtcactgactggtggtacccagatctcaatatcttttttttttgacggagtctcattttttggacggcgtctcactctgtcgcccgggctggagggcagtggcacgatctcggctcactgcaacctctgcctcccgggttctagagattctcatacctcagcctctcgagtagctgggactataggattacaggtgcgcaccaccacatctaatttttgtatttttagtagagatggggttttgccatgctggccaggatggtcttgaattcctgacctcaggtgatctgcctgcctcggcctcccaaagtactgagattacaggtgtgagttgccgcgcccaggctcaatttttttttttttccagacagtcttgctctatcgcccaggctggagtgcctggagtgcagtggtgccaactcggctcactgcaagctccgccttctgggttcaagtgattatcctgcctcagcctcccgagcagctgggattacaggcgtgaaccaccatgcccggctaattttttgtatttttaggagagacagggtttcaccttgctggccaggctggtcttgaacttctgacctcctgatccgctcgcctcagcctcccaaagtgctgggattacaggagtgaaccaccgcgcctggccctcaatttctaattcagtattttcctcactacctatgctattatggaatcttgtgagctatggtcaagacattcaagttctggttctgagtaatctgagtctgagtaaagcgactgtaatatctatttcacagaactgaaaaataagaaagatgatgaatcaaagcatctagtgcctagcagggagtattttgctcaacaggtatttgcttccttcctaaggctgtagggaagatgatgagataatgtcttttatgaaagagggctgtaaacgtaaagatctgtacaaatgttaacttcattgtcaccggtcagccaatgcttctaaaatccagaacataacaactctagagaagtaaactgcccccattgttctgagacactggaattcaattcagtaaacaatcacggcccccttcccccaaaatgataaagacaatcactgccatttattgagcttccaattacgggccctctgtttggcactgagaatacaaagatgaatagacatcatcccagagctagatgcgcgtcagacggtggtcactaggaggcgtggccgaaaacaaagaagtccatggaacgtggccagagatctgtacagaggctgtgggcgctcctaggaaagtctggccaagtgcctgagagttggaagtgcttcaccaataaacatttgcccagggcattgtaggatgggcacgggttcggcagaagaactttccaaataaagataacacaccaccgataacagagatatacaaactggaaggtattcaaaattcgccccacgcctctcgcccttagaaatcgcgagctgagaaacctaaggagttcatggcaaggggcttcccccttccccacccttcagcccaagccggaggttccaggagcgtctagccctctggatctccggcgtctgaggagataagcgcggtgtgggtcagaccccgaggggtcctcgcatctccgtctggaactcccctcaacgctctcaccattttgccccgcgaaggctaatccgccgctccgccaccggaagaacacgtcggcaggagcaggcgcctagcacaaccggaaaaggaagtgcctccggcgcaagtggcattgagggacttgtagtcctgcgatttcgggtgtagagggagcaggggcctgcggggacctggtgtgggtggagtggggacaagcggtggagaagggtacgccagggtcgctgagagactctgttctccctggagggactggttgccatgagagcagccgtctgaggggacgcagcctgcactacgcgccccaagaggctgtgcgtggcgagcaggtcacgtgacgggagcgcgggctttggaaggcggctgaacgtcaggccacccgccgctaagctgagaagggagagcgagcttaggaccgcctgcccggggcaaccccgaaccaagctttagccgccgaggccgcgtgtcccaaaggccaggtgagaccccatgggaagcgcctccgggagcgacggggtccgcttggcgctgggggccgtggggagccggggtctggagtgcgcgggattcgcagtcaagaggtcccgccacttttccccctgtgagccttgggccagtcgcgtaagctccgagcctctctttcctccattgtagaaaagcggtaataagttccaccttatggggtcgtgttgtatttttcctaagaccttggacgagaaacatttctgacacttgagttgtttaggcccctttcctgcctacctgtctgtgggacgccgtgaggggatcaagggctacatggtctggtcctcagtccacactccagcagcgcggccggcttgaggcaagagccgaagggttgaacaggcctggagaggggacattagaggtttctgtctgttgtctcagttaaccctggcagcagccctgagagacaggcatggtaatcgttcttcttctgtagacgagaaaataaacctcagtggcttggtaatgtcacacggatggtaaatgccgcgcctagattcaaggccagagcttttgccgctgcagttcacaggggaattattcatattaatcaaatgaataattcattgtcaattaattattaattgattaataatccagggatggacctggaaggacgcgtgagaggatggcgagaggagggcacagctaaggaaaagtgggaaaaggcgggccttattccagctttctgttgagatcccagaatgtagggttaggttgggaaccagaacatgaaagatcgtgatgccatgctgaagtgtttggactgaattagaaggaagaattgaacagtcattgatgctctagaaagaaccctgtgaagaaagagtgggaacaatgaaaaggcctgatggagtctttcgtttcttctttctcttttcttttgtcttcttttcttttcttgacagggtcttgctctgttgcccaggctggagtgtggtggcacaatcatagctcactgtagcctggaactcctgggctcatgtgatcctcccaccacggcctcccaaagtgctgggattactgcccagagcctctgtgcctggccccagtagaatatttcttggagtattggacacataccaacagtgggcacaagatgagttttttatttttttgagacggagtctcactctcttgctaggctggagtgcagcggcacaatctcggctcactgcattctctgcctcctgggttcaagcgattctcctgcctcagcctcccgagtagctgggattacaggtgcacaccaccacacccagctaattttttttttttttgtatttttagtagagacagggtttcaccgtgttggccaggatggcaagatgattttaaattgcaccccctaaaaatcctttttaatagttatacatttaatacatattaaaatataactaatagaacacaaatattattgcttatgagttttccagtttagttttttaaaaaaaattctaagtgaatgaaagtacgggttttagttggaagtagcaaaaatcgtgagggtgatttgggaaacactgctatctgggaa

SEQ ID NO: 915674 - DNA, 4001 bp, Homo sapiens
ggaagagggtggaatggtttgtatagggggagcttgaggatccagagacccacccggaggaacctttccttaatccaggcacagccattacctcctcacaattctgagatgttctgtcagactgaggagagcaggtgatccccctagccctccccaaagcggccagttttcctgagtctattgatgctagtggctccaccctgtagcccctaggaaggtgtatgatacgcgggatgatgaccggacaccaggcctccatggagactgtgacgatgacaagtaccgacgtcggccggccttgggttggctggcccggctgctaaggtacacagggtcaggcagggcggaatgccaggaaggggtggagagggaatgggagccagaggtcctggaagggatggtttcatgacaaaaggggcttgttctggggagtaacagtacctggtgctggggctgtgcagagaggccttggctgtgcagcagaagctgtgttttgcttctctctgggactgtctctatgcctcctacacaggaggtttgaactcaggctctttgaggccccttcccgatctgacaccccctaatctttgtaattctccccgacgtctgacacactgtggtttccagaatacagtcgtgcgcctcagctggtttgagctgcacaataacgccctatggtggcaggtgcaggagtgatcatccctgaggcacagacgaggagatggaggctcaggaatgggtggtgaccagggcttctctccagccgcgggggccaccagggactggggcctgacctgattttcccctcatccccccaggagccgggctgggtctcggaagcggccgctgaccctgctccagcgggcggggctgctgctactcttgggactgctgggcttcctggccctccttgccctcatgtctcgcctaggccgggccgcagctgacagcgatcccaacctggacccactcatgaaccctcacatccgcgtgggcccctcctgagcccccttgcttgtggctaggccagcctaggatgtgggttctgtggaggagaggcggggtaatggggaggctgagggcacctcttcactgcccctctccctcaagcctaagacactaagaccccagacccaaagccaagtccaccagagtggctgcaggccaggcctggagtccccgtgggtcaagcatttgtcttgacttgctttcctcccgggtctccagcctccgacccctcgccccatgaaggagctggcaggtggaaataaacaacaactttattaaaacacccgaggcagccttttgcttccccctccttagccctgttccgactccccaggcctcagtggtgctcctcccggtactcgatggccagaaactccaaggacaggcggttgaagaacatggctccgttgagcactgggcgggggacagagccccccatgagccccagtacccttccctggctactccttgccacatctcagggttccaaagctccccgctccctcttgcaccctcccactcctgccactcactcaggatggtcagggcggagaagcagacgtacttgttttctgtcatctcagcatagagtgaccccatggcagcccagcagatgctgatcacctgggagaactgtaggcccatccagtgggagagtggccccctcgcacaacagtggggtttccatcagcccctcgggtctcccacagccagcccttgcgtccctgccctgagcctaccatcaggacgaccgtgtagtgaaagctcatgtggtcatagtggtaggtgatgcagaagttgtgcacgtctctgatgaagatgcccaggtgtaagaagaagagcatcagcgcagccgtggtgagcatcatgccttttgggaagaagaacgtggcgatgcggtcttgcagccacatcttgcccgcagtgtagatgcaagtcagacttgagagctggagcaagcaggccctgcccaggaaaagcagcagagtctctggttctaaagtgcctggtatggaatagcagtgggattctagaaccaggaggacagtggaggggacaagattctagaacacaggctgattccagccaacacaggagtgcctcacgggtggtaggggtgctttgaattgtgagatcagtgggggcccatggcaatggcgaaggggcagcagccctagttatcccatactcactctagacgcttttatgcatgtctcaagtttcccaaaacggaggcagtgtgaacacagtctacagatgaagaactggggctcagaaaagttgaggggcgtggtctagatttacagcaagtcttaggcagatgagagatgaggacccagctgcatagctggaaggcattcccaggtgaggggaggcctgtatttgctctaccctctggtggagaggaattacgagaagggaaggatcaacagattcttcagagctgtcccgggaccttccccgtgcccttcccaggtgtggcccagaaggcacctggcttttccattctctcccaagatgttcttacaggacctgatgctggtcagctttctgctccgccaccttcaggtgcttggagcattttcacctctgtcagtctaagagtcccatgagacagctggggctggtggcataagtcctatttgacacttgagtctgaggcagagggaggatggtcttcctcaagctgttatagccagtgagggagagagtcaatactgaaacgaagatccgatactacctgaggctgtgctgagtgagcagggtcacatgcaagccaggaggaagaaatctcctccatgcatgtgagagatgagaactaggctgggtgcggtagctcacacctgcaaccccagcactttcagaggcccaggtgggaggactgtcttgggccaggagttcaagaccagcttgggagacagcaagaccccatctctctcttttttgagatgtagtttcactcttgttgcccaggctggagtgcgatggcgcgatctcggctcaccgcaacctccgcctcctggattcaagcgattctcctacctcagcctcccaagtaggattacaggcatgtgccaccacgcacagctaattttgtatttttagtagagacagggtttctccatgttggtcaggctggtcttgaactcccaacctcaggtgatccgcctgccttggcctcccaaagtgctgggattacaggtgtgagccaccgctcctggccagcaagaccccatctctaaaaaaaaaaaaaaaaaaatttgctgagtgtggtggtgtgtgcctttagtcccagctactcaggaggctgagatgggaggattgctggaccccaggagtcccaggctgcagtgaactatgatcatgccactgtactccaagctgggtgacagagaaaaaaagaaaagaaaagaaaaaggtgagaactccagggccgtcaacaaaatatgccaataaaacagccagaaatggtgtggagtgacatgaaagctcccagggattgaagcaggagaagaggagggaggaggagaggacttgatttcgaactcagccaccccactgcctcctgcccaactgtttgccccaaaagttaggtcccaggtcagcccaagacccacaggctgcctcccagcagtgggattagagcctgcacccaccatctgtgcttgctgcccagtctccagacaagcacaatagttcttcagagccccatcctaaccacatgaaaggggtaatgccccaaggcccagctgtggtcccactgttgaaacaattgtttggacctcagtcctcatttgaatacaaatgaacttttatacattaaagttcctagctcctaattttattttatttttgagacagagtctcactctatcgcgcagactggagtgcagtggcatgatctcggcccactgcaacctccgcctcccgggttcaagtgattctcatgcctcagtctcccaagtagccaggattacaggcgcctgccacca

SEQ ID NO: 915675 - DNA, 4001 bp, Homo sapiens
tggtgggcgcctgtagtcccagctactcgggaggctgaggcaggagaatggcgtgaacccaggaggcggagcttgcagtgagccaagattgcgccactgcactccagcctgggtgacagaccgagactccgtctcaaaaaaaaaaaaaaaaaaaagaataattgtgttgaatgttttgttgtaatgataaaataagattaaaaagtaagagcactttggaagtttcaaggttttattttttgaatagctttaggtaaaaatcatgaatacaactggctgctacctcaaatgagatgtcaatttttagggatgccctatctggaacactttttcaggaaacccagaccttggaatattgtcaccctcagtagtagagtcttcaaaacaatctttcttttattcagagctgatttatacattaacaacgattcatttctcagtttttgaaattatatgaagtcacctggatccagtgtatataagctggaaaaatacccaaaaacataaggctgacagagccaaattagactgttggagacattttaaattatttgaaaatacattaacattttctactacatactcttagaagttctcctagccatcactggtggtggaacacacctatgtgagctacagacaaacttgttaggatcactttaagtttatgagctttaaaatcatttaaagaacgattccaggccaacacggaatcaaagtatttagtttctacgtacagttttttccttaaaacaatatttaaagccgtgagattctgcaattatagaggcagtaggaataaagagaaaacaaaaaccaaaaataaagccgtgagaaatgtcaggatgatgtagtggggaaataaactttagaatgagtgaccttagctgtaactaagtaattgctaatatttatttagcccccacttcatatccaagcattgctctaaatcttttacgtgaattatttcgtttaacccacgcaccacctattaagtagatattattattatccccatttcacagttcagacactgagctttttttgaaagttaccaagtccaaggttccaagtaaacagtagggcagggactcaagcccaggtgtactgccacctggaagtattaagtcctcgctcctaactactacttcactgatctggctttatgactttataagtcatatacccacactgggcctcagtttcttcatctgtaaaaacaacgcagcgaatgccacagtacagctccttccagctctgcctagcgtcgttatcatcaaccttacaatctacctgagcgtcaacaagccagtgtcatcccttcttttaaatgaattctactcaaacagcatttacaacgcacctactcggcgtccggccttgtgctgcgcgagcgcccaagcccaactcccccacggtctctgctcccgccgcggcgccagcaggcccccctctttccccgcgactctccgagaatagcgggggtccttttccccacccgacacacagaagcctcgggccacccccagctctgctccccgggcccactcacccttctggtggtctctgctgccaggcgccgcgagaccccgcgtccccgctgccccgtcccccacgggggtcgtgtggtgagcgcccaactgcgatcgttcggcgactctgcctttcgccatggctgctgcaaggtgaagggagcggtgcggtgccgcgccccctaaacaacaaaactctgttgcaggctccttactacgccgaagcgccacggctagagccacttccggcgcgacctcctcacccgagacgacctcagcccagcgagtactgcaacctcctgcaaacacccgcagcgcccaccacaggctaaaccccgccccgtgccgcccccgagcctcgcgtgctcgcgccggcccagtaaccgcgagacaagtcagggtcctggaccgcccccttcagtgccccgccccggcccgcccgcgggaaagaggtggccgccgggcgctggggcgagagcatgcgcagtcgcggcactcgagtcacccggctgcgactcgctggccctggcgtctaaagcgtagccttaattacccggaagtgcggtcccagggacttcaaaccttttgtccaggccgccggaggtgcctgtgattagtcggcatttcgcggctgaggctgattcagcccattacatcaattccgcagctgctgtcttcaatttggaggcgccagagagtgcttgatctaaaagatggtgggaaatacaaaggttgagcaaaacctacctgaatttcaggaaactaaggctcagagagggctacgtacaacctgtgaagatcacaggatggcaaaaatgggcttagaatccaggttgtcctgttcccaaagctaacggttttgcattagctgctgccccttactactaaacccaagtcagctctacatttagcttatccctaagctaagcggaaacatgccttttccacaggtaactttttctgcttctacccctcagagcacattcagcttactcaccgtggttacctcttgaaagcaacttagaggccggtcgcggtggctcaagcctgtaatcccaacactttgggaggccaaggcgggcggatcatttgagaccaggagtgtgaggccagactggccaaaatggtgagatgagaccccgtctctgctaaaaatacaaaaatgagctggacatgatggcttgtaatcccagctactcgagagtgtgagtcaggagaatcgcttgaaccccggaggctgaggttgcggtgagaaattgcaccgctgcactccagcatagaccacaaagcaagactccgtcccaaaaaaaaaaaaaaaaaatcctgattgtttctattcagtaattacatttgtaggaaattattccatgaaaataaacataaataattcctctgtattagtataacagtgaaaaactaaaagcaatataaaaatccaacactaaataaaaatggttaagtaaattatgggaaacccattcaattgaactgttttatgtacacatcctttgcctacttctggctcccattttatttccttcatagtcattaaaagcaattaattctgtgaactatttgtttacttgtttattgtctgcctccacctttagaatataagctttaaggcaggggctttgtctttttgttttttgtttttttaagtgatgggaatctcactatattgtccaggctggatctgaacttctggactcaagggatcctcaagcatcagccctctgagtagctgggactacaggctccatgctatggctcccagctgggctttgtctttttgatcaccattgtatccccggtagctgacagagtgccaatacctaagtggccattcaatgaatttgttgaataatttttttttttgagatggtgcccagccgaataaattttcaatcttaggaaattatatttatgggccaggtgccatggcttacacctgtaatttcagcactttgggagaccaaggtgggcggatcaccttgaggtcgggagttcaagtcaaaaaaaaaaaaaagaaaacattttatatattttactatgcaaacattaaaaattgaagtacaacaaaaactaaaaacaaacactgagaagtatttgacacataagaattactacaaatcagtaaggaaagcacaactcaacagaaaaatgggcaaagaatatgaattatcaacacacagaagaaaaaattaaatgtgcttaagacatctgagtgcgcagtgggaaagccaactccaaaacttaggaaattccaaaaaattaggaaaagatgaacaacctcagtgcagtgtgataagagtgactgaggggtgcgcagattgcaatagcagaagagaggaatatctaaattacagtggggctgtaaagtctcccaggaagcaggattaaaactgatttttagaggatgaataggaattaacaaagttgaaagcagagaaaatagcttttgcaaag

SEQ ID NO: 915676 - DNA, 4001 bp, Homo sapiens
ataatcttttgattacacccaacacaggtaacatctgtactttgaacagttaagtatagcagctgatgtttaactgcaggtaggggggagatgagaaacagaaataactggtgccaaatgtgagattcaattacctcgaccatcacaaccaacatcaaccagaagggtgtgggaggaactcatggaataaatgggaacaggtgtggcctgaggataagtaagtgggggcactgtttccatcttcatgaagatgtgagaggaaatcaaagctctttaaaaagaaggaaatggaatgcttggctcctgtaatatcagaacaaataatgcacagccagaggtcatgcctcaccttctgcttatctcagtcacctccacttgtaaaatcagtgggccatattcaataaaaccttcatatcagttccatatcttttcccagaaaccccaggaacagagggagccaatatccttattaaaccaagaagctcactgtcacaaagagctaagtctgacgcccctgggcccctacctaaccacgtgtcctgattctttccataacttcccactgcacaacatccaggttatactgaagatattacacatctggttaaaaacagtacacgtctctcatgaacaataagccatcctttctattaaaatgagtgtaaaattgcaggtaaaatgctgtaggcaggcctgtttggaaggctatgcgaccctaggagacaaaaaggtgcaggaggaggaaaagggcagacaccgcagaaagcggtcgaagagaacgtgaaagaagtggccatttctagctgggcgcggtggttcacgcctgtaatcccagcactttgggaggctgaggcgggtggatcatgaggtcaggagatcgagaccatcctggctaacacggtgaaaccccgtctctaccaaaaaaaaaaaaaatacaaaaaattagccgggcgtggtggcgggcgccagtagtcctagctactcgggaggctgaggcaggagaatggtgtgaacccgggaggtggagcttgcagtgatccgagattgcgccactgcactccagcctgggcgacagagcgagactccgtctcaaaaaaaaaaaaaaaaaaaaaaagaagtggccatttctgcaacttttaggagagctacctgccctcaaattttgaaagggtttctatttcttaaagtgctacgtttccctggctgaaactcacatctttcttccctctagggctggatcaaagcttcagaggttgtttctctggccctagacagggccacccccgcaaatttctcccccactgcgcctgacatccgcttccatccatggctccattaacggaagctaagcactggctcgggggactttatccaccgcccggtgttattagattccaggcttcctggcctcaggaaaggatctggctcgtgtatttgtgtatcgcagctaacaaggaaaggcagtcggtaccagtgcccagagctatgtgagctgtgactggtcacagcccaggagccagatggcatccccgggggcgcgcgtccccggactcaccgggcagacggaggcccggggcttcacaccttcccctcaccgggcaacgcggcagacctgactcgcgggggactgagcaatattcgttccagggccgcggccagccggacagaggcactcgggggcggtgggagtagtgtgcgcaccggttccgcagcccggagggggccccagctgggcttccgcgacaccagggccctccatcccctcccgtcctcccctagcgcagccttcacccctgtcccagagcccctccctgtccgcgtcccctcccccgcaggtcccctgcgagtcggaacctcctctccatcacagccccgctccttggcggggccccctctcccttcgagccctcctccaggttcgagccccctgcgggtacggacgtctgacctgtgcccagcgcctcgcagccgtctgcagcccgcgccgcgcgccaagtgcgtccgcccagaagcaggtgcagctccaggcccgccccgccccgctgcgccccgccccgctccactccgccaggcctggcagccgccagcccctttccacccttgaccgcccttcccggtcccggccagcgtgcggggcatctgtcgtcaggtccgcacttcctccaggcctttgactttcccgtggagatgtctctggcctcaggaactccctaagctgtgtgcttcaggagaggctggttcctgagtcacccaagaggactgcaaccaacctggacctcctgagatgcaaagagatcgcagggcctgggaggcggcgaggaccctgagaacaggctgtggctccgaagagtgtttgttaccaagccaggcaaccactgcgaacacaccgcagaaacagccacggatcaccgtccagcaaaggaagaaggtgccaacggtccatcagggaccacaacccagtttttttagtttaagtttggtggctaagtttgagtgtcacatagttcattcattccttcattcattcaacaaatctgccatgttcccatctgataacagatctgacaggtgggcactgttctaggtgctggcgatagagctaagaaggaaacaaagttcctgtcccggagaagggggctacctgctgaggagagcatgactttctttgtggtattgtgctgtggcagcagggtcctcttctgtaagctactgagaggtgaaacccgctgggcttctgggtcggatggggacttggagaacttttctgtctagctaaaggattgtaaaagcatcaatctgcactctgtgtctagctaaaggtttgtaaacacaccaatcagcactctgtaaaaatgcaccaatcagtgctctgtgtccagctaattggtggggacttggagaacttttctctctagccaaaggattgtaaatgcaccaatcaatgctctatgtctagctaaaggtttgtaaacacatcaatcagcactctgtaaaaacggaccaatcagcactctgtaaaatggaccaatcagcactctgtaaaatggaccaatcagcgctctgtaaaatggaccaatcaggaggatgtgggcaggaccaatcaggaggatgtgggcggggccaatgagggaataaaagctggccatccgagccagcggcagctgcgtttgggtccccttcgatggtgttggggttttgttgtttcgctctttgcaataaattttgctgttgctcaccttttaggtccacactacctttatgagctttaacactcacagtgaaggtctgcaggttcactcctgtaaaccagcgagaccaggaagccaccacaagaaacaactctggagccgccacctttaagagccataacactcactgtgaaggtctgtggcttcactcctgaagtcagcgacaccacgaacccacagggaggagcaaacaactccagacgcaccacttttaagaggtgtaacactccctgcgaaggtctgtggcttcactcctgaggtcggcgaaactacgaacccgctgggaggaaggaacaacgcggatgcgccacctttaagagctgtaacactccctgcgaaggtccgcggcctcactcatcaagtcgtgcatagaccacgaactctctagaaagaaaaaacttcggacacacctgaacatttgaaggaacaaactccggacacaccatgtttaagaactataatgccgtgaaggtccgcggcaggaccgggaccaggaactcttcagagggaaccaattccggatacacagcttcgtggaatggttctgcactgtgtgtgtgtgtgtttcccgtcaaccctgtgcacactattagaagaacacaagcgttaaggctccctctcagtcctgccggtaagaatccagggctgatgcacctattaaaagcttctcaggaggcctggggaagtgggggttgagaaccacgggtctagatctctaagatgcctggcagcttattccactgttgagggcac

SEQ ID NO: 915677 - DNA, 4001 bp, Homo sapiens
gttgctcactgttatagattgaagttatggggcttgggggaaaaactgtataaaagccttaagtgatgtaacattttaataattaatatgaagggcggctataaccagatacgctgttctaacaattccagacctgcaggagctcattctgaccgaacgtagccttggctttcaggacaacattttttgtcagtgacttactataatcacaatgtggctacgaatagctgtgtcaggcagaagttaaacatggaagtgaaagagaacaagtgttttccctgatgtaatggacaagatgtgttaagaaatcttgttttggtatacacttagtttttttagagacagggttttgctctgttgcccaggctggagtgcagtggcctgatcacagctcactgcagtctcaacctcctgggctccagtgatccgccagcctcagcctcccacgtagctgggaccacaggctccctgaggtaattttttttttttttgagacagaatttcgctcttgttgcccaggctgcagtgcaatggtgcgatcttggccaactgcaacctccgcaccccaccccccccaccaccaccaccgggttcgagcaattctcctgcctcagactctcaagtagctgggattacaggcatgcaccatcacgccaggctaattttgtatttttagtagagacggggtttctccatgttggtcaggctggtcttgaaccctcgacctcaggtgatccgcccgctttggcctcccaaagtgctgggattacaggcgtgagctactgcgcctggccttccccggggtaatttttaattttttttttgtagaagggggtctcgctctgtcgcccaggctggagtgcagtggcgccatcacggctcactgcaacctcgacctcctgggctcaagtgatccgccagcctcagcctccagaatagcttggcccacaggggtgcgccaccgcctggctgatgtttacagttttttttttatagagggggtcttgctatgttgcccaggctggcctcaaatgatcctgcagcctcggcttcccaaactgtcaggcttacaggcctgagccactgcgcccaacctaaacttaatttttaaccaaatgaaaatacacaaaacaaacctggttactagaggctgtcctgcctatggagtagccattctttattccttcaaaacaatgcacctaattactagagaacacgcacgaaggtttggcacttcagcgcccgcgtatgggagttctggctgtacccacagacagcagaaggcggctcctctgcaggatggccgatttactgctttggtctgtcccttcctcctctcggaggcgagtctctcaggcaggacggctgaggcaccggcgcccgcgattttctttggcgagagttccaaggctaccgaaaccctgcgcccatcccgcccacgtgtcttcacaaaaaccacgcgcgggacaagagctgccggggactggggcccccagagccgctccgcacccaccctgcccggggccaggcgcccgcgcgcgggggagctcttcggggtgcaggacgcccgccacccaggccaggccaggccgcgcttctcgatggggtgacggagctgtctcgctcacgtagagacggtggcacggccccgtgagcgcaccgaaagcggaaaccggattgtcaccacagggaaacgccgcgcccgccgctgcaagcccggaagcccccaccccgcccgagctcacctcgccgcggggccgccatcttacccgccccgcccgccggtccgtcgcgatcccggcagcctctcggcccgcgcgctcgcgctccttcggccattttcgcgtctcctgacgaaggggcccgaccgcgccgcgtttcgggagcggacgtccgagccacggccgaggcccgattagtccgtccggcaccgctcgggcactttcggaagggaagaggtggagaaccgacgttcgggagcattcggcctcggggacattcggctcgtctcggctcggcctcgggctgactcggcttccgccggcggcgggaacgggcgaaacccgcggcactaagctctctctgagaggcagaattgcgccggccgccggcgagaatctgcctagagccgtccagccctgtcggccggggacgacagccgcctcagcctgtcaggacagtgaggagagcaggggccgagtctctcggaagccctcgtgaggactcggacctattcggactgattcggcttcccacttcggggaacttcgaccctcctcggttcaggactcggtctcggctcggcggcttcgtgcaggttcggctcctactcgggcagcctctgttcgcctcggctccgctccgcgggcggactcggctcggctctgctcggcggctggctgccttttcggtccctattcgggcggcggcttcgggcggcctcggcccagctcgggcgtcctcttcgggccccgcttcgggctccgcgaccggcgcttcgggcggtcccggacggcgccttcgggaaggctcggcggagtccggatggaggactcggactcggcggcaaagcagctgggcctggctgaggcggcggcggtggcggccgcggccgctgtggcggcggcggccgcggccgcggcaggaggcgaggcggaggagccggtgctgagcagggacgaggactcggaggaggacgcagactcggaggcggagcgggagacgccgcgggtcacggcagtggcggtgatggcggcggagcccgggcacatggacatgggcgccgaggccctgcccggccccgacgaggccgccgctgccgcagccttcgcaggcaagtgcgcccgccggcctctcgcctcgtccggttcccgcgcgcctaccccgcgcgcctgccccgcacaactgtcccaggtgaccagcccgccacacctgtccctcacacctgctccacgtgaccagcccgctccacccgccctgcacacctgcccctcacacctgctccacgtgacccgcccgccccacccgccctgcacacctgccccacgtgactagctcacccctcacatctgcctctcacacctgccccacccgcccctcacactttccccacgtacctgctccaggtgaccagcctgccccacctgccacaaatacctgcctcgcacacctgctcgacgtttccagccttccccacctgccccacgtgatcggcctgccctacctgccccgcacacctgccccacatacctgccccaggtgaccagcctgccccacctaccccaaacacctgccccgcacacctgcccctggtgacctgcctagcctcacctgacctggccctgccctgcacacacctgccccctgccccccttttctttgtggcagccccgcctcctactggtcccccctgtgcagctctgcccctgccctgccttcgtccatcctggctccccccacctgtcctggagaagccctggggtgggtgggcacctgtggtcaccaggaaccccccacttcctgagggccagttcaggcatgacctgagcgctggggagccaggggtgggcagcctgctggaggccatgatgccagaggtcagcgtggctgtgtggtggcccaggggggctgcggagccacctgtgcaggctcccctcccagtcctccctcttcctcttgcctttttccctaaggacctgctcctcctgccccgcttcctgtcgggcttcctttggggaggctgctgtggctttccagtccacatttttatataagctgcttatagtttcttgccacacaggtcagtctccttctcaggctccaaaacactgggagcccgtggcagagctcacagatgccctacggggctggtgccgtccacccacctcctgtgtcccgcccttgtgtccgtggggcatagacttccccacccactggcttcctaacgcactgtattcttccccattggagttcccgagtgtcccccagggactcacagctca

SEQ ID NO: 915678 - DNA, 4001 bp, Homo sapiens
gactgacacagagaaacccagcctggcctgcctctaccagccagcaggttgtggccaaacccattactgccctgaggctcagtatattaggaggggcacccttctgcagcctagtgtgcttctcccttcctgccccctccttctccctcctcagggcccctttagcccctcctctctgccagcaacagcccccagctgttcactctggaatggagtgaagtcagtgggaaaccacagagacaccctgactggccaactcgtgatcctcagcatggggccagggtgcagccttagggccctggcaacaccaggtgtgtgccaggaatgtgggaaagcaggcaatggcaatcacctcagccaccacagcctctctcctcctcaaccagtctgttcctcagcctccactccacctgccccagcctgaaggtggcatcaagggcaaggagggctatgctagggatgctggctagataaatggacccatgagttgggagcaagaaaattgtccttcaaacaccaaagatttcaaggattgggggaagggagggtgtgtgtcagtcagcctcatttcccagagaacaagagcaactcaagccacaccagaaagaggcaggaaaggggggagaggttctattcccagcttctgatctggagccagcagacaggctgggagatggggaactgagagggggaagttagagcagctgacttggtctcagccggattagcagagggcagctaaagaaaggttgtacccaaggccactgcaggcagagtccaagctgggggagggggctgcagcgatgttctgaatctgtgatccttgaaactcctttccttgggctgctaacagatccattgagggtgatatggagcagctggagttccctgtacacccacactctgcccaaagcgattgtgtctctggctaggtgagctgcccagcacaggacttgggaaacactcagagtccagacgaccaggtacctaaggactgatcagactgtgatgaggaggattgggaagaggcggatgggtggttccagggtccaagcctttccttgttctgccagaggtaagagcagtgagaagagatgacttccacttcccatggaaattaaggctggtcagggtaggggcatggtcagaggaggcggctggaggggatgcccaggcccacaatgcccagcaaccacctgccagcccctgggagcattaacctccgctccatggcctctcccagccccatattttctagaaggagatactggcagtagctggagagaccctgacagttatagggaacccagtagtagaataaggaggatggggagacgaaacaaaaggttcaagttgagaaagtctgaaaagcaggggatgtcatagagaatgcccccttttcccccagcgcgttatcagcgcttcttagactcaggggcgtccgccaacttgtttacaaaatgaggaaggttaggaaacaaacttgggacggcattcccaggaggtccctgttatcctcccagcatcccccgcccccacgcctccctgtggtccgcctacgcggaactctgcggccggcagcggtcccctccctctcccgggccgcgaccccgccgacccgcgccaaatacatggagatcaacaaagtcacgcttccgagtcacgtggccagtgttttcctccctccgcgggcgggctgggggcgcgcgaggaggggcgccgcgagtctgaggagcggggggcggtgacagcgcccgcctcccgccgcgggactccggccgccacgggacccccgccccgcctcggccccttcggcagctcggcctgccgaagtccggtggccaggccggtgggctccagccgcgccgggcactggctcgctcgctcgctcactcaccacagtgaccggggacaccatggcggcggcggcggcggctggcaccctgctccgggctgcagcggccaggacgcgcccacggccaggtaagccggcgacgattctacaaagcccggagggacggacaatacctcccgagcgcccggcgccggggttctgtcagctagccccgtgacgtcaccgctgccagggccaatgagcgggcgggagccgggggggcggggcccggctggcggcgccggccaggcccccggctgctgctcggagaaaggaggcatctcccaggggtcagaaggcggataccccccaggccccgcccccttgggaggccgtgccaaggcgtccacggaacgtgaacgtgaccgtgaccccggtgcctgggtgaggactgagcttggctgagagacaaacacattgctgtcctggacgcacagccacatacattttctcataacccgggagcaaaaggcaaagacagattcccttaagcctttaaacatgcagtccacgccgatacgattgcaattggactcacaaccttcactgtgtacaaacacacatccaaatcatcagcaaacacacaaccttcgacttgaaaagcggcacgtatataggtatgcagcagccatggacccataatcgtagcatatacatcacacatacagaatcataattacccttaagcactcaacaagtacacagatccaaaaccaacaaccacaaattgacatatatgctccatgtaagaaaagagacatatacagggactctacagcagctcgtagacccatgaccctaatatagaaacaaacacagataattggccgtaggcacacacctcttacaactcagagaccactgccacacatacaagagcaccccaagaatgacagacaggcagacccaaagaagcgtgagctaactttgccaaaaatacgtcccaagtggatttaatgttgattttacgtagactaaaggaacacaagctcattcagagcggtgcatgttcagaatcattggaattacatggagaggtaggtggccagatggactgaaatctagtcccagttttgccacttccatgctgttagattgggtgaatcacttcccctctctggtcttgatttcctcacttagaagatgagcgggtgagttctaaggttccacccaactctgacatgtgtaggttggggaagaggaagggctgctggttttaggaaatttaagtctagcaatcctggagatggagatttcagctgtatctcaaaggatgggcaagtagtctgtaagctactgtagaagggcagtagctgtgtgtcaggctttgggaattgatgggaaaggggtgaccagccctaattagcagccaaaaaggagtttcaaacatcctggcatggtgacacaggcccttgtgctggtcctgagccttgtgctgtttgggcagagaccgacaggctgaagtctcctgtaagcccctcccacaatgggtctcttccttttccttctggatcctacccagttttccctaaagtcccaacacccattcagaggggtgatagtcctcttctggtgacagaattggcaaccagagattcagagtccagtacaacaagagtgagagtcaaggcttgggacaggagtcacccagatcttccccccatcccctccagtcccctccagcatagagttctaagggtcaatgacctctgcctactcctctttctttccagttaggggctttggggagagcaccttaccagaatgaaggactataactgctgccccagggctttgtcactcacacacacacacacacacatttctaccaagtgtgctgcctagagagaacactggcttgagagttagaaatgccattcttagtcctagtgcttccttctccatgactcactactgtggtgtataattgagcacatcattccatctttggagcttcagatttctcatgaataaaatggaggaaatgggctagtagaaggtgcaaatattccagttttccagccaaaccctctaacatcacctgagggatagttctcaaacagaaatttgccaagtcagggcatttttcatttctctagaccttagt

SEQ ID NO: 915679 - DNA, 4001 bp, Homo sapiens
cttctaattcctggttgacagacagaacaactaccaacaaaacaagtttcaagaggtggaggaacaggtgactaagtatctggatagagaaaagaagagatgcttcctcagcaaaggggaatctgtttgagaaggaagtggcttatcattccccagaggaccttgcccactcctcctatatacagtgatatgtctggcagagctattgacaattcacaaacgtattcagcaaccacttagtgagcatttgctctgtgttagatcttgtgctcaataaggtggattcagataagcataagacatggtttctgcccataaccaggacacaccctagtaaaggagactgaaaaataaatacatgatcacaatacataaagttatgaggcaagatatgcagagggtgccagcaatgttttcaaagtcaggagacgtgctgctgtccctgtttctggtaggaggtagagatggtttcaaaaagaatctctgaatcaaaaacatttgcctgcctgtaacctttccccactcctacatttaaagatattataaattaaagctcttatttttaaaaacgcaatgtcattctgttttcccatcatactaatgtgaatcccttctgttctcccccaatgatgagctagctcatcaaagaggaagcacaggtatgcatggagctagggcaggtctggagagctggggcaccagagaacagtatgagggaactagaaggtcaagaaatcgaaccagggaggccacaacctcacctctcttgcagtttggttcttcccttacccactaaattatcaggaagagagaaagcaagaaaggcaccaagggactcgtggagggagttaggtgagaatatgaagcaggtgagagatgctccgtaggccctattgggagggaagtaggccaggaggggcaagttcccaccacaggaagggaagtgttcaggggtgagctgagctgagtcggcccttgacagggaaggctctgtcagatgggggcttcctatcattctggcttggggcatgcggggcctgtgaggctggcggagggcgcaggtgggctgtcaagagcttagggtggaaagttaaaggctctcggaggtgaaaaggttgtcaagtgtaagatgcgtgcagccggggctgggaagggaaatgttaaggcggtggggggctgctgtccggactgtgggcactgtcggggctggggacgaccgtggggcgctgcctgccaggctgtcggggctgagggcgagagtgccgccgggcagtcgggaggggcggggctggtggcggcgggggtctgccggagctgtgaggccaggcgtatggctgtcaggaatgggccaaggagcaggttggcagacccagtttccgcaaggccggtggtaggggaggagcttccgtcaggagcgaggctgggcgggactcaccttggcggcgtctgacagctgcgccagcagcagcacggaaagcgccaggcacgacaggctgagcaaggagccaagccgaagaaggcctccccacagggtcgccatcgctgggggcccagcggtcccacagcccggagcccccgcgaccggctcccggctcgggctcaggctcaggctcaggctcaggcacaggcttgggacccggctggggatcctccgcccgcacttccgtctggacgcgaaggcgtcaccgggcgcgccgggtcagatgcaaaaagcatccgccccggaaccggttaccagtgcgaagggccgggaggctgggcagtcctggtgcccgccttggcctagccccggccccgggacggaagggggcctctggggtggcagcctgggcccagtagagctttgcatctcttggatatctttcccgggcgcagaagctgcggggcttagggagtcgccattgcgctggaaagtcctcccgcccacggagaccccagcaaactccgagtgtcacacagtcgcctctggcgacccgtgcgggccggagccgttcgcgcacaggcagggcgggtgctgagcgtggaaacggggctggaattggccgagccatgcctttccgggatgcccaccgccagtcaaagggttgggggtggtctctgcaccttaagtactaacctgccgcccacgcgcctcctgaccacagcaccccgtcggctttctaattctgtgagctgccctcgtgggcgtggcctccctgtggagctccccatgtgcctccccttggtccagcctgcagctaggaagtgggtcacagcgacggggctgggctgggccaggccaggctccgggagatgtggaattggcgaaacaactgccccagtagtatcctccgcctaggactccaagaggtggcgaattggggcactacgcccgggtaaggcagtgcctgttcagggctgccgacctgtctccccagggctgtcattctcagcaagtactttaggagtgccttagatcggcacattctcccattgaaatatttttgttagtggagacaagggaggtaatggcaaggacacggatcatcacagcccctagggatttgttgaatgacctttggcaaatcacttcccttctctgggcctgtagttcttggctgaatatgagggaatggatttcaaattatgctccatgtaatacccgtgtttttacctctgtaaacagatttttttgttttttttgagacggagtctcgttctgtcccccgggctggagtgcagtggcgcgatctcggctcactgcaacctccgcctcccgggttgacgccattctcctgcctcagcctccctagtaggtgggactacaggcgcccgccaccacgccgcccggctaattttttttttctttttctttttctttttttttttttgtatttttagtacagacagggtctcactgtgttagccaggatggtctcgatctcctgaccttgtgatccgcccgcctcggcctcccaaattgctgggattataggcgtgagccaccgcgcccggccccaacagatttttaaagatggtcttttcccaatttgtggaaatgttttaacagaatgctctcaatatttttcgcccatgtgattcttagattcatgtgaatctaacacaacgtatctgatactgttcccaacaggaaccagggtggcagggctagatgtcctctcaccagactgcccagtgaaggtgctgtcactttgatgaattatcaaggctttgtagtgggtcttctactggacaaaggacaaactggagactccctggatcaaatgtgttggtgaggcactgaatctgattgctgaaaggtgattcagctgcaagttaggcatcagtttagggttttctaggcttggcatctaaagggagtgcctgctgtagctgaaacctcataggccttctcttccttccgaattgttttcaaggccttgggggtacagagacttagagaaaatacatagttgtgcctcagactgatgggcctcatctgtttaatggagaaacaccaagcacactcagtctgggcggaattttagagctccatagtataaccactatctagctacatgtggcaattgagcatttgaaatgtggctagactgaattgaaatgtgctgtataaaatatacacttaatttcaaagacaatatttttaaaatgtaaaatatttcagtaatttaaaaatatggtttaaatattttagatatgttgggttaaataaaatatattagtaaaatatttcacttgttttttgacctcttaaatgtggctgctagaaaatgttatagtgctgtcaggaagtgctgttctggaatacagaatgtggctgccgtgagtggagtgtgactatgagatagtcgcctgactggagacaatgaagcctcaggccaaggtaagagggctgacaaggaagaactggcacaactagagccgaatgtttgggggaggtatatgtctgccaaaaaatgaatataatttcaggtgactcaatagaagtggagggatcagtt

SEQ ID NO: 915680 - DNA, 4001 bp, Homo sapiens
agtgagcatttgctctgtgttagatcttgtgctcaataaggtggattcagataagcataagacatggtttctgcccataaccaggacacaccctagtaaaggagactgaaaaataaatacatgatcacaatacataaagttatgaggcaagatatgcagagggtgccagcaatgttttcaaagtcaggagacgtgctgctgtccctgtttctggtaggaggtagagatggtttcaaaaagaatctctgaatcaaaaacatttgcctgcctgtaacctttccccactcctacatttaaagatattataaattaaagctcttatttttaaaaacgcaatgtcattctgttttcccatcatactaatgtgaatcccttctgttctcccccaatgatgagctagctcatcaaagaggaagcacaggtatgcatggagctagggcaggtctggagagctggggcaccagagaacagtatgagggaactagaaggtcaagaaatcgaaccagggaggccacaacctcacctctcttgcagtttggttcttcccttacccactaaattatcaggaagagagaaagcaagaaaggcaccaagggactcgtggagggagttaggtgagaatatgaagcaggtgagagatgctccgtaggccctattgggagggaagtaggccaggaggggcaagttcccaccacaggaagggaagtgttcaggggtgagctgagctgagtcggcccttgacagggaaggctctgtcagatgggggcttcctatcattctggcttggggcatgcggggcctgtgaggctggcggagggcgcaggtgggctgtcaagagcttagggtggaaagttaaaggctctcggaggtgaaaaggttgtcaagtgtaagatgcgtgcagccggggctgggaagggaaatgttaaggcggtggggggctgctgtccggactgtgggcactgtcggggctggggacgaccgtggggcgctgcctgccaggctgtcggggctgagggcgagagtgccgccgggcagtcgggaggggcggggctggtggcggcgggggtctgccggagctgtgaggccaggcgtatggctgtcaggaatgggccaaggagcaggttggcagacccagtttccgcaaggccggtggtaggggaggagcttccgtcaggagcgaggctgggcgggactcaccttggcggcgtctgacagctgcgccagcagcagcacggaaagcgccaggcacgacaggctgagcaaggagccaagccgaagaaggcctccccacagggtcgccatcgctgggggcccagcggtcccacagcccggagcccccgcgaccggctcccggctcgggctcaggctcaggctcaggctcaggcacaggcttgggacccggctggggatcctccgcccgcacttccgtctggacgcgaaggcgtcaccgggcgcgccgggtcagatgcaaaaagcatccgccccggaaccggttaccagtgcgaagggccgggaggctgggcagtcctggtgcccgccttggcctagccccggccccgggacggaagggggcctctggggtggcagcctgggcccagtagagctttgcatctcttggatatctttcccgggcgcagaagctgcggggcttagggagtcgccattgcgctggaaagtcctcccgcccacggagaccccagcaaactccgagtgtcacacagtcgcctctggcgacccgtgcgggccggagccgttcgcgcacaggcagggcgggtgctgagcgtggaaacggggctggaattggccgagccatgcctttccgggatgcccaccgccagtcaaagggttgggggtggtctctgcaccttaagtactaacctgccgcccacgcgcctcctgaccacagcaccccgtcggctttctaattctgtgagctgccctcgtgggcgtggcctccctgtggagctccccatgtgcctccccttggtccagcctgcagctaggaagtgggtcacagcgacggggctgggctgggccaggccaggctccgggagatgtggaattggcgaaacaactgccccagtagtatcctccgcctaggactccaagaggtggcgaattggggcactacgcccgggtaaggcagtgcctgttcagggctgccgacctgtctccccagggctgtcattctcagcaagtactttaggagtgccttagatcggcacattctcccattgaaatatttttgttagtggagacaagggaggtaatggcaaggacacggatcatcacagcccctagggatttgttgaatgacctttggcaaatcacttcccttctctgggcctgtagttcttggctgaatatgagggaatggatttcaaattatgctccatgtaatacccgtgtttttacctctgtaaacagatttttttgttttttttgagacggagtctcgttctgtcccccgggctggagtgcagtggcgcgatctcggctcactgcaacctccgcctcccgggttgacgccattctcctgcctcagcctccctagtaggtgggactacaggcgcccgccaccacgccgcccggctaattttttttttctttttctttttctttttttttttttgtatttttagtacagacagggtctcactgtgttagccaggatggtctcgatctcctgaccttgtgatccgcccgcctcggcctcccaaattgctgggattataggcgtgagccaccgcgcccggccccaacagatttttaaagatggtcttttcccaatttgtggaaatgttttaacagaatgctctcaatatttttcgcccatgtgattcttagattcatgtgaatctaacacaacgtatctgatactgttcccaacaggaaccagggtggcagggctagatgtcctctcaccagactgcccagtgaaggtgctgtcactttgatgaattatcaaggctttgtagtgggtcttctactggacaaaggacaaactggagactccctggatcaaatgtgttggtgaggcactgaatctgattgctgaaaggtgattcagctgcaagttaggcatcagtttagggttttctaggcttggcatctaaagggagtgcctgctgtagctgaaacctcataggccttctcttccttccgaattgttttcaaggccttgggggtacagagacttagagaaaatacatagttgtgcctcagactgatgggcctcatctgtttaatggagaaacaccaagcacactcagtctgggcggaattttagagctccatagtataaccactatctagctacatgtggcaattgagcatttgaaatgtggctagactgaattgaaatgtgctgtataaaatatacacttaatttcaaagacaatatttttaaaatgtaaaatatttcagtaatttaaaaatatggtttaaatattttagatatgttgggttaaataaaatatattagtaaaatatttcacttgttttttgacctcttaaatgtggctgctagaaaatgttatagtgctgtcaggaagtgctgttctggaatacagaatgtggctgccgtgagtggagtgtgactatgagatagtcgcctgactggagacaatgaagcctcaggccaaggtaagagggctgacaaggaagaactggcacaactagagccgaatgtttgggggaggtatatgtctgccaaaaaatgaatataatttcaggtgactcaatagaagtggagggatcagtttctcttgttctgccctgctcttatctaggtaactcttacttttcctttaggtcagggttcttctaagccagaaaaccttcactgacttaagtgcactcctttctatgtttgcatagatctctttcttaactttaccccattatagtaaaattatgttttcacatttgcctttatacccaaacctccaccaaaatattgtgagctctctgagggtaaggactttgtcttattattgtta

SEQ ID NO: 915681 - DNA, 4001 bp, Homo sapiens
aactttcttttgaatatgagaaactgagacccttctccacctcttttccaagatccctctgaagatccagcagctgacagaggagtgccatcaggctcaagcccactggccaccatcttcctcacgacattttggagttgagggacagaaatcacaatgcatctctctgcaataaagccctcaaggagaaggcacaagctcaggtgaccagcttctcccagaccactcctatttaatcaaggttaagaaacctgctgcagatgggaatacgagccccaactataggctcactctctcagagttccatcttaaataggggagtgaagttaagaaccttaaataagaatgtaatgattccattcttccattccaaggtaagtttggacaatctttttttcagaatgaatatggcacctatcataatatttgacacttaattcatagattaattgggagttcctcaaagaagtctgttctctgtcctgtatccctccagcagccttcatgttgatccctgactctgaagagatgagcttcctgggaagatatcgccccatcaccctgtctcagggatggactatccatctccagtgggagcatggccaccctccggatagctcagcccttctcactcttgggtttagggaccatctagtttaggctcccagcatattgccaaggaggatgccccatggctgtgactaagggttcaccttctgcatgcccttgtgtaccccccttactgctcaacagtaagaggctctgataaccccccaaggcctagggccaagtgactttggtgaggtagagacatgaacgaaggagcccagagcagagggcaagggaggcagcctgggaaagaaaagtcaagagggggctggaagaatggtgggaaaaaaatgatggtaaagtttgcagaaacacattgggggtgcagaatggaccacaagccaactataagccaaaacataggatgagctgatctttcccaaacccagtgctagcccattcttcccagagtcccaggctctaccatgtcggtaaggtacagagaatttggagggggcagaaaacaagacctaaaggagaaatgagagcacaaaagggatttcctggaggaaaagaaagtggaggcacagcagaacaagatctttggaagccttcatgtgtgtatgactggctttcccacagaggacaggccagctgctttctcctaccccaagagcagcagaagaaaggaagttgagtggtagcaggacttgtggttaaacatcaagaagcacttcccaagcatgaaagttattaagtccaaaaagaagtgaccaacggaggttgaaacatccccttgaaaatcttgaatgcacccagaaagtcacagttttctgggaaggtttaggagtgtagtgaggggtttagacaagatgcccctgaattgcagttagaatgcttttgattttccaaccagcaaaaatgagattaaagtagattagcctggattcccaatcggcaaagttggtgctgtaacactatggatgcccggcaggagtgctcacagaccacagagcaggaaacccacgactcagccacatagccctggggtgctcaccagccagaccccaaatcccagcagcttctcctcccaggggctttttctagaaccacgttaaaaggagaccaagagatcttgatcgtaagtagcttcaaactagaagaggcacagccagtttcccccaaacctgaaacacagaggtagctgtcccacctgtctcccagcctcagccctgcttcctcagcgctgggagaatctggcccgaggcctgaggtcacactcaccccgtggctgtccctctccatggtctctgaggggaagagtcctccaggcttagctgatgtcgaggagaagatccatcttggtccctggcttctcaggcatgtagggtaaaggagttggagggccaagggccagcccccaccaaatggggcggggaagccggttgggacgtgtgaagtaatccccagtataaacaacacagaactagccagacctgttcctctgcccctcatcgaggccatcccagttactcagcgaataccaaattccaaataccgggaacctgaagctgcctttactcatgaaactgcccccacagaagcagaggagtgttctgagctacttcttcagaggggccctgagagaaagggcagagccttgagaggatggtcttggtcctgttgacctgagcccctgaaacagatgctccagagccttctgagggatgaccctatccccacaggggacgttccaggccaggggcagagccccacctatggcaggacagtgggaaccttcatctccaaggaccaggtgtccaaatcccaaatcagggcacatggtctctgggcgcatggtctggcaattgctttctcctgaactctgtttgtttttatgaaactcttaacaaagaaatgaaaatcaaatgacctttaattatgcacatcatgaattgccctctattgaaaacaataaagtgccagaagcaacacatcaaagtcaatgaaataaaacataactatctgaatggaaactgttccaagaaacattgggctgactcgtgatcccaaacctataccctattctgatcctcagagtcaaaagaagtaaaggaagggctattgcaaaaggagtccttagcacctccggctaagttccagctgagctgctgctgagaactgcaaaaaaaaaaaaaagaaaaaggagttcctgttgaggtttgggaagaactttcttgagcattcagaggcaccaagatttttagagtttgaaagaagctcatggatctttagtggttcactcttttcattttacagactgcgagacagagggccagagaggctaaggaatgtgctcaagtcacacagcaaacaacagcagcagcaataatcttaagatgccaagaatcctgcgaaacacttcacacgcatccttcacgtgttcattcaacaaatatgtattgagtgcctggcattgctttaggtgctggggacacaggaacaaaataggcaaagcctcctgccctgtggctctagtatttgcgggttggggggaaaaagcagacaaaaatcaataaatcagttacacagcctcctagaaagtgaaaagtgccgttcacaaaaacaaagcagcgaaaggatccagaaggtaggggaggcagagtcctggcagttgggaacaggatggtcagagagggctctctgtggtgacatatttgagcaaaaactgaaaggaagtgactactatcgccccccatttacattcaagaaaacggaaacttctagctcacagtggaaactgtgccccagcttagggtgtcttgagggaaatctaacccagaggcaagaggctggaggagagaactctggagggcccaggcagggaccctagagttctctcatcttggcttattgtgggagccacttccctggctttcaaagagagcagaattcagccacaggccacatccccttcctgccccatccaccagcccaccatgacaaaggggcccctcccatccatcctcctgagaagatacccacctcctgtcctcagctgctcctcttccctctctcccagggaggagcccagcccctctctggctgccactgagccctggcacgcccaggccagatccgagggcctccacttcatcccccaggcaggccactggtctccgaagggcaccctcagcctccttccctgaaggtcccaccaacctagggaaagagctcaggcttgggggtctgggcgagttcgggggaatgagaaccctaactctgaggggaactcgcaaggcctgacaggttcaccatcgggaaaatgagaacacatagaaccagaggaagtgcctggcacggggcacagggcactgggaaggctgggaaggaacatcagtttcacctcttgctcttttccttggtttgcatcagagacacaagttggcctg

SEQ ID NO: 915682 - DNA, 4001 bp, Homo sapiens
tgtgttgggtgtactacccagctgtcatttcctagcacagactcctctttagtcctaagtccttacatctgtgcggggcttcatggtttccagaacctactcacatgtattagctgtgtaatctctgcgaacccggtgcatgtgcgtggggctgttgtgggtcatatcgtttccgtgggcaggggagaaggtgagtctcgggaagatgaatgcctcaagacagcacagctaatcagggagctggcctcagccttctgattctgcagttagtgacctgccctagaaatgattcccttctctgttgctcccccaagagacaccccaggtctcctcagtgcctgccacccagaagcagctcacagctaggtagactccacagctgctctcctctcctgggagccccaggggatacagcgtctctgcacacaggccaaactttggggcgcctccttggatgggaaagcaggaagcttgtgctttgatcctggctcaaagggaagccccttcccctttctgatcatcagctacaaccgcactaagaattgttcttgccagaattttcagaagagtgtcgtgggaagtgctcaggttgggaataggagacaatcactcgaggggcccctgcaggtcacacccttcccccttggacagtggcttctcctttcctctcttcccttccctttcactttggtggctgggcaattgctgcctcttggccaaggactggagaaggaagacccctgggttcctcctcagacccagttattatctcttcccctccctggccctcagctgtcctccttgaaagatagggttgattctctttgccccaagacagcgaagacgctccaggtattcagaggaggaggagagagggtgagggcatgaaaagagaccaagtaaaagatgaccacaaacaccctagattgtttggaggcatctctgcactgttttcttttccttctttctttttttttttttttttttttttttttttttgagacggagtttcactcttgttgcccaggttggagtgcaatggcacaatcttggctcaccacaacctccgcctcccaagttcaagcgattctcctgcctcagcctcccaagtagctgggattacaggcacctgccaccacgcctggctaattttttgtatttttagtacggatggggtttcaccatactggccaggctggtctcaaactcctgacctcgagagatctgtctgcctcagcctcgcaaagtgctgggactacaggcgtgagccactgcacccagtctacacttttctttaaaaagaaaaggaatcagtttccccagggagtggcagagggcaaccgtggcatcagaacagccccctgccttggaaaaatagtgccaacctctaaccaacagacctggagacattgggcaaaagaacatgcaggattcaggaaagaatagtcgggaaggacagccctggctctgtgctcagcttcttaggtgagctggtccaaggaccatggcaatggaggaagagaggaaggcaggtgggtatgagacgtgtaccgggctggggtgtgaggggatttgggtgtggcctctttttttaacctagaaggtgtcacagaattctcagctgatggatgctcaggctgcttgaagggccttacatggggagacccacccttcctgtgtcttgggagcagagggccccacactcaccatgctggctctgtgatcctcccggtctccctgtagcctggagctgagattgtcaccccaaggcagcaggagggcctccccacacaggtcctggctggccagcaggtcagaagtccctggtcagcactggctggaggaggcccgagtgcagggcaggccttggtccctcacgcccagcatccttgtccgctgagcaagctgctgcctctctctgtgtattccaggagtgattgggggactttgggcagcttgattaaaacagccctacaagtgaagttgccaaactggaatgattatgtgtcttgtaacctgacacctatcttaggggctggaacaacacctgaagtcattcatgggaccttcggcctcagaacaggtgacacacctaaggcgtaacaaaagccttcccgcctgaatgacttccacccaactgggtgttggctgagggtgatgccagaagtttccgccccccctccccctaccttctaggtgcatgacttctcactgtgtgggtgctttggtttggggttgtgggaagttggagtggtctgggggttgggcgacagggtttgcagctcagtacaaagagatcattgccaggtgtggagcaataggattggaaagtccacagagaaggagggagtttcttctcttagggaggtaagatgtaccccctttccctggatcccagaagtgaagctgtcctgcacagagccaatgtactagtgcttcctgcccctgcctcagcagccgttcaatattctgaaaatcactattggtgctctggctagagcccacgtctcctcgtccacggagtcatttccttctttctttctttctttttttcttttctttttttaagacagggtctctctctgtcccccaggctggagtgcaggggcgcaatctcagctcactgcaacctccgcctcctaggttcaagcaattctcgtgctccagcctctcgagtagctgggactacagccacctgccaccacacccagctaagttttgtgtttttgtattttattttattttgagacagagtctctgttgcccaggctggagtgcagtggcgcgatcttggctcactgcaacctccacctcccaggttcaagtgattctcctgcctcagcctcccaagtagctgctgggattacaggtgttgtgcgccaccatgcctggctaatttgtatttttagtagagatggggttttgccatgttggccaggctggtctcaaacacctggcttcaactgatccacctgcctcagcctcccaaagtgctgtgattatggcgtgagccaccgcacccagccccacaggatcatttctgattcacgttctgccacatcctgatagctggagctgccccctggccaggggatgtgcaaggtgaaaccttacagccacagatattttgctgggagagacttggataattgtccacattgttcccccattctgtgggcgacaaaactaaattccagagaggcaaagtcaatgacccaaagtcacataatgaattagtgtctggttccatatgaatccagatctccttccatttctcagacctgaccctcccaggagaccagcctgggttagacgtgtgtatttgtccttctgttgataacgtgcttctgtgtatcagccctttaattctccaacaacaaccccaatattttgttcccatttgtcagctgaggaaactatagcctatggacatgaagtagtttcgggcagagttggggctggaacctggttctcttactggttcacactgccaggcttgtgaacaggctgaatggaacacaagtgtttgaaagccccaggttcatggtttgggataatatggcccatggaggaccccagtgatgtctgagcaggaggaataccggatctgtgtaatggattattggccaaatctcagctgatgaatgcagtgtggccttggacttgtctctgagcagcagagatctgaagctggcctgcagggctctggagccagcacagccccagcccttccttactgatggctggtggccttgagagttggaagtcttgggcagaggcaagagcctgtgatctcaggtgacctcagggtcagggccgtgatggtccaggcaggcacctccccagcagcagggcagtgagaagccagtgggccactgggagccacgttttcagttgtcttggttcctctatgtgccaggctaaacatctggcccacaggtttgcattgctttacctggtgctcaggtgatgaaccaggaaagaggcagctgtctgggcat

SEQ ID NO: 915683 - DNA, 4001 bp, Homo sapiens
tctccatgccataaagtcagagtaatctttctaaaatgcaaatatgagcatgtgagccccatctctaccccatgagtctttgtggccttcaggatcaaacaggagctccatggcatcgctcacaaagtcctccatgatctcgcctggcctcacctctccatcctcactgccagcacttgctccctccacagcaaaatttgggatcacactgacatacgtgccatacttcagtgccttcaggcactctcacaacagagagactttgcatctgctctcccctttcccatgtaactgactccaactgacccttcgagactcagcacagacatcacttctccaggaagcttccttctatgcatacagcacctgttgggccctatattgtgctcatttacttccttctctctcctttctcactggtttttgcatcccagggctaagcacagagcctggcacaaagtgggaattcagttaaagtacattaaaggagggaaggaaagaagggaggggggagggagagacagagggggaggtacaaataagataatgtgaattaaaatgactttaaaaattgtaaagcccaatacaaatgttaagtataataatattaataagaactacacctaagctgtggatccttccccccaaaatttataatccagtagggtagataagatctctcaaaactgaagcaactcccgtttcccctgcagactactgtctcccctgcatctttccctgtcaacacatagggttgtacccaatgaggataaaagcctgaaatgctgactccaggacagtattggcttaaatgtgattttcatgtgtcacatgaaatgttcttttcacgccaaaacctccccagtcatgccttcgtactccactgaactgtcttcctaaccctccagcaggaggaaggaaagactttgtcagactcacctaggtcagtcacctccaaattgccccgaaaatcattccactggacccagagcacccatgccagttcagctcacagacagcgcagcagccccaacatcttgcctatagaaagaggtaccagccccacctccctattccctacaccagccacagcccaggacctataggactggacctcccaagagctgcaggccttgcttttccaggagaaacagaggtcatggtttgtatcaaaccacacacattctttcttgtgcctacagatgagactcacaggacacaggcagtgaggctgcaggacagcaggcttgggagagccagtcaagcacccataagatagtagagaagcagcaacagaaggtgaggtttggatttcttctctggggttgtgtgattgctcttgagctgatgtccctctgagtggagaggcaggcctgatctagagagaattccagggcatggccagtcttttcttctgcctcagtaccaaggaagcttggctttaaacccagcctctgaataaactggcctcacctcatgtactgctccacctcaaaattcaactgcccaagctcatgtgctagcctagaaaaaaaaatggcctttaaaattacaggactccttgctcctctttttgagtggaagttcaacgtaataacgatttgttgagcaccacatatgtgcaaagcacttgatagatctaagagggatgaaagaggataataaagggcagtccctggggaggaaacaggaaattggccacacagggcccctgctaggatccagcccctgtaccagagctgcctcaggaggctctttccaccagcctagaatcccaagggcagaggagggagagagaaagaaagagagagaggccacagcagggatggcacagagacgtaaccttaccataggggtcagtggcactgttgtaaagcctcagggtctactaggcaatgttccgctcctgttctcaggccagcattgattaaagctagcccagcaagcttggttggaagatgaggtctccctggttcgcacatggcccctccctgtatccctactccaacactcacacagacacgcgccacagagacaatgaactctgctgaggacccatgaataggccccttgttgcaggaaagggggacaagggctgggctgggctaggcaaccccagcccctcccatctgctaactggaaactcagaaacagaggaaaaggttatggggaggaggggaggccaactactgttgcttagcaacaaggtcccttgtgccaaaaagtgtgccccatgcatgcatgctggcagaattctcccttcctgctgacagagctgtattggagagaccgatattagcatttgttgaaatgtttctgagccctctggattttatctcgcctccatgtgggttggcttttctagcagtctggggctgtcaccatgttggaattgttggggtgatgatggaagatctttgtcacctcttgcccgagggccacatctgtctccccaatgccagggaagtggggcctctacccctgtctgccctgggagccagttgcagcaggagccctcagtgctatcttgtttcaaagcacaaggtgacccaagtgagcccacacggggctaaacacacctgggagcaggcacatctctttagacaaggaggcagaataggtcctggggaaggcaaacacaggtggggcttcctttcctccaactggctgctcaaaaacccctcagaagggacagttaagaatataggctttagagtcaggccttcatccaacctcagttctcccacttcccttactcagcctcacctgtaaaatgaggataatagtacatgcctcatagggttgatgtcagaattcattgagatattgcctataaagcccatagcctggtgtctagcacagactgtattcagcaaacagtagctgctattattattgttgttgttgttgttgttgttgttgctgaatgtcacccacacaggatttaactttttgctccctattttcctcatacactgtattagtcaattcttgcactgctataaataaatacctaagactggacaatttcaagagaaaagaagttctcactgttccacaggctgtacaggaagcacagtgacttctgcttctggggaggcctcaggaagcttccaatcatggtgaaagaaaaagggggagcaaggcctctaacatggcaggagcaagagcaagagagagaagggggaggtgccacacacttttaaacaaccagatctcatgagaactctatcacgagaatagcaccaagtggatgatgaatcatgaaggtttcttgatcatgaaggatccactcccatgatcaaatcacctcccatcagagtccacttttaacattgaggattataatttgacatgagatttgggttgggacacagatccaaaccatatcatacactcagtgtgtcaattctgaacttactctcatcacaccagagcacacataagacaatgaagagatagaggtcagctgtgaattatagaagaaggagagaaatggtggctggaactcagaagcccttggctaggctctgaggtctcctaggacaatactcttcagactacaaacctgaatatctaccgtgtgtcagaaactagcctgggcatggaggatgaacaagtcacagactgggtgcttacagactggaaaaagggatagaaacagatgtaagtaactgttattatgaaaagtgaaataacaaagacataaacccagaggtataggagaatagaggaatagctgccctgaggatacaaagaagagggctttgcaatggaggagacatttgaactgagttttgagaagtgacaaagcaatcacaaagaagggtaattaaaatatattgcacgtaatgtcaatgaaaatggtaggagtaaaatcctctgaaaatttcctcccccctaaaagcaatgagaaaaatggcaaaaaatggtgagaatcaattttttcagaactctggaaattaatcaaaagtttatagcaatctgggaagtcttcgttc

SEQ ID NO: 915684 - DNA, 4001 bp, Homo sapiens
accacaaaagcttatatttggacaaactttacacacaacctacaatctaggaaaatagattgctattaatcttcccaattgactgccctccagactctaaagaaactagtttatagactataccagatattaagctttgtttgtcttgttccatagaaatgtctctcttattaaatacctgtttgcctacatcatatacagaggcctagctttgagaactcatctacaatgccatcttctgaaatgagacacaacaatttaattgaactggactatcccccaaaatgagaggctggtttaatgggatcctttgccgctcaattactagcccgatttctctctccacagacaccaactcagcttatagtgaaacttctaaggaagtttcagacaaaggaaataaagaagaccagggactcacaccccaaaatatggcatcctgtatgctaatcattttaaattaaaggtccctggaaaccagcagatactggaagcagctttactctgataactaccttatctgcctaaagtccagacctgtcaaagaagacaacaattacttctggtctcttccctgagttttcattaacttacttcagtacaagaagaaagatggaagcctgtcaacacacctggacagatttttgtcagaaaccattgtctgctctgcaggcccaacagtcattgtcccaggccactgtatgttctccaggccactgaatcaccctaaaaatcatttacgatccaccttaaaatcacccacattttcccatctcccatattcctatgaaagagggtatataagcatctgtaccccactgggtcattctcctgcaattccctcatgctatgcacgttaaaataaaatttctatgcctttctcctattaatgtgccctttgtcggttgatttttcaacaaaccctcagagagcaaaggggaagcttttccttggcccctacatgctatatggcagaagggaaagtgctttaagtttatgttccgagcagtccctccacccataccaaggaagcacagcaaggagcttgggacacttcccaaagaaatcccaaagatttctttacaacgtattttttacaattcctttacagtagcccccaaattttatccactttcgcatcttcaggatcaagcagagtgcctagagtgtacactctagaaatgtttattgaattaagaagcggctgacagtgttgtgcaggtagtgtggccagaagagtagtttcaagtcccaggcactcattagttgtatgacctggggcaagtcacctaaatataccgagatccatttcttcaccaatgaaacaggaatattactacttgccttgtctaccttactggctcctcaggaggctttacataatgagcggcactgtaaaacgttatacacgtgtatgtacagttttgatagggctgttaattagtctcaatggtgaaacagaaagaaacctggactcaacagtcaaaagctgttgggccgttgtgcatgggctacgactaacatgttccgttttcccatcttaaacacaaagtttagactcgatgatggttcggaccctgcacttaatagtctctaagtccgctacaggctcggaacctcaggtgtcctcagagaggtaaaccccagggttcccagatacacctgcaagggcagggacagtcaaggtcgcggggtactaacacgcgggaggctcacccagtcaaagtcacacgggttaccgtcttcgcgttgggtgggcagaccgtggcagagcggcggcagtttcctcacgagtaggaaggcagcagagagcagggccgacagaaggtagtaaggttgggcgagccatcgtgaaagtcgcggcaccgaatacacgagagcaattagaggtgccaagaccgccatcttttcggccgtaacggccactgctcgccggcgtcgtaggtctcgccccgcctcccccaccataacgactgctattgggctatatcgcaaacgtacggcctctaaacccggatgtagttctctgaacgctgtggtaggtcagaacccaaaaaagaacttaatattttattggttagtctagttgtcgctttatccgcctaagtcattttattggactgtagcaagcagagctagcagaagactctaataaggttaaatagcacttcctgaacgttctcataaggcgacggaagtagttgttgaaaaaaggtaggcggtgcctgaggcatccaatgacaagcggctccttgagaaagggcgggggggtactccttgaaagcattgtccaatgaaaattaccaacggcagacacggagacagcgccggggcggagggtacgatggagaatttcacggcactgtttggggctcaggctgacccaccaccgcccccaaccgcactcggcttcggaccaggaaagcctccacccccgccaccgcctcctgcgggcgggggacccggcacggccccgcctcccaccgcggccacggctcctcctggcgcggacaagtcaggagctggctgtggccctttttacctcatgagggaactgccaggtgagtactcggccttgccaaagccagccaatcaaatcttagagaggaggtgatgggcgtggctctcagccggctagcggaggtgcgaggtaacctaggcaacgcatacccggactgtggagccctaagtcggaagcgctgttaggattcacaagcagagggatgacttgaattcaaccaggatgagttgaattcaaccaaagggatgaatggcgggcaggggcgtagtgcatctccgttactgtcttttgcaccatgtccaggctgtgtccctgacactggtttatgtctctctaaaaaatgacctagggctgggcgcggtggctcacgcctgtaatcccaacactctgggaggcggaggcgggcgaatcacctaaggtcaggagttcgagaccggcctggccaacatgatgaaaccctgtctccacaaaaaacacaaaaattacctgggcgtggtggcgtatacctttaattccagctactcgggaggctgaggcgggagaatcgtttgaaccccgggaggcggaggttgcagagagccgacattgctccactgcactccagcctgggcgaacgagactccgtctcaaaacaaacaaaatccagggtttgagtttggaactcgagaggcctgatttaatatctttggggacccaaagttttagttacaggtctcccacagacttgctattggtttggggcaagttgccattcttccttctaaggttccggcatttcctggtctgatcaaaaaagggataagaatcgaaccaaactcttcattcaaaaaattattttgttgagtacctatgtaccaagcacttttctaaatgctggagacagttgtgaacaagactgacaagatgcttgccttttttgggatgtacatttcagtggaggaggcattgtaaacaagataatgtcagaaagtggttaatgctaggaaaagaaaacatgataaaaattgaaggtggccaggcgcgttgctcacgcctgtaatcccagcgctttgggaggccgaggcagaatcccttgagcccaggagtttgagaccagcatgggcaacatggcgagacccagtctctacaaaatatacaagattaaccgggcgtggtaatgcatgcctgtagccccagctactcaggaggctaagggaggagaatcgcttgaacacaggaggtcgaggctgcagtgaaccaagattgtgccactgcactccagcctgggcaacagatgagaccctgtctcttaaaaaaaaaaaattgaggggcagaactactttagctagagtggccagagatgctctcttcacatagctaacatttgaactaaaatgtaagcatagacaaagggccagccatgtatggacaggagggagagacaattgtagatacaagaaatgaggtcagaaaccctgatgtgagaaaaagcttagaatat

SEQ ID NO: 915685 - DNA, 4001 bp, Homo sapiens
gcctgtcacatgagcttcaggatctgatataccaagattcagtgctgggtgggtctaccactttctagccctgtgacttctccaagcctcagtttctccaactgaaaaatgggattattgagaccctgagggggcttacatgaaatagtacatgaaataggcttagcacaatgcctagcacataataagtgttcaacaaatgttgcctattattactgtgattccattcagtgtcaccaatgagctaacatccctgataaccacctcctcctcttccctgaccccaggctaccagcattcccagaccattccttcactctcccaggccctagtcctgtcacctgttcttcagatactccaaccacctcctcagttcccatcctgactcctgaagcactctcccacccacaaaaacatggagaccctgggggatagggccctgcacctctcatgcaaggcggaagtttccctcacctggtatgcagagccctgaggacaacccaaacttctccaacctgcaaggggcattgcctcacttaaagtcacccactccagctggtctgggaagacagcaccaaatccttaaaagggacccccagtgctcatcctctgcaaaatccaacacccctcccctaacgctgaccctgccccaggtgtttcaaagatgggagagggtatgaagacagtagagaaacccagtactgtcaacccattggtcagttaaccaccacggaagactgcccactgtgggtgggtgaataactgtgcagagccaggccaagtgtggtggggggaggggcacatgatagaaaaaataaaattaaaacacaagattgtttccttgtccttgaacattattactaggaacatagtgtgggtggttggagatggaaattaattggctcagaaccaaaaaaatcctttcacctggggttctgatgggcccctctgcggtatgaggggctgcagcaatgaaggcgggctcagagtccccaggtgcggaggtggccacagcaactcagagaccccagccaggggccccaggtgaccaaggccaccaaggctgtggccagaagctgcgattcgcagcggttctgagcactccccaccctcaagagaccagggggtagagggtagcagggtagaaacgagctgacccctggcagataaggcctccagaagggctgggcagctccagccccggaggggactcggcgcaggcggggtcgcccctatggaccccaggatctccagccggatccgaggctagagaggtcggcagggacagcacgtaaactgctggaaagagggagggccaacgggaagatggaacagccccgggcaatgggctgtctggaggggcccagtggggagctctggacacagaagggacggcggcagccgaagaggaggaggaggagggggctgcggtggcggcagaagcggaggacctgtgagcgggctgtgaagcagccggcgaacagacggtgggctgcagacgtcgatcaggtgggggcggactggggtggctgggggcgtgccgaaggagccgggggagggggctagcgcggcccggaggaaggggaggcaggggtccctccagcggctctgcccgcccccggccccgccccaagccctcgccccctcccccctttcttctggctctgccagcacgagctccaagccatgcgccctccgcctccgcgcacacgcgccaccttcccccgggcctccagcgtccccagcgccctcggcccctgcaaactttcctggtgaccccccgaccaccaccacctcaacccgaggtgtcggctggaaagcacccactccttccatgcccctcccccgccccatcccggaccccgccccctccttcgcccgaccgcccccgcgcactcacgcgctcgcccggggtccggctccgctcggctcggggccccgatgccagtccccgccgccgccgccgctgctaccgccgccgccgccgccgtcaccgcgggacgaagccactgcgagccccggcggggccccgccccaactccgcccaggtccacgcccccagggcgcttcatgaatatgcatgagccggttggaacccgggagtgggaagcccgtgcagaattcgtcccaccgtcggcaaacaggcgcggcccagcactcaattattcatgaggcttgcagatgaggggcccgccccagtctcagaccggggcgaaactgacgcaattcagccgggagcgctcgggtaaaatggccaccgagacgactgcctagagaaactgccttggcggcccctcccgggctccgccgcctgcacagagcacagtatcatcgagctacgccggcaagaaggtagccgccggctgactgaagcggcttcctgatacaaccacctgagtgctgagaacgcgcgcaacgtggccaccctcctgtgtcaattcagatttagagccaccgtgaagaagtctggcagctctgcattcctcattagtgacctttatctccttttaggccccttctcagacatgggttcctccctacactgaagtttgtatacccccttcttcccgtaagaacaaaagcttcacatataactccgtactttgttgcaccaccaccaggctgcaaccaccaccactctacgcacacgctcatcctccccgactctccaggctcaggtttccactcccccggctgcgggaaggacagtcaatcctgatttcattatcgaaagccttggaagacccttgactcataggtaaggatgcagccaagagctgcctccccctagcttggttggctaatggagtgtaactgggagaaacttcctaatcagatcagctctcatttctagactctcaggtggcccatccgggcagaggcgggtgaaaaccaatgctcgtccagccgggaacagaacaggatgtacctcgagacttgcttcccggctggccaggaaggccctgcccagtctgaccagagcagtaaacaccaccaataaaagtgggagcaacacaccaaggctacaaagaaagcatgaggacatggtttccaaagtcagttccctttattaaatcattttcacagaccagaaatacaaaatgaaagtagaaataggccccaggtaggagctacaggcctggcctcacatgacccctgctccagcaacttgaacaggacaagcagcagctacatccttaaggtcgggaaagtaagatgaggatttggatcctgcattgccctgcctcccaccctatctctccccaaattataaacagccatccttgggaagcagcagagttaagacgtctccccactgccctagtgacatacacaccaacaggagagcatgttcagatggcacagaatccagggactgcatttcatgaggagaaactggtaccaaaatatgggtggggagtcggggggtgtgagaaggcaagcgcaaagagaaccttcctccgtttctactcatcggatcctgacgctgagtcctctgagctggggggagtactggctagttcttcttcttcagagtcctgaaaaccaaaggtgtcttaagggaaaagctggagtcctgggtgccccacccactcttcagtgaagggcccgcaattccctaccgcccccaactacagcaccccccttcagaacctcagaattccaccatccactccaactcattactcttacagaccaaccccacacagacacacatgcccctcaccctgcccagcccacaggccccacattcctgccgcacctcgctcctcctcctcttctttttgctcttgttctctcccgaagagctctcatcactagacacaaactctttgctcttgaagctctcgcttagctgccttgaggacgacttggatgatgagcccctagagggcgtggatttcttttccatctttacctttactttcttcttcttctttgacttgtccctgtattggcaagagggaagaggagctgggccttcaggtcccctgtcacca

SEQ ID NO: 915686 - DNA, 4001 bp, Homo sapiens
tcctccagtcacccacgtctcgcaggtcccgctcctgtggaggagagggcaggagagagctcaggctcacccacttatgcacgcaccctggtccacaccaccttcagcctcagtttaccctctgcattgggcagtggagtgtcccctgcatggcaccctggaggggcagtggtacagggcccccggcagggcaggtgtgggaggtggtccccaggcggggcaggtgtgggaggtgcttccccggcagggtaggtgtggtggtgctccccccgtggcacgcaccttctctgtgtcctccttcttgacctgcttcaggttggccctcaggtccatgcacaccttgtgcttcgagcccagcagggccttgagcatggcatcggccgacatgcgcaccctccgcagtgggggccgcttgaacttgccccgcagatcaaatagcttctggttcatgtcctccagctgtgggcaggggagccgggtgggagcccgaggtcccggtggtctcggcctccccggcccgccccgcctgcccgctgggccaccgcctacccgcctgccgccggcccgccgccaccactcacctccttgctggtcttctgcaccctcacctccatgtcgtacttctcctcttcagccgcatcgatcttggcgtgcagctgtttgcagagctcctaggggtgggtgtgggggcgggcggccgtcctgacacttggcagccacggtcacctgcccctgccctgaccaccccactggccctcttgacaagtggggaaactgagttagcaggcaggcctgctgctggggaggcggggtggccggggaggggctggtacctgcacttcagacatggagcccgggatatgcagcggcgggcagtgctccgccaggtagttctgcttctctgcctcacggcggctctcctccttctccagctccgtggccgctatctgcagcatcacactctgcggtggggcaggcggtgaggggctgcagccagctcccctgcagacccacctgggccacccccccgggagcccacacctaccttcaggtgctgcctgcgggccgtgatggccctgttccgcttctgcagggcaggggacagggggtcgagtcagggcctccaggcctggagcacccccacccccttccacgctccctggccaggtcaggggctccggctccgggaccagcagagcctgggggctcctgaggccatgatgggcaggctgggcctccctggccccagaccttgcactgggacatggtgctgtgtggtgtgtgacactttgccaggtggcacatggtgctgggaggccagaggctgggggagaggagggccagttgggggcaggtcggccggtgaggtgggggcgggaagtgcaggaatcagaaagaagaagtgattcccctgtgaccaggccacagccacacttcccctgccccagaaggcttggggcagccacttcctctctttcagcagcgtcttggtgggtgggtggggcacttttgccagcggggagggccaggccatcttctctgggccttagggccttgaggctgtgacctatgacctatgctgagttgggggagccccctcctcgtcatgttttgagcccccagcaactacttacctcctcactgtccagggagggaggacgcaggcaggacggggagagaagacagaggttagggccatggctggcggggtcggagtgtgtgatggggtggacagggcaggaggtgggcagggtcactgtatgggggtacaggggtaccacttactctcccatcctgaggtcctgagcttggagcctgtggggagaggaagacagaggtgttggccaggcccttgccaccgtgatgcctgtgcccatcaggtaggtggtgaggggttcagggctcctgatgacagccccctcccgcccaccccctactctcacctcctccccctactctcacctccttcaaggacaatgtcttggaattccccagggtgagaagtaagaggagaaagtgttcccaaaatgtcccaggcatagcctgaggagctgcagctgtccccgagggagggtgggatgggccagcgcaggtggccgcctgagtgacgctgttatttttaaccctctctctttggctttgggcctaagtgcatggaagaaatccctcctcagtttggcctgggggctcaggttctggggcttcttgacccctaaactctccttccagggtccccagaggtgaagcctggtggtcagggagtgtctaatacctgcctctcgctacagctgcctccccaaagcctctccttctcactcccggacccgtgcaggccccaaagggggctgctggtggcatcccccaggcccccagacccccgccccaggaagtcctccctcaaaccagctcgagccacgccctgtcccccggcctcggcgggccgggctgggcctcacctagaatctgggcagcagggctgggagcgaggtcaggccggcagcggcgagttgggctggtgggcccagggggaggggtataaatggcctcccccaggctgggcccctgctcagaaagggcatagagtcctcctcagaccaatgggggcgtggagagccacagagacctccccacctgtccggccgcctggcctggccgcgtgctgccgcccagtccaagaagtcttggtggggggtgccgtggctgggctactctatttagggctcggtgacgcgctggagatgcctctgtcgttctcgtaaggagcctgaggacagtgtccctggctttgcctgtggcctcagccgggcacacagctcgggtcagctgaggggtagctgcgagtatccacacctcgcctcagcccatctcacccgaggtcagcgtccagtccaccaacctggctgcttgctggcgacagccacagcctctccctgcggggccagctccccggctcagcccctgcaatgggtttcccacttcagcccaggcctgacccccttctgcaagcctggcttctggggtgaggcctggacctccagatgtggccttctgggccctgccacagtggccgagggctgggggctgccccctccctgcgtgatgctatcttcctgcctggggagcaggaccaggagtgaggggcacgccgcacgtgcctctgggcccctcccgcctgcccagaacgccctgctgcagtccccttgccgggcgacttggaacacatccttcaacctaaggagaatggcgccacctgcattgggagcctctcacacccgtgggggcttggggccctcctggctgcccgggcaggcctggcattgcccttttcacccaggcccgaggccatcgcccccccagcccccaggcccccgccctgcagaggtcccctggaccgtgacttggcaccctctcggagtgggggctcttggccccagccctgccggcttcgcagccccgtggggaggatcagaggagacagcagcgtggaggccccagccgctaaggcagcccagatgtgtggggactgggaggggcatccggccaggactgagcccctaaaggccccagcggcttccgaaggcatctgctgccccctgctgctcatgcagggaaggccctgcagcacaggtctctgaggtgttgggggtcctccctccatgctcaccagcccccagacaccattgcccactctgtccctacagggctggctctagcccgccccatcccatgtggtcccgactctctggcccccacctccccggtcttcccaggcggcccggagaggggagatctgtgctccccggggaggttccccacccctacccgagggtcaagcagggaccggtcagaggcctcagggcctggctgagtctggagaggagcccctcccccgtccttgtcaggggaccctggtgagcgggcccgggccctatttctgcatcccctccaggctccagccggacacacagtggcaggagaaggcgtttattgcagtggtcctg

SEQ ID NO: 915687 - DNA, 4001 bp, Homo sapiens
tggacagcagcctggggtctaatgtggcccttggcttcctgcctcagatgagctccctgaggaggggcagcttgggaggcatagggggctgcccccagcactgcgggggccacacgtgtgtcacatgtgtggatctctctggagccccgggagggcctttgcgtggctgtgcaaatgtgagacccacttatctcaggaactcccacccagacctggctcggtcccacagcctccatccccagccctgcatgttggatgtgcccaggccgagccccaggaacgcctggggcactatcagggccctcaccaaacagccccgtgcagcctggggtggattcccctgtaggggccttcccaggctcacctccttgctggaagcagcttccctcccaacctgaaatcccaggccccgtgtggcctcctcccaggctttccccgctggccactgaccacactgcaggccaccgatgcgggggcccagagcatggcccaagaggctggggagagccagaccagaccagccatggggattcaaatcctttattgacggtggtggtgaggccagccctccctggcaggctctgggtgcatctccctagtatgttctgctgggagccgggcaccggggcaggcgtaggggcagcgagtggcctaggactcggactcaaacatcttcttccggccctccatgccagacttctcctcgatgttcttcctccagtcacccacgtctcgcaggtcccgctcctgtggaggagagggcaggagagagctcaggctcacccacttatgcacgcaccctggtccacaccaccttcagcctcagtttaccctctgcattgggcagtggagtgtcccctgcatggcaccctggaggggcagtggtacagggcccccggcagggcaggtgtgggaggtggtccccaggcggggcaggtgtgggaggtgcttccccggcagggtaggtgtggtggtgctccccccgtggcacgcaccttctctgtgtcctccttcttgacctgcttcaggttggccctcaggtccatgcacaccttgtgcttcgagcccagcagggccttgagcatggcatcggccgacatgcgcaccctccgcagtgggggccgcttgaacttgccccgcagatcaaatagcttctggttcatgtcctccagctgtgggcaggggagccgggtgggagcccgaggtcccggtggtctcggcctccccggcccgccccgcctgcccgctgggccaccgcctacccgcctgccgccggcccgccgccaccactcacctccttgctggtcttctgcaccctcacctccatgtcgtacttctcctcttcagccgcatcgatcttggcgtgcagctgtttgcagagctcctaggggtgggtgtgggggcgggcggccgtcctgacacttggcagccacggtcacctgcccctgccctgaccaccccactggccctcttgacaagtggggaaactgagttagcaggcaggcctgctgctggggaggcggggtggccggggaggggctggtacctgcacttcagacatggagcccgggatatgcagcggcgggcagtgctccgccaggtagttctgcttctctgcctcacggcggctctcctccttctccagctccgtggccgctatctgcagcatcacactctgcggtggggcaggcggtgaggggctgcagccagctcccctgcagacccacctgggccacccccccgggagcccacacctaccttcaggtgctgcctgcgggccgtgatggccctgttccgcttctgcagggcaggggacagggggtcgagtcagggcctccaggcctggagcacccccacccccttccacgctccctggccaggtcaggggctccggctccgggaccagcagagcctgggggctcctgaggccatgatgggcaggctgggcctccctggccccagaccttgcactgggacatggtgctgtgtggtgtgtgacactttgccaggtggcacatggtgctgggaggccagaggctgggggagaggagggccagttgggggcaggtcggccggtgaggtgggggcgggaagtgcaggaatcagaaagaagaagtgattcccctgtgaccaggccacagccacacttcccctgccccagaaggcttggggcagccacttcctctctttcagcagcgtcttggtgggtgggtggggcacttttgccagcggggagggccaggccatcttctctgggccttagggccttgaggctgtgacctatgacctatgctgagttgggggagccccctcctcgtcatgttttgagcccccagcaactacttacctcctcactgtccagggagggaggacgcaggcaggacggggagagaagacagaggttagggccatggctggcggggtcggagtgtgtgatggggtggacagggcaggaggtgggcagggtcactgtatgggggtacaggggtaccacttactctcccatcctgaggtcctgagcttggagcctgtggggagaggaagacagaggtgttggccaggcccttgccaccgtgatgcctgtgcccatcaggtaggtggtgaggggttcagggctcctgatgacagccccctcccgcccaccccctactctcacctcctccccctactctcacctccttcaaggacaatgtcttggaattccccagggtgagaagtaagaggagaaagtgttcccaaaatgtcccaggcatagcctgaggagctgcagctgtccccgagggagggtgggatgggccagcgcaggtggccgcctgagtgacgctgttatttttaaccctctctctttggctttgggcctaagtgcatggaagaaatccctcctcagtttggcctgggggctcaggttctggggcttcttgacccctaaactctccttccagggtccccagaggtgaagcctggtggtcagggagtgtctaatacctgcctctcgctacagctgcctccccaaagcctctccttctcactcccggacccgtgcaggccccaaagggggctgctggtggcatcccccaggcccccagacccccgccccaggaagtcctccctcaaaccagctcgagccacgccctgtcccccggcctcggcgggccgggctgggcctcacctagaatctgggcagcagggctgggagcgaggtcaggccggcagcggcgagttgggctggtgggcccagggggaggggtataaatggcctcccccaggctgggcccctgctcagaaagggcatagagtcctcctcagaccaatgggggcgtggagagccacagagacctccccacctgtccggccgcctggcctggccgcgtgctgccgcccagtccaagaagtcttggtggggggtgccgtggctgggctactctatttagggctcggtgacgcgctggagatgcctctgtcgttctcgtaaggagcctgaggacagtgtccctggctttgcctgtggcctcagccgggcacacagctcgggtcagctgaggggtagctgcgagtatccacacctcgcctcagcccatctcacccgaggtcagcgtccagtccaccaacctggctgcttgctggcgacagccacagcctctccctgcggggccagctccccggctcagcccctgcaatgggtttcccacttcagcccaggcctgacccccttctgcaagcctggcttctggggtgaggcctggacctccagatgtggccttctgggccctgccacagtggccgagggctgggggctgccccctccctgcgtgatgctatcttcctgcctggggagcaggaccaggagtgaggggcacgccgcacgtgcctctgggcccctcccgcctgcccagaacgccctgctgcagtccccttgccgggcgacttggaacacatccttcaacctaaggagaatggcgccacctgcattgggagcctctcacacccgtgggggcttgggg

SEQ ID NO: 915688 - DNA, 4001 bp, Homo sapiens
ccgaggtcccggtggtctcggcctccccggcccgccccgcctgcccgctgggccaccgcctacccgcctgccgccggcccgccgccaccactcacctccttgctggtcttctgcaccctcacctccatgtcgtacttctcctcttcagccgcatcgatcttggcgtgcagctgtttgcagagctcctaggggtgggtgtgggggcgggcggccgtcctgacacttggcagccacggtcacctgcccctgccctgaccaccccactggccctcttgacaagtggggaaactgagttagcaggcaggcctgctgctggggaggcggggtggccggggaggggctggtacctgcacttcagacatggagcccgggatatgcagcggcgggcagtgctccgccaggtagttctgcttctctgcctcacggcggctctcctccttctccagctccgtggccgctatctgcagcatcacactctgcggtggggcaggcggtgaggggctgcagccagctcccctgcagacccacctgggccacccccccgggagcccacacctaccttcaggtgctgcctgcgggccgtgatggccctgttccgcttctgcagggcaggggacagggggtcgagtcagggcctccaggcctggagcacccccacccccttccacgctccctggccaggtcaggggctccggctccgggaccagcagagcctgggggctcctgaggccatgatgggcaggctgggcctccctggccccagaccttgcactgggacatggtgctgtgtggtgtgtgacactttgccaggtggcacatggtgctgggaggccagaggctgggggagaggagggccagttgggggcaggtcggccggtgaggtgggggcgggaagtgcaggaatcagaaagaagaagtgattcccctgtgaccaggccacagccacacttcccctgccccagaaggcttggggcagccacttcctctctttcagcagcgtcttggtgggtgggtggggcacttttgccagcggggagggccaggccatcttctctgggccttagggccttgaggctgtgacctatgacctatgctgagttgggggagccccctcctcgtcatgttttgagcccccagcaactacttacctcctcactgtccagggagggaggacgcaggcaggacggggagagaagacagaggttagggccatggctggcggggtcggagtgtgtgatggggtggacagggcaggaggtgggcagggtcactgtatgggggtacaggggtaccacttactctcccatcctgaggtcctgagcttggagcctgtggggagaggaagacagaggtgttggccaggcccttgccaccgtgatgcctgtgcccatcaggtaggtggtgaggggttcagggctcctgatgacagccccctcccgcccaccccctactctcacctcctccccctactctcacctccttcaaggacaatgtcttggaattccccagggtgagaagtaagaggagaaagtgttcccaaaatgtcccaggcatagcctgaggagctgcagctgtccccgagggagggtgggatgggccagcgcaggtggccgcctgagtgacgctgttatttttaaccctctctctttggctttgggcctaagtgcatggaagaaatccctcctcagtttggcctgggggctcaggttctggggcttcttgacccctaaactctccttccagggtccccagaggtgaagcctggtggtcagggagtgtctaatacctgcctctcgctacagctgcctccccaaagcctctccttctcactcccggacccgtgcaggccccaaagggggctgctggtggcatcccccaggcccccagacccccgccccaggaagtcctccctcaaaccagctcgagccacgccctgtcccccggcctcggcgggccgggctgggcctcacctagaatctgggcagcagggctgggagcgaggtcaggccggcagcggcgagttgggctggtgggcccagggggaggggtataaatggcctcccccaggctgggcccctgctcagaaagggcatagagtcctcctcagaccaatgggggcgtggagagccacagagacctccccacctgtccggccgcctggcctggccgcgtgctgccgcccagtccaagaagtcttggtggggggtgccgtggctgggctactctatttagggctcggtgacgcgctggagatgcctctgtcgttctcgtaaggagcctgaggacagtgtccctggctttgcctgtggcctcagccgggcacacagctcgggtcagctgaggggtagctgcgagtatccacacctcgcctcagcccatctcacccgaggtcagcgtccagtccaccaacctggctgcttgctggcgacagccacagcctctccctgcggggccagctccccggctcagcccctgcaatgggtttcccacttcagcccaggcctgacccccttctgcaagcctggcttctggggtgaggcctggacctccagatgtggccttctgggccctgccacagtggccgagggctgggggctgccccctccctgcgtgatgctatcttcctgcctggggagcaggaccaggagtgaggggcacgccgcacgtgcctctgggcccctcccgcctgcccagaacgccctgctgcagtccccttgccgggcgacttggaacacatccttcaacctaaggagaatggcgccacctgcattgggagcctctcacacccgtgggggcttggggccctcctggctgcccgggcaggcctggcattgcccttttcacccaggcccgaggccatcgcccccccagcccccaggcccccgccctgcagaggtcccctggaccgtgacttggcaccctctcggagtgggggctcttggccccagccctgccggcttcgcagccccgtggggaggatcagaggagacagcagcgtggaggccccagccgctaaggcagcccagatgtgtggggactgggaggggcatccggccaggactgagcccctaaaggccccagcggcttccgaaggcatctgctgccccctgctgctcatgcagggaaggccctgcagcacaggtctctgaggtgttgggggtcctccctccatgctcaccagcccccagacaccattgcccactctgtccctacagggctggctctagcccgccccatcccatgtggtcccgactctctggcccccacctccccggtcttcccaggcggcccggagaggggagatctgtgctccccggggaggttccccacccctacccgagggtcaagcagggaccggtcagaggcctcagggcctggctgagtctggagaggagcccctcccccgtccttgtcaggggaccctggtgagcgggcccgggccctatttctgcatcccctccaggctccagccggacacacagtggcaggagaaggcgtttattgcagtggtcctgcagggcggcctgggcaagtgcctgggctcagcggggagacagaggcatgtggtgcattcaggagtggggcaagggcaggcgcaggcgaaggcggggctgcagggccagcatgcggtccacctccctggctggccgcagggggtgccgctgggcaatgggccgccgggcgtgggccagcatgtctgcccagtgctgcaggggctgccccgaggcccgggcacccaggtgcaccttgcctacgggctcagttcggagcggcaggctgcggtcccagacagccagcaccaggtccacattctgtgcagagacaggccagaggttggagttgggggagaaagaccacagtcatcgtggtctggcactgggtctcgctctgcccctgcctcccggtggcccacctggacctggctgaagggcaccaggaaggtgaaggcctcattgaagtagggggccgccgtgccctttttggtggctgtctttctcttc

SEQ ID NO: 915689 - DNA, 4001 bp, Homo sapiens
gaatctcttcctgagactctgctgcccctcaggttaagcctcttgtaactgccacggctgggccaggctctcctcagtcctcagccccacgagccagtgttgtccaggcccccggtgtgacccagtcccaggctgcccaccagcccctcgtgctgtcctcccagctggttcaggccccaaacgccacagactcctctagggccatcctctgtaaggaggaggagggtcagtgaagggagggagcggagcctggccccgccctgctgtgcccagcccgacgctggcggggcagacacctgtcggctgccacaagatgggggcagcgtggccctcgcctggggtgggttatttataaggagccagtggcagctgaggtgtccagaaataggcaagacgtttctgcccagaaacccaagacgtgggtgaggcgggtgtgacagcccagccctccttggcccacagctgccccctcaccctcgggcacccaggccctccccagctcctcatatttccctcctgtccccccaggccagagtcacatgggtgccccaacaccctcaggcagggtgacctccaggccccccgacgtgcgctggaaaggcccactctccaagtggggaaactgaggcacctggttttctgctgagcgcctggaagcaacacaaggctgttctgttccccccagtatggcctgtgtcattgcctctgttgcggggaggggctggtggcaggggtgtgctgggggcaggggtgtgctgggggcaggggatggcatttcaacagctgagacgcaaagcaggtgtccagttagtgcctgccttggaggggctgcgtgaaaataacctatgcggtcagtttcttcgggcacgtatgcatcacctttccctccttgggaggtgacggggccagggcagggtggggaggcaaaagccgctgccccttgcttgctgtggccctgaccatgcccccagacctgttctccacccagccaacctttgctttgccccatgtccctccgtggacttcaggaggggcagccaaggcctgatcagacggcacaagtcagggggaccgtgtccagggcagggagggtgggtgggggctcttacgagcgccagcttctccagcctccagccagggggacgcgatgaagcccagcccctcactcttgccccgtcctgccccagtccagcccctgtccacttctgtcctgcacctccagacgctggcccccaaggctgcgtgggctttagacgcccccaccccaacacactcgggctggccatacaggagcccctgccctcctgtcctcgttttcatctctacaaaatggcggtgttggaggcccaggtgcgagagctgcatggcaaggccaggacgggcctgggcaaatgtctgcatggcgaccacaagctggcaacctaagccctggcagcacccctgcacagcctcttccctgccgctcacagcccgcacctctctgcctcctgccctcaggccactccctagcactgagcttccctgagccccgacttgccccctcctggcctcccacactctgccttcttctgcatcctcccggtgctgagaccatcacaccaccatgtccgcatcccagactctccggacgctggagcagccacctgggggctccgagccatgatgcttcgagatgctcggcaccacacggacctgggacctcagcgccccaggaccccagagtgtccctggaacgaggggctgtccacccgcacgcaggaggccccgtcggccccagtcctgggtggccgctcctgcctatacccacctgcgggtcgagtgtgagaagggctggagctccctgtggacagcaccggctgcaggcactggcgcccggctcacaccctcgtgttatagtgacatttgatcttcctaggagcccattggccagtgactgggtggccggggtgtgtgcggagtcttgctggggggggctatgcccgtgcaggccccttaccaagtataggaatggccagaggaggaggctgaaggaggccaggatgcagaggacgtgcttggagaaggaggcaaggtcctccctccgcctccaggaggtgtcagctgctatttttactcccagcagcgggtacattctggatgggctgaggagggaggaggaaggtgttgggtggccccggggcaccaagccgaggctctctttgggccaaactagtgtgggggtccccagagccaggctgccgggtttcccacccccccgccccttctctctgagatgttctgtgggagtaaacatttgtccaggaaaagggtccgcacagccggggtcccctcccgccgcccggcccaatgccccaggcccttcgctgtctcccccggggaggaagcagcctgaggcctcggagaccccccatggaactgaggccaggcccccaccctatctgagaccctcttagaggccagctctgctttcctggctagacaccgttggggcctacacaataagcgggcgagggacatggccaggctggctgcagtccgagtctgccatacctccccccggggctgctgccattgcagggggctacacatggagtttgctgggtaagggtctgggtcctccctctaggccctttctaaccctggggccccaccctgggcactcgcagtggccgttaccatctgtgccagcatctcccacaggctcattgtggcgtgtggagactggttttctttcctcaggactccaggtggcaccgtccgactagcagacatccttcctggcctctgatggcctgtatgctggccagtgaggccaccagattggataaccctgcctcttggatcagggaaactgaggcaccaggtgggggagagcagtctggcaccctgacccaccccctcactcccctcagaccccacaggctgagcgtgggcggtggtgtctgcggaactcttcggttcaggcacagattggttccttcttggccagcgcccaggacaggggtgagtcccgagaggcacagatgaggtccctgtcctccccaggcttagagtcagggacaacaggataacccggcaggggctcacagtgccctggggccgggtcgggggccttccggaaggctgtggttggcacctcattccacccctccatggaagagcgaggccgcagagcccagggacaggcaaggtgtgcctggggtcacacgacaaggcgggctggccccaggctgccatttcaaaggacagggccggtcccctgcctgcctcccgctgagtgcccggcactgggaaggctcttggagctggggttgctgggaacgtcgccgtcctcctgctctgggtctgtggcttcgtctgcattccacgccttcccctccctgtccatgtcctcgatgggcaaggctttgggggccacaaacagccctggcccctggatatctgtgaccagcttcctgcccactggggacatctgcagaactgctccctcagaggcacgtgagcgggtccctgggggtcagcgggcccaccccatcctctcccatggtggggccaacctccttttccaggctcgctctgccggcttctctaacggagccctgagcccaccattctggttacacgtggttcagtctgcaggcctaggaagcctgtgcccacccaagccctcacccaggccaggggtcctgaggggcgcacctgaaggtgggtgtgccataaccctgcactggccccgtgtggccagcaggggaaggtgctgcccgcccagctcctggagctttggcaggcgctctccgcccagccagctgaggtcagagggatagggcaggttttattttgggtatcggcgacctccccctcgggcgctgggcctgaggcgtagcagggactgcacagagcaggcaccagcggcctcgagggcctgcaccaggtaacccatgccctgctgccatctggccggaccgggatggtccaaggagaggaggcagggcaggggcctc

SEQ ID NO: 915690 - DNA, 4001 bp, Homo sapiens
tgctctgagtctcctgttaggcagaaaggagcacttggctgccacggcaacttgcggggactcactgtggtggagtaaagatgaagaggtagagacgctgccatcagaggccgtccaggacctctgccgacccgtaggctccacacctgagtctcataagtgtcaggaggtttccttcaaagtcctcagaaaaagcagctatgcccaaaacctggggcttcattctaaactcagaaaaaatgttctacctgaagaattatctcctcgggagaaacaccaggacttgtggatacagtgttaagggtggggagccctggtgacccctccaccacgtccagtactgggctgcgcgagggcagggaccttggagcatcgtgaaaaaggactttttccacccacggcatgttcagagccactgttgataaaaactgtaccgctcacgacagcctgccccagcccagcctcagtgagtgacacggtttgaatctgtgtccccgccaaatctcacgctgaattatgatccccaatgttggaggtggggcctggcagggtgggtgtgtgggtcacagggacagatccctcgtggcttggtgctgtcccggtgatagtgagttctcacaagatctggtcattacagtgtgtggcacctccccacccccaactctcttgctgctttcgccatgtgacgtgtaagctcccacttggccttccgccatgactgggagcttccagaggcctccccaggagcagatgccggcaccatgctacctgtacagcctgcagaaccgggagccaattaaatctcttttcttacaaattacccagtctcggtattcctttacagcaatgcaagaaggccctaacagtgagccaggaggccactcacgccaggagcccatcatctctgagtcagtctacaccagctctcctgcaatattaatgctatagaagaaactgccaggcaactctcaggagagaattcagagcaggaaaggttctctgaagttcctggcgcctatcctctcatttgcaaatgaagaaactgaggttttgcacggtggccactaaccggggacacaattgggcccaagaagtggtcaccactgccctcactctgtgtaaatgagaaagaggaaacagccatcatctatgggaccaactagagtgcaggcccgcctccacctggggggccatcagggtgcgggacccgcctccacctgggggggccatcagggtgcggggcccgcctccatctagggtgccatcagggtgcgggacccgcctccacctggggggccatcagggagcagggcccgcatccatctaggggaccattagggttcagggcccgcctccacctgggggaccattagggtgcggggccctcctccattcgggagtcagagctcggggccgcctccatctgggcaccgggccctcctccatctggagaccattggggagcggggcctgcctccctctggggcaccatggggcacggggcccgcctccatctggggctcacaacgggcgcaggccccctcccccggggctgcctccccaaagctctgccccggcacggcggtgagctcaagcctcctgcagcgtgggcgcgtccgtccggcccgccccgccccgaggtgtggacgccgccgctcccctccggccggccaggcgccccgcgtgccccgggagagccgcggagtcggcccgccagccgcagctgagcagtagccctgacccaaggccccgcccgcaaccgcaggtcaccgcccccgcccgaccctcgcccggctgcctcaccggcccgcgctgagtgctgacggtggtcgccatggtgctgcggcggcccccgtggctcgccgacccgacagtgacgcgccgggcgacctcctgcgcccccgccggagcctgcgacggagacagttgtcacctcgaggccgccgccgccacagtcagctgacagccgccgcgccccgcccccggcaccgccccactgcgcaggcgccgcgccaggcaccgccccttccggctctcgcgcgcacgcgcgctccagggtagggcaggcgcagcctctcgcccggcgcctgcgcacctgctctctcctcgagccctgcagcccggcgaaatggctcccggcggggccgtttgcgcatgcccagtcatgacggttgtcggcgcgggccctagcgtggcggcgctgcagtctgggcagtgggttggttcctcctcggtcctctgtcgagtggcgacagggcctagccacctggcgggggtgaccttcggacgtgcgacccgctcggagaagggagggaactgtggcccgcaacaaagcagtgacaggcccgacatcccctgcagggcgatctttccctcagctgcctgccggaggaagggcctttctgtttcacagggctaaagatggggcgcggttcctccacggggcggctgccgggtgaacggaacggggatggaggcgctgccagaagagcccgagctcgagcccgccctgccctcggcctccccgccgcgccgctccgcaggagccccgctcctctcctgctcgctccggagaaccccagtccggcctgacctcggccctcgcggtcaggcgctccaaccagagcgactccagctcgaacagcgctgggtaaactgaggctgaaccccgctggctgcatccccaggagtcgggcgtttacggtcacgggaacaggttaataaacttttacgcagcagacccggaacttaggtcccgatgtccgggtatcttaagaacaagaagcattcttagttgaagtttcgctttaaagataatgatacagatgcttgcggaggacaggcgttatgcaaagattggcaatcctttgacgagcccaggtagtacagcacgtctcccccgtgatgttttttggcttttatcttacatataaacaagcgtacccaggtggacgccttcctcctcgtgcttttgggaacaccctgctctatggagtagccattcttttattccttcactgccttaataaacttgctttcactttactctgtggactggcctggaattctttcttccacaagatccacgaatcctcttttggggtctggatcaggacccttttccggtaacacaaccactccactaaaaactctttgtcagtgatctctatattgttagtggtcagttctcagtcctcgtcctccgggaactacagcaaaatcgatagtcattcttgctacacatgctttcttcactccccatccaggacaccatgtgctctcactttcctcttatcccaaagaccacatctttgggtctcggttaccagtctctccttttaaaaccggcagcctggccgcttgcctgttttgatggggtgtagagaaaaagaacgaaagccccttcctcaagttgtagcttaacatccagccaatccacagcacaagacccaagaagctattaaccacaagttcctgctttgggggcctagggacttccccgggccccacatgtgcagttagacttatacttcaactattgttaccccttcctcattttcacgctaaaaatcacacctaggggtagagatttaaaatgtgaatgttgcatgcaatgcatgaagaagcatgcaaagctactgagaagcactagacaaacccctcctatccatgcctggaccaatcccttccctgtgaaactaacccacgtgccaccccctggcggcggggccccccaccgttttcctttcatggtgctgacttccttgtgcacaagctaaataaagatttctctttctcctcgctgctatgtctgctgatctctctttatttctatcctgggagattacaagatgccagggcacactggtaacactttgactccttaacatcggagtgccttacctcagggctcagtccttgcacatcttttctatctacatcctcagtgagctcatccagttccattcctttaaatgccatccatatgctgatgatcctaa

SEQ ID NO: 915691 - DNA, 4001 bp, Homo sapiens
caatccattgtaaggcacatcattattctatctcccaagacaggaaaaaaaatctttagatttcatagatatcaaatgggccaacaaaaatgtatcttggaataaacaaaatatgctaatgataacagtaagatatgtaggacatactacgtacaggtgctgttcttagcatttcatatctatcattttacccacacagtgaatctgtgagatggaagctattatcattccattttacagacacctacactgagactcaggcaggccagttgtcctgcccatgtacacacagctcctaagtggtagagtcaggatttgaacccagaccccgcagcctggctccatgctctcaacagctttgcagaaactaaagttggaatggaagactgctcattccaaatctgtcctattgtccagcatcctatggcccattccagaaagttcagtgggtgtcaattagcttggctgtagtgaccactcttaagtgtaccgttaccttttattttaatttgagaaattaaataaaatacatccacagcagtttacaactctgccatgatgtcattttgtcagatggcaaatttcaggagagggtcaaactcaaaaaaccctatgtcgttacctggatttatcgagaggacatcaaatcacttaattctatcacggcccacacccatgaattcactaagtaattatcacacacctgtcaggatccagacagttgctgaggaccaagatccagacgagactgacagagcttctattccccggcaccctccgtgaacttgggcacccaaaactaagggatctgaaacctgagaggaaatggaagcagactgtgaggccctgcagcgccgtctcttggatggtttattcttctctggcaggttttcccctaggtattcatggcatccaggggcatttcacctcagcaaagtgatgacgctgccactcaggttcccatggaaaccaaactgggacaggaggaacaaaaggctcctcaaggtcagtggtgcaaaggacattagagacaaagacagagacagcaaatcagcccaaagaacagacataaaccggcgcttcctccctcccatcaccacagctcggggctttgtcaccccagcacacctgggccctgcacctcagacgctgcgtgtgagcttctggggagagaagtgtgggcctccagggaggtgtaggcgctcctggctcctggcagactcctggcccaggcctggcctgtgtctgcttccggagccatgcgctgcctgtgctgggatgaatgcatggcccctgcatccttaccccctcctcagagcccacaagcttccgagtgcgtcatcttcattattggccacaggaaacgacttcttggagtaagtgactggtgctccgaggcccatctggacaaaagcaggatccggggtggacgcagaagagcaggcccggagccctgcaccccagccttccctccccatgcgctccacatgcgtcctttgttcagcctctccatttagctctcactttctggatgcagccaggcaccaccttccttccaaaagccttgtttctcagaaaacctttctgcctcctagaaacccaggattccgaggaggaggagggctggccttcctcttgggactattgatcagggctgtcagttcccagctctgtccaatgctctgaactggggacagtccgcatgcagctctgaggacccagatgctgtcactgggtcctggtgagtctgaaaacttgggatgtcggcaccacggtgagagcagagtctgcccggggctgtggcaggcaaaagaccgtctcggttttcactgcagggacttacccagccaggtgtgtgtgtctgagccctgccattcggaggcatcaccgagaggttctggtctcccctgcccaggccctgcctcctggccccactgcaggaagcttgagcagatctgaagctcgcctcagaggaagatcccatccaggggaggccctgtctgcagaaagcagagaacttggcttctcctcatttgttgttagggccagtccctaagggactaaaaacaaacaaaacaggctatgaacagaagcagtggtggcagcgctgggccagcaatgatgatttctactgttagggtttcagttgtacttggatctgggagggggaagccgatgcacccagagaccctagggctgggctgtaaccacacacctgaggagatgctttgggaaactcaaactgaagccatttgtgctgaatttggggaaagggggtgggatgatggagttaggagcgttgtcgttaactggtcattaattagatattaactaggcattaactagactttcggggaagcaacaaggcctctgtgtccacggttgtaaggtgtgggctaccctgatgaggggtgctccagctgtattcatgattcacattcattcattacatgcctgatctctatctcagaggcccggccttctgttagtaagctctcagattcagggaaaggagtctcagagaactccacatccgtgtggagtcagacggatcagagcagaacacagagctgccttctctgtcctgctctctctcccactcacctgctcagaggttgccagccgggccctgtctccctctctgccctcctgggtatcacggtccctcaacccagggaagctggtgccctcacttgtctcccatagtcctgtgtcatctgggcttctgtggcccctctcagctttcaggaccatccagtcttccccgtccctgttctttctctcgcaagtccccggtggcccagggtctagggagaagctgcattctgagctactgcccacatcgcttccccagggcggcgggagctctggaatggcaggccccgtccttgacagcctatccatgacctccaggggcagctcacagcagcgccacctgcatcacccacagaatggagggagacagcggctctccacacaaaggcactgagaaaaaagaataccctgaaagccacacaggtctcagggcagcagggagtgggagcactcatcacaggccagaagcccagcaagtagcatcagacacctcaggttaaagagaacgtagagattgtcgcttcccaccctccccattctagtcaattcggaccagtttggtacatgctggccatgtgcggtgaccacgctaagtactgtgcgtgtaccatttctcggaatacttcctgcaaccttatgaagttctcgcccaatttaacaagcactaaccaaactcagaaggcatttacccaatgctgcacgttacgaaaatgtaaaagaacgaacacggcttcaataccaggattgagcccaaaggtcacgttctttccctgcggctcccttccccatctggttctggggaagacactctgcacgcagcccccaggagaccacaggccctggactcccaaatcccagcagcaatgcaaagccacccccagaagagctgcccaggacaagtgatcctgcggcccattgctcactccccgcagaggcaggggcagctgactgctgtcccagatggacatagaaggtcaccatgtggcctgctggggtctgcaggatagaaggcgtgaggtgaagagtttgagctggtgcctacacctccgtcttccagccactgaaaacaggattctccagagttcacacctatgcatctggttcaatgctgggcattttgtcaggccacaagccagcagccatgcagcggatgcacctgtagatgatgcactgccttactgtccagacagaacaaaagggatcccctttccaacccgaaactgtcggattctctaagaggtccgtcacaacccatcttaatgcaagagggactgtggctcttctggaaacacgatgcctcggtgccatgaaatgacagctgcttcttttgaagaactgggctattcccatgtaaagctggctgcaatggatgatgtttctgactcatactctggctttaaaatcaa

SEQ ID NO: 915692 - DNA, 4001 bp, Homo sapiens
acatctcagtttcaaaagaccattcacattgtagtctaaattagtggatccctggtgtgtgatgtgtgcagttataatgggttgcctcagcccccaacgcacctttcattgccttcttctgtgataatgcccctgggccctgtacccatttctcccttgccagctggcatgatgtttagccctgtgcagaggcaggggcctctccccggttccgacatttctttctctgcttgccccggctgctggggggacatgagggacacttggccctgttctctcttcagcaataattagtcccagcccaggttcctggcctgctgctccctgaggagggtttgccagtgccagcccgtgcttccttgtaccaggacttggtctgctgggacccagtggaaagcccacggctgccgcccccacccaccttcccctgcttgccagccacagtcaccagctgtagacttgtgtggctgtgctgcggaagcagatctgggtggaggagggccccacgcacagacgtgaatatgaagggaccctctagaggttgtggcaaacacaggtgccccgccccatgccctgtctgcagtcacagcccttcctacatggagggtgctatcatcaatcttctggggggctgtggacactctgcatccccatacctgtggcagtcctggcacacggtaagctctcagtaagtgtggtgagtcactgctgaaggaactaacaaataaacctcccaccaccaaccacaggtagctggggcagaactagggaactgctgaaaggaggctggtgaaccctgccatgacatgcccgctgtgcccaggacccaggctcccacagctcgcgtccttcctctatcccagatccattcaaagtgaagtggcctccatacaggcttccctaggggccctgctcagtgtccatgaggccaccatgccgccgttcaccaggggacgtgagaaaggggctggcctgtggaccaggactgacccaggtctgagccccagctcagcggtcggctagctgtgcgagcttgcgcagtagctccccaagtgtggctcaggacgcacagcatcggcgtcagcatcgcccaggaacctgttagagatacacatttttggccccaacctgcatcgaccaagtcagaaattctgcagtgtgtgttttcgtaagtcctccaggtgactctgatgtactctcagggttcagaaccattgagagagagcagtttagctgacctcctccaggcctcacctgcgcatggtcacgactgtactttccgcacacagtcgccgagatgcgtgtgaaaccccaagcacaaagcagagtgaatcgcagtggccagagcatacctgaagcaccagcgctggtcccctccctccccctctcctcacctgcctcctaggagtcggagggtccgtggaaatggtctcctcctgcacatctgtgctgctgtgactgggtgcaggtctgagcagaggctttcggagtgagctgagcaggcgagcccgagcacggcctctcagggagcgagcccataggctggggagccgtccctggagatgcccctgggctccttgcggggcatggctgagttcctgcctgtccttggcaggcccgcagtggtggggtggctcaggcagttacccttttcacaaccagtgctgctgggggtgaaggcaacgggtgggtgagcacggacagtgtgagccacgtggccgggagctgggccagctcgctgtatgtgcacatcgtttccatgtgtgcagcagaaattggcgtctctgcacaaagctgattttagtctttctcaccttttcttgctcagcttaaaataggcctctcttcagggacaaggtggccttataccaagccaaagtgctgagggcgcagggagacccgcgagacagggccccctgaagtcctggcggtttctagccagcctcttgaaattgacttgaaggtgtttaccttgcagattattttttccaacttcccacactctgcttcccgcactctgtccttcctcaaggctggcacgctcatcagttgacttcatctctccctaatggcaaggcctgacccagaaagaaatgcaactcagatcccggctcaaatgaggctgggaaagctgatgcctgtaagaccgacaaagacggtgcaaggtgaggtgaacgccgctgtgtctgggtgccgggctcccttgtcgagttgaccctgagtctgcatcagctcaaacgcagttcccggttccccactgagattcccactcccgcctggaggggagacgtgcctgccttttgaatgaagcgttgcacactagacatagtatcacaggcagaattgtcatttttagcctttttacatgttgccaactttcagacatactattccgttttatccctccaaattcctcaaaagctgcttctattttggagctctttcttgccagtgctgggtaatttctccctagccatgtttttattgtagagaatggaaacctgatgtgatgaacactctgagtagaaatccctgggggctcgcagttaaccggataagacatctcaccctgagaaacggtcccaatttccttttaaaaattcattgtctctctgagatacatacatatttccttgtctcattccagaatcaaaagttctaatgttgcaaagaataatttttgtccaaatatgttttcttcctggtgttccagagagtctgggatagcaagaggtgtggagctttggtcctcgggtgactctgattccatcgttcctccagcaaccagggagcaatcactgctgggcagggaacacctgcttcctccctgggcttccagccttcccctagcaatcttttttttttttttttttttgagacagagtctcactctgtcaccccggctggagtgcagtggtgccatctcagcacaccgcaacctccagcacactgcaacctccacctcctgggttcaaacaattctcctgcctcagcctccggagtagctgggattataggcacccaccactacacccagctaacttttgtattttttagtagagatggggttttaccatgttggccaggctggtctcgaactcctgacctcaagtgatctgcccacctcagcatcccaaagagctgggattacaggcatgagctaccgcacctggcccccaacactcctttttaagacccatttgaaaataatgacaaaaaccacaattacttttgcaccaagtttaaccacagtttaccagtgtgcggttactgtggcttgaacattgttatccatgcatggtacttctcttaaaatttgctcccatgcaatcagaacacttctatacagcctgtctccttagatagacttgaccatccttctctgctcttgcatctactgcttggggcgagggcagggtctggcccctggggataggccagacaggctcaccaattggacaaatggattcaggtcagctttgtagacttggcctattcccatctcttgacacagcgggaaagtcttgcttcctgccaattatcctctgctaagccatattcagcatttcagtttttataagagaaccatgaattcaagggtattgggcttagtctgagctactaacaatgggttacttttcttacttttgcctattagagcttggggacagagctcctccaattagaccctcaaagcaacaatgagtgaacagcaggccaagatccaggcattcccaggcctggcctaatgtcaccctagtccttgaccctgcctgctggactttaggacatgaaggggttagacatggatgaggttagagaggtgtttgcatgccagaagacggtgagtgtccgggccacatcgaggcgctggaacatcctgcagtgctgtgcgtcttagaacatgcccacagcccacctgccccagagcagtctgagtgttaaatgtgttggttcttgaaccgcattccgggtctgctggatcagaatctttgtgggtg

SEQ ID NO: 915693 - DNA, 4001 bp, Homo sapiens
ctcctggcctgtgtgtcctggggtgactgacatactgtctctgagcctcacttccctcacctgtgaaaggggaggaattcatcccttctcagtcactcactcttcctcagcccctcactccctgctagctgcagggtaggcacattccagcctcagggcctttgcatgggctgtgctctagctgtctacacagctcactccctcatctccctcaaggctgtagctcaaaagttacctcctcagggagacctccctgacaccctatttaaaatgacaacccggtccctggcctcaatacccccaacacaacttttccccttcacctctcagtacactatataatttgcttattgtttttattagggaattgcctccccctgccccctgcttttaagcatcagctccatgaggacaaaaatttttattttgtccacagctgtctccccagtgcctgaaactgtccctggcactttgctccataagccatttttggtgtaatgctcacaaacattttgttcaataagcaaaagtaaagaacagccccaaactgtgtgactatggggcattcctgttaaatccagccccctcctcccccataccccaagaggggcaggcccttcttcccacagaggtggggctatcaaaagaaattgggaggctgggtgtgagctggagaagccacaaggggcctggaggcagagctgtgcagaaaataggtcgcagtcctagaactggcaggtcatgacagctggacatgggtgaaggggctttcggccttagccctccactccaaatttggaagcacggaggaagttgacgacatgtgactgggaaagaagcggccatggcaggggcctcctgggatggtggggacagagggggcctcaggaacaagacgacccattttacagatgggacaacagaagcctggagaatagtcttatttcctaacaacccaacaagaaaaatcttttctctcctttctcgaagtctggggctgaggctaaggagcggacagtgccccctcctggctctgcaacaaaacgacccccgcgtccctgggatctgcgggccgcagatcctggtcccctctccacaggccgtcaggggtggaggtccaagggaccacatagttggggtgggcagccccggtgacttctccccgcaggcccgccccgtcaagaagtttgtttgaaagaaaccaatcaggaagtgcagggtagtggggcggtgagggggccttggccagccgctctgggctttggaggagcctgggggttcttggcctccgcgctgctcttgccccagcctccatctctccggcggagaaacccactccccccgggctccaggaagaggcggaagcccgagactgggtcagggcgaaggaaggtagagcgaggggacccaaggcgagcgccccgccccgccccgcccagcggggcgcgccggggtgggcgcggcgttctggcccttcctccacacagcctcccccgggtaggtgcgagtgttctgcccacggcaggggccctaacccacccagcgcccggccagtggccccacactgtacccttcctgcagatcgcgcgactttggggagagtggggggcgtctccacctgtgcgtcccctacccaccccctaactgggctaaggcgcggcctgggtttctgcccgcccctttccagcctggggacgggggactctctcagcctcgcccctccccctgcaatctgtccctgatgtccccgctccagacactcacccactttctgagacccaggcctcagcgccggtgtcccccggcggtgagctccgagccgttaggcggccccgggttctccggcccagggcccctgcccccaggcccccaccccagaaggtcgggccagacttgtgggcagcgggaactccgccaccacctccgtccgcggccctgcgggggcaaagactgggggaactcgcaagtttgcgccgcgcactcctcctgccgggaacaatggcgggagggggaggggacagagaaccgagcgcgggggaccgagtcagaccccggggagacagaaactgctttcgctccgtttctctcctgctctgaagcagaaagctcgagcccgagaggcagtggccgaggacgaaataagcagtccaggaggagggcgaccgcggagccgggggagaggggaaaccgagtcagagggaggggcggcgaggggagagcgcgcaggggagacggaaggggctgcgggacggcgccttggggagctggggaggcgaccccctggggtcccagcgggctcagcgggtgccgagatgtcccggggcgcccggttagcgcgcgcggggtcccggccgcccctctgcggtcccgtcggccgcaggagccccgctgggttgcgctgcgcaggcggcgggcggcgggaggggaaagtccgcggctcggaagcggcggcggggagcagaacttacgggcctcgcgcgtgccggcgctgggctacgtggagctgatgccaggcggaggctccgggctcggacgcctcacatcgcgccgcccgtgccgggccgggcagtgcagggcagggcagggcagggcagggcaggacagggcagggcagggcagggccgggccggctggactgcgcgcggcgccctgcgcggccggggcttaccgagtctggcggcccgcgctggtccctcctctcggttccgcgcacaagccaatggcgcgccgtcccctcccacgcgccgggctgcctcgcccccagggtggccgccggggcgggcgggatgggggttggcggggaaaccaggctcccggctcccccgcgaggctctcccgggggccgcctgcagggggcgcacgcgcgcccgagagaaggcgccgggggaggaagccgcgcggggagaccctggcgtggcccgcgccgcccaggatgactttcctggcaagttctgcagacggtgcccctttcttgggacgatcaacgtagatgggcaaaccacaccatcttaaatagccttgcggtgtctcccgggcccaggccggtgcctgaaatggaagggactgctttggctggcggtgatacccaagtgtgtaataacacagtcacgacaatagtcaccgtttgctgcgcactctctgatgccagacaccatatgctaaaggagttacaagtattaactcatttgattttcacagcaacccataagggcgctgtgcttagtcccattttacaggccatggtcgttaaagtttgagttcactcagccttcaggcttccagcctaggcccacccttctctctccctgcttggtgtgacttggccaaataacatgaccccactgtcactacggccaccttcttcatactccaccctaaaatccagcctcagagatgctgctgtcagttgcgctgtcaggaggctaggatcttatctggggctctaggacgcttgttggcgctacagttgtcaaaccttttgtctctacacatcctatggggggctggggtgaggatgagggttgggggtcatggaggctctctggtggcgtgtcaacctgagagaaccaggctcctacagacaaggccccacccccaaattctgggctccttcaaccccttatggtgggaaaataatgtgctctctcccaccccaacccccaccaccctgtgctctccttagagaaatgcctggatctctttcatctgatctgatggtcacagtgggccaggaaccggggtggggggctgcgggaaaaggaaggcaaggctgatgacatgctccatttcacaagtaaataagacagaaagaggtgagtggctgcctcaggcatctagctaggtgggcattctgactccaggtctcggttctgtctgcaccagttccttaacggttaatagagcaggctctggaaccagatcacctaggttcaaatcctgactctgccttttagtgcctgtgtggccttggacaaagtaagtcacctagagcaaccaatagt

SEQ ID NO: 915694 - DNA, 4001 bp, Homo sapiens
ggccgtcaggggtggaggtccaagggaccacatagttggggtgggcagccccggtgacttctccccgcaggcccgccccgtcaagaagtttgtttgaaagaaaccaatcaggaagtgcagggtagtggggcggtgagggggccttggccagccgctctgggctttggaggagcctgggggttcttggcctccgcgctgctcttgccccagcctccatctctccggcggagaaacccactccccccgggctccaggaagaggcggaagcccgagactgggtcagggcgaaggaaggtagagcgaggggacccaaggcgagcgccccgccccgccccgcccagcggggcgcgccggggtgggcgcggcgttctggcccttcctccacacagcctcccccgggtaggtgcgagtgttctgcccacggcaggggccctaacccacccagcgcccggccagtggccccacactgtacccttcctgcagatcgcgcgactttggggagagtggggggcgtctccacctgtgcgtcccctacccaccccctaactgggctaaggcgcggcctgggtttctgcccgcccctttccagcctggggacgggggactctctcagcctcgcccctccccctgcaatctgtccctgatgtccccgctccagacactcacccactttctgagacccaggcctcagcgccggtgtcccccggcggtgagctccgagccgttaggcggccccgggttctccggcccagggcccctgcccccaggcccccaccccagaaggtcgggccagacttgtgggcagcgggaactccgccaccacctccgtccgcggccctgcgggggcaaagactgggggaactcgcaagtttgcgccgcgcactcctcctgccgggaacaatggcgggagggggaggggacagagaaccgagcgcgggggaccgagtcagaccccggggagacagaaactgctttcgctccgtttctctcctgctctgaagcagaaagctcgagcccgagaggcagtggccgaggacgaaataagcagtccaggaggagggcgaccgcggagccgggggagaggggaaaccgagtcagagggaggggcggcgaggggagagcgcgcaggggagacggaaggggctgcgggacggcgccttggggagctggggaggcgaccccctggggtcccagcgggctcagcgggtgccgagatgtcccggggcgcccggttagcgcgcgcggggtcccggccgcccctctgcggtcccgtcggccgcaggagccccgctgggttgcgctgcgcaggcggcgggcggcgggaggggaaagtccgcggctcggaagcggcggcggggagcagaacttacgggcctcgcgcgtgccggcgctgggctacgtggagctgatgccaggcggaggctccgggctcggacgcctcacatcgcgccgcccgtgccgggccgggcagtgcagggcagggcagggcagggcagggcaggacagggcagggcagggcagggccgggccggctggactgcgcgcggcgccctgcgcggccggggcttaccgagtctggcggcccgcgctggtccctcctctcggttccgcgcacaagccaatggcgcgccgtcccctcccacgcgccgggctgcctcgcccccagggtggccgccggggcgggcgggatgggggttggcggggaaaccaggctcccggctcccccgcgaggctctcccgggggccgcctgcagggggcgcacgcgcgcccgagagaaggcgccgggggaggaagccgcgcggggagaccctggcgtggcccgcgccgcccaggatgactttcctggcaagttctgcagacggtgcccctttcttgggacgatcaacgtagatgggcaaaccacaccatcttaaatagccttgcggtgtctcccgggcccaggccggtgcctgaaatggaagggactgctttggctggcggtgatacccaagtgtgtaataacacagtcacgacaatagtcaccgtttgctgcgcactctctgatgccagacaccatatgctaaaggagttacaagtattaactcatttgattttcacagcaacccataagggcgctgtgcttagtcccattttacaggccatggtcgttaaagtttgagttcactcagccttcaggcttccagcctaggcccacccttctctctccctgcttggtgtgacttggccaaataacatgaccccactgtcactacggccaccttcttcatactccaccctaaaatccagcctcagagatgctgctgtcagttgcgctgtcaggaggctaggatcttatctggggctctaggacgcttgttggcgctacagttgtcaaaccttttgtctctacacatcctatggggggctggggtgaggatgagggttgggggtcatggaggctctctggtggcgtgtcaacctgagagaaccaggctcctacagacaaggccccacccccaaattctgggctccttcaaccccttatggtgggaaaataatgtgctctctcccaccccaacccccaccaccctgtgctctccttagagaaatgcctggatctctttcatctgatctgatggtcacagtgggccaggaaccggggtggggggctgcgggaaaaggaaggcaaggctgatgacatgctccatttcacaagtaaataagacagaaagaggtgagtggctgcctcaggcatctagctaggtgggcattctgactccaggtctcggttctgtctgcaccagttccttaacggttaatagagcaggctctggaaccagatcacctaggttcaaatcctgactctgccttttagtgcctgtgtggccttggacaaagtaagtcacctagagcaaccaatagtaagaaccggctatggttgctgtagagatttagagttaataggagctgctcatgtttactgtgcatggactctgtgccatgcaggctcccactgtcctcaccagagctgggattgggcaggagagtctgtgcccttggcaaggaagtaaacagaacagtccttggttcatagtaagtgctcagtgaatataaactgtcctgattactaaggtagataaactctgatgccccagtgccactgacactgcccccagccaaacacctagacagtgatagccaataatgaatgaatcaatcaatcaatcaaagtatgtgactctagatgaggattatttttaaggtgtgttgggtggagccatctgactcaaggctctatagtaatttctgcaacaactcagtctcacctcactgcctttacagagctgggccaagctgggttgatgaattcatttgtcactccctcttctgcctttctggcactcagggctctggattgctgaagggagggcccccagcgtcattcatgtgcaatgtcctcccagacttggggacacctgccagtgctctgcttggtgtaaccctaaagactagcagcagggtctgtgcttgtaatcccagccagcctgatcatacatcagtgggaggcctttgtcacaatcactccaagttttccaacatggaagaggctgccttagttgtcatgaatgagtgccctgtcactagcagcatgcaagcagaatccagggaagggttgatgaggacagcagaggaagaattcccaccttaagtggtatttggagtggataacctttgccctctgggtgtctgtattctctcagtctccttatcaacggggaagctggggaggctgggagctcaggctgggccaaggctgccccaccatcctttgtgaacgaggccatcctgacagtgcctcacccttatgccaggcaaggtgctatgtgctggggccccaggggtgaacaggacagtgtccctgtccttggagagttcacagcccccttgtagatgactgcacagatagtcaacagcagcaacagtaaccgctcaagataacaggcaaagtgcttggaggggg

SEQ ID NO: 915695 - DNA, 4001 bp, Homo sapiens
aggggcctcctgggatggtggggacagagggggcctcaggaacaagacgacccattttacagatgggacaacagaagcctggagaatagtcttatttcctaacaacccaacaagaaaaatcttttctctcctttctcgaagtctggggctgaggctaaggagcggacagtgccccctcctggctctgcaacaaaacgacccccgcgtccctgggatctgcgggccgcagatcctggtcccctctccacaggccgtcaggggtggaggtccaagggaccacatagttggggtgggcagccccggtgacttctccccgcaggcccgccccgtcaagaagtttgtttgaaagaaaccaatcaggaagtgcagggtagtggggcggtgagggggccttggccagccgctctgggctttggaggagcctgggggttcttggcctccgcgctgctcttgccccagcctccatctctccggcggagaaacccactccccccgggctccaggaagaggcggaagcccgagactgggtcagggcgaaggaaggtagagcgaggggacccaaggcgagcgccccgccccgccccgcccagcggggcgcgccggggtgggcgcggcgttctggcccttcctccacacagcctcccccgggtaggtgcgagtgttctgcccacggcaggggccctaacccacccagcgcccggccagtggccccacactgtacccttcctgcagatcgcgcgactttggggagagtggggggcgtctccacctgtgcgtcccctacccaccccctaactgggctaaggcgcggcctgggtttctgcccgcccctttccagcctggggacgggggactctctcagcctcgcccctccccctgcaatctgtccctgatgtccccgctccagacactcacccactttctgagacccaggcctcagcgccggtgtcccccggcggtgagctccgagccgttaggcggccccgggttctccggcccagggcccctgcccccaggcccccaccccagaaggtcgggccagacttgtgggcagcgggaactccgccaccacctccgtccgcggccctgcgggggcaaagactgggggaactcgcaagtttgcgccgcgcactcctcctgccgggaacaatggcgggagggggaggggacagagaaccgagcgcgggggaccgagtcagaccccggggagacagaaactgctttcgctccgtttctctcctgctctgaagcagaaagctcgagcccgagaggcagtggccgaggacgaaataagcagtccaggaggagggcgaccgcggagccgggggagaggggaaaccgagtcagagggaggggcggcgaggggagagcgcgcaggggagacggaaggggctgcgggacggcgccttggggagctggggaggcgaccccctggggtcccagcgggctcagcgggtgccgagatgtcccggggcgcccggttagcgcgcgcggggtcccggccgcccctctgcggtcccgtcggccgcaggagccccgctgggttgcgctgcgcaggcggcgggcggcgggaggggaaagtccgcggctcggaagcggcggcggggagcagaacttacgggcctcgcgcgtgccggcgctgggctacgtggagctgatgccaggcggaggctccgggctcggacgcctcacatcgcgccgcccgtgccgggccgggcagtgcagggcagggcagggcagggcagggcaggacagggcagggcagggcagggccgggccggctggactgcgcgcggcgccctgcgcggccggggcttaccgagtctggcggcccgcgctggtccctcctctcggttccgcgcacaagccaatggcgcgccgtcccctcccacgcgccgggctgcctcgcccccagggtggccgccggggcgggcgggatgggggttggcggggaaaccaggctcccggctcccccgcgaggctctcccgggggccgcctgcagggggcgcacgcgcgcccgagagaaggcgccgggggaggaagccgcgcggggagaccctggcgtggcccgcgccgcccaggatgactttcctggcaagttctgcagacggtgcccctttcttgggacgatcaacgtagatgggcaaaccacaccatcttaaatagccttgcggtgtctcccgggcccaggccggtgcctgaaatggaagggactgctttggctggcggtgatacccaagtgtgtaataacacagtcacgacaatagtcaccgtttgctgcgcactctctgatgccagacaccatatgctaaaggagttacaagtattaactcatttgattttcacagcaacccataagggcgctgtgcttagtcccattttacaggccatggtcgttaaagtttgagttcactcagccttcaggcttccagcctaggcccacccttctctctccctgcttggtgtgacttggccaaataacatgaccccactgtcactacggccaccttcttcatactccaccctaaaatccagcctcagagatgctgctgtcagttgcgctgtcaggaggctaggatcttatctggggctctaggacgcttgttggcgctacagttgtcaaaccttttgtctctacacatcctatggggggctggggtgaggatgagggttgggggtcatggaggctctctggtggcgtgtcaacctgagagaaccaggctcctacagacaaggccccacccccaaattctgggctccttcaaccccttatggtgggaaaataatgtgctctctcccaccccaacccccaccaccctgtgctctccttagagaaatgcctggatctctttcatctgatctgatggtcacagtgggccaggaaccggggtggggggctgcgggaaaaggaaggcaaggctgatgacatgctccatttcacaagtaaataagacagaaagaggtgagtggctgcctcaggcatctagctaggtgggcattctgactccaggtctcggttctgtctgcaccagttccttaacggttaatagagcaggctctggaaccagatcacctaggttcaaatcctgactctgccttttagtgcctgtgtggccttggacaaagtaagtcacctagagcaaccaatagtaagaaccggctatggttgctgtagagatttagagttaataggagctgctcatgtttactgtgcatggactctgtgccatgcaggctcccactgtcctcaccagagctgggattgggcaggagagtctgtgcccttggcaaggaagtaaacagaacagtccttggttcatagtaagtgctcagtgaatataaactgtcctgattactaaggtagataaactctgatgccccagtgccactgacactgcccccagccaaacacctagacagtgatagccaataatgaatgaatcaatcaatcaatcaaagtatgtgactctagatgaggattatttttaaggtgtgttgggtggagccatctgactcaaggctctatagtaatttctgcaacaactcagtctcacctcactgcctttacagagctgggccaagctgggttgatgaattcatttgtcactccctcttctgcctttctggcactcagggctctggattgctgaagggagggcccccagcgtcattcatgtgcaatgtcctcccagacttggggacacctgccagtgctctgcttggtgtaaccctaaagactagcagcagggtctgtgcttgtaatcccagccagcctgatcatacatcagtgggaggcctttgtcacaatcactccaagttttccaacatggaagaggctgccttagttgtcatgaatgagtgccctgtcactagcagcatgcaagcagaatccagggaagggttgatgaggacagcagaggaagaattcccaccttaagtggtatttggagtggataacctttgccctctgggtgtctgtattctctcagtctccttatca

SEQ ID NO: 915696 - DNA, 4001 bp, Homo sapiens
gctgagagttggctccacactaaggctagatgggctgtgcttgtccctgggatgggagggacagactaggagctgagccccatgcctgagccgaggaagggaagggcctgagccagaggcgggggtgggtgaagggggggcaggggtatgaaatatattcttagatgaggggagggtgcccaatcctcagagccccagggttgggcctccatgcaggatggagggctctgagctctgggatgggacaaagggctcaaaatccacaaaaccattctgatgggggtgctgtgcttcgagtccagaatgggatggaagggccctcaagccccggaggggactgagggctccgagctggcgagggaggtcagtgcagtctcgggtgtcggagctccaagcacagggtgctgggggcaagtctcagagctttggccttgaaggacagattctctgtgtgagctccgagacggggaacggactttcagtggttcaggagggaggtttcggaaactagggtgggcaggcggggtttctggattcggaccggctatctctgggtctttgacggtgggagctctcggaggcgggaacgagagggtacggcttagcgcctccgagtcaggggaaggtctcagagctcggggctcgcgggtgtctcatctccacggcttcgggccaggcaagggaagccccgagcccgggggcgccgctcagagccccgagcccggggaggtggcgcgggagcccgcgggcgcggcgggcgcgggcgcgcggcgcgggtcggcgtcctgctcgtagcggtagtggtagccctccatctggtcccggcacgcctcgcgcaggttgcgcatccagcgctggatgccgcggcggtttaggtagagcaccatgaggaagatgaggccgatgagtgccagcaccagcccgaagaacacgtaggaggcttccagctccgggccggcggcctccgcctcctctccgcgagcgtcggcgccgctgtccgcgcagcgaagccgcgccccgtccaggtccagtagcggccggtctagcagcgcccgcggggcggcgcagcgcaggcgccgcgagtcgggcacgcgctccgtggcgttgcgcagccaggccagcagggggcgtgcggcacagccgcagcgcagggggttgtcggcgagcagcaggcgcggcccggggaggccgccatcgcgctccagcgcgcgcagctcgtcggggtccaggccggccagcgcgttgaggcgcacgtccagctgctccaggcgcgccaggcgcagggcggctggcggcagacggctcagcgcgttgcccgctaggcccagcaggcgaagctcggccagcggtgccagcgcagcgtccagcgcggccagcagcgcggggccgccgcgcaccagcgcgtggttgagctgcagcgagcgcagcgcgggcagcccgcggaaggcgccgccgcccagggcgcgcagcgggttgtggctgaggtcgagcgccgccaggctgggcagcccgtcgaaggcgccgtcctccaccacctcgatgtggttgtgcgtgaggcgcagcgcgctcaggagcggcaggcgcacgcccgccgcctggtcgccgtccccgtccccgccggcgaaggcggccgcgcgcagcaccgtcaggttggcgcctacgatggtgaggttgcgcgcgtcgggcggcacgtcccgcggaggctggcggagctcggctcccgacgcgcagcgcagcagcagcttggggccgccgaagcagtagcactggaaggggcagggtgccgcgggctggctcagcgccgccgccacgagcagcagcccctggagccccggctgtcccgcgcgcggggccatcgcggccgcccccgcatccagcgcccgggccgccgcgctcaccagtgagttgggagcgcctggtggggggcacgggtggggcgagtccttgacccggagcggctggcagtcccggtcggtccgttcgctgtctcgaaagtctgaggagccgcacttactggctgactggccgggggcaagaggggtcagacggggagcggagccccccgcccccggtgccctcgccctgcgcgccggcctccggcttccgcggccgctccgggctccgagccgagtgggcagggtttgcctcccccctccccgcctcccggtctcgtcctccgcccccagcggagtctccgcgccctcctcgccgtgggaggcggggtgggaggctcccgagaatcagggctgtcggctgctgcgctttctcttcatcctctccgcccccgcccctccgggctgccgagaagtttggctcctggaggctccgacttggttttcctcctcctccacccccaacatttaagctgggtccttcctcctccttctccagcacgtgtggggcggggcccgactgcggagagcaggcaggtgggtcaccaccagggagaattcgggggttggggaggactttagagctgctcctactaccggaggaagggatgaggggtgggctgagaaagttactcattttccggcctcttcctaaggcagagagactggaaaatccccagtctctgcttcctcctctgcgaccctagttccattagacctggctgtgtcaccacccctgcaggtcctatgggaccagctttttctccatcccatcccatcccattctcaggagaagtctgtggcacccgctcccctcccacccaccaactctggctgctctgcctctgccaggagttcccccgtgtggtttcctccaccgggctgggcttctctgccaagcactgtcctaggcacagagacccgggggtgtagtgattctgctctttgctttcactccctgcccccaaacctcttaagactcctggggttccgttggacactgtcaactagtccctccaggcttctccgcctgtgagtggggtttggggcaccagaggttgggagagcaggagcagattttgcagcatggagttgggggtctcagaaggggccagggctgagggtgggggggctgagctgtttacagatttgttttgttctggattttttttcccccagaactgggaagctctaaacctgatttaaagagacaggctcctgagaagggaggattcctggccttagcatgaattattcaggctggagaggctgacacttgatccgcaggccattcgggtatcagcagagctggttggaatagaggctccccacctcctcccaagaatcagtctctttctcctgaattgggtacggttgttatgttgactccttccctgaggttatatttaacagatcgaccaaaggatcaataccacttaaggagaagaggcagaccctgcagtggcctgggtcttgggcaaggaccaacattaaggaacagagctggtgatgatgggggtctcccagctctcccctcctccaagcccctctctcttccctaccccctgtcttaactctcccaggtatgagagctcagatgtgtctcatgcaagtccatgcagactcattcatatgtggacataggatcgtaggtttgagtgcgtcctggcatgtgtccataaattcataaagacatacatatttgaatatgcacacttctgagcccatgcaggttcgtggatacattctcagagggcaagcttacaggcccatgcttaagccatgccaagcatagggacccagcgattggctagcacagtcagaccctactcctcctgccctgcaccatgcccttggtctgtggaggtaacaggctggtgatgtcttttctcacatgggcacacgtgctcaagtagatgccactggggctgggcccccagctatagccctcccctaaaccccggcccacacagcaacatgccccagctctgacatctcccctggtaggaggcactaggtcgttttcacttttctgtttccagtatagagactatctcaggagagtgtgtggtgcaaatgacagactgaatgaacagaagtctctgtttc

SEQ ID NO: 915697 - DNA, 4001 bp, Homo sapiens
acactgcccagcagagcgggtctcacctgccagggaggacctgcaatgatcacagagcttacccaggacggccactggcccccacaccagcccgccgggccctgtgctgaggacaaactctggattctctctgaatcctcacaatgcccgccaggcagtccttagtattatctcccttttactgagattcggaaaggtgaagcatggccaggcacagtggctcacgcctgtaatcccaccactttgggaggccgaggcaggcagatcacccgaggtcaggagtttgagaccaccctggccaacacagtgaaaccccatctctactaaaaatacaaaaattagccaagtgtggtggcgggcgcctgcagtcccagctacttgggaggctgaggcgggagaatcgcttcaacccagcagaggtagaggctgcagtgagccgagatcacgccactgcactccagcctgggtgacagagtgatactccatctcaaaaaagaaacagaaaggttaagcaacctgccaaggtcacacagccagtgcagccccagaaaggcgcccagacccctagacacaaagtctgtgttccctgaacggtgccatatgctgggcgtctcatcaaggggcctgccagagctgctccctgcagatctccttcctgactggtcccaggaagcacctgaagaacttcctggaggcagcttctgaggtgagcagacagggtggccaccttggcctctggtttttcatctctcgtcagggtcccctccttggcccctcattactccatggatgggcacatgccacagaccagtgggtgggcaccaggattccaacccagttccttccagacagaggaggaaagaaggaaagagaggccagagagggaaggagccaggtgtgaattctcagagtggttcgagcagcagccgcaccagaacagagggctgtgaccttgggcaggtctcagggcctctctgggcctcagtttcctcatctgtgaagtgaagctaaggtccttccacctcttaatccagaatctcattcccctggtgtcagcgaggggcggacgcaccccaccctcggggggcggattcagcaatcttcagaccaggacaaaaaacgggaagggcaggagggagtgcagaggggactctggggtggcagagggcaaggagaggaagccgcccccgtctagggggcccgccccagccccacgggaagtgggacggggaaaggcaccctacaaagaaaggactcctagctcccaactggttcgaatcccacctcggccacttactgggtgtgtgaccttgggtagggtaacgcctctctgtgagcctctgctttttccagaagaaacgggaaaaatcaaagtgctgccttctctgagtcaattaggcgaccctcattacggcgacagtcgggaagtatggggtctgggcccgcccgggcacacggagggtgcctgccgcaggtggccggttccctcggggctgcccaaggctgggcgagggcctcttcgcccagctggtcgggatcaggacgcgacacggaagagaccccagctctgccctgaccccggtccgggtccgcaggacgcagcccactcgccctcagaacaccggctcgcctggcacccggcgcggcccgggccccgctcggactcgaacctggtgggggcgcgcccggcagaaagcggggtgctgggacagcgggacccccacgcgcgaccctggtctcccgggccagtcccctccccaggtccgggcggctcaccagggccgacttggatgctgcggtaagtggtcagccccgccggccagtcgccgccaccgccgcgggccccgcccagcaggggctccgactccgcctggggttccgccatccagcagcccacgcgctggacccgaccctcagaagctcaagccccgaaggcgcccagcttcactgcgcaggcgcggagaccccgtccctggcgtttttgctgacgcgcgcacggcactgtggcgcaggggatccctgcagtcccagccaatgagaacggggagggaggggtggggttctcctgagtggggcggagctaaagggccccgcccctctagggtggagctcagcttcgttccacccagggcggggcagcgttctggggcttaagggccgagggctggggaggaaatatgttctcaaaggatgtctttccggccagaagcttcagcatcacctggaaacattttagaaatgcaaattcttgggcccttaaacctactaaatcagcaactctgcggggaggacccaggaatctgtgttttaacaagcattcggggtgattctgatgcatgtgagtattgagtacacggggtgactgcaaaggactccccccagaatggaactggagtttaccctctgatggtgaaattaggaggattcaatatcattaagggaaaagtttaaaaacatatgacacacttaaaaaatatttacaacgtatataaaaagtgttttcaacattaatgcataaagaccttgtattcgttttctattgctacagtgactaattaccacaatctgaaaatataaaataactcccattcatcatctttcagtcctgcggggcaggaaacctcctgtctcagggcctcacgaggctagagtcaaaatgtcagctgccgtgggctcttatctgcagactctggggaaagcccacttccaggctcatccaggatgttaacagaattgtctccatgggcctaggactgaagtccacgtcttcttgctggatgttggctggtgtcattctcactcctagaggccactgcattccttccacgatggcttgaacacctccatcatcagagccagcaagcaagagcacgctgaagacgcttcgagatgcagcaagacgcctgtaatcccagccctttgggagaccgaggcaggtggatcacgaggtcaggagatcgagaccatcctggccaacatggtgaagccccgtctctactgaaatacaaaaagttagccagacgtggtggcacgtgtctatagtcccagctactcggaggctgaggcaggggaatcgcttgaacccgggaggcggaaattgcagtgagctgagattgcgccactgcactccagcctggcaacagagcgagactccatctcaaaaaaaaaggtgctgcaagacgcttccaatctctgtgacttccccttctgccatacctctttactttttccccctcttttggggaggggggagggtttaaaataaatataaaatttaccatcataactgtgaaaggaaaataaatctcaggactccaaaatcactaagccaaagggaaaagtcaagctgggaactgcgttgggcaaactgcctcgccttttcttctttaataaaatagctacgaagatttaaaaagctacatacctccctcacaatttgcccgctaggaaatttttcgtgggcacccaagatctttaccctaaaacagttttgttgaattttaccctaacaatgtacattgacaactgatcttcacaggttccaaacaaaggatggaactctaagtcatccctctgctcacctgattgcttcctctggtataaaagtgcagattcaccgagccagactaaggcataagtgactattcctctacccccgcaacctgtaaattgtgtatttcagtgaaagtctgatcaaagactcacaagaatgcaacctttgtctcttatctctccacatatttttaaaatttctccctctttcccaatatccaccctttcccttttttttttttttttttttttttgagacagagtcttgcttcgttgcccaggctagagtgcagtggtgcgatctcaggtcactcagcaacctccgccacagcacctggccagtttcccctttaaatattgaagtcctacaaatcatccttgaaggaaggcatagacctgcctcccaggcactccttaaccttggcaaaataaacttactaaatagatcg

SEQ ID NO: 915698 - DNA, 4001 bp, Homo sapiens
attaaatttaaaaaaagctgatggaagaagacatacaggtattttatttaaagacccaaaggtaatcaatagaatagctaaaagtaataataaaagtatcagatttggaaggactgggagagggaagggagggaggtggtatcagtatcattgttcataatagaaagtaaatgaatatagtgtgaagttgataacttgaaaagacatataagagcaatgtttagatttcataaactcaccaccaaaaaaactaacgaccagaaatagttaaaagaggttgcctctagggagtgggactgagaatatggtatgtgttaggtaagaaaactgatgcttttcattacaagctcttctagactatctatatttaagatttttaattctttgaaatattctttgcaaacagctatataatagtatgtcatatgattattaacatagctaacatctattgttcacttactttgtactgtaccatcctaagcattttagagatattaactctactaatgctcacaatgaccctatgaggtaggtagagttctcattttatggacataaatcatgaagtgtggagagattaatcaatttgcccacgatcacccaggtaataactgacagagcaaggatatgaatccaggtggcctgtctctggagaccagagcttaaccacagtggtgttctgctatcacaattcaacatcccctatattaggacaagtggcttatttataatttttagttcctataaacaataaatctttgtgtgtccctgagcccttaaactcagttaggtcccccaagttcaatgctgtcagaatatctggtatttctgtttcatgtcactttacacatagtgattattcacttactgcagttgtttgtttaatgttgccttccccactagattacatactctgtgaggacaggcactgtgtttactttgtccagctccacatccttagtgtctggtgtggtacctgacacatagtaaggactcaataaatattcgtgttctgcctgactgatccatatttttaagacagatttatgaaattagaattatgggtcaaaaatatgaacattttaaggctcataatacatattaccagatagtttccctacatggtacacaaatttatccttgtgccaaaggtgcattggagggtaatgtacctccaatgcaatgaagttctgacaataggagacactgtcattatagaatctttgctacatgaaaataatatcattaaatatactatgactatatcattaaatctcaagtatataattaataatatatgattatatattgataaaattttaatattttattaaaataaaattaaaatttgcttctctaaaatctataaagtgaatcttttctcccccatttctcgaagtagctatttgtatctcctcttctgtaaattgtttgtatcccttgttagaattcagcactattttagaaatgtaagttcttaacaaatgtttgtactccatctctgaagagtttacaataatttatatatataatatataaaaattatatatttatatattttatctatatataaatatagatatatatatagagagaaaatctcactctgatacctaggctagagtgcagtggtgtgatcatagctcactcactgtaaccctggactcccggactgaagcaatcctcccaccccagcctcccaggtagctggaactacaggagtccaccaccacacccagctaaatttgtttttttttaagagatagggtcttgctatgttgccctatattttaaatatagttttagagattcatttctagaagaattctgtgcaaaaatacagaaaatgcttacctgaaagattttcagggcttttataagtcctccaacttcattctttaaggaaaaaatgagacttgctcttcccctttctaaggaatggtctttgttctccttattgtcttcaatcatgatgaatttggagtaattctctaaaactaaagtatgaaaacaaagactacgggctaaaaaagaagttgcacaatgcagacaatatttgataactaagggctcatttacttctaggagcttcagtttcttaaccttttataaaacctggatatgcagataagctttgcaagaatctagtgagaccaaaataagatacaactttgcctgacacctgcctagaatagaatacatgttagtagttcccttttgttttttttctaaaccaatcgctcttttagggcatgactgaagcctgctggcttcttgcagtcttcccaactattgtagcctaaactagtcaggaaggcctacctcctccccaccttgcccacaatcttagcacttcattataccaggtctcaaatggtttccccaaatgttctattcgaacatatctcaccttctaacaaggcagcaagctcctccagagtggggacaaggctttctatttattttgtaaactaaaggcctggccagctctagatacatatgcactagatggataactgctagccaggagaattctagttctgcttctcagaagatgaaccagagatctactttggtatcttcttaaccacctatttacactgcaaaacagtgtaaggaaatatgtggaatgtgaagtcagacatatctaatcattggcctcatgtttatcagtgtatgacctcgggcatgctacttaacctttctaatataaaactaagttaccaaacagctaccagaactcataacatccaaaattctcactcgttttaaaacatcataacatggcgtgctattctgagattttcctcacggaagaaactaggatatttcaggtaccaagaagagttagagatacataattcaaaatttaactaacatttatgaattcattgggttcaagtttccaaaactaccaagatttttaaattatgccaaattagtctctagaactaaaaacaatttctatttcaaatgctataaaactaaatggccagttaaactgaataattatgtggatttttctttgattcaaataattactaatggtaaaacgaataaaatttcaacccaagcgcattcacatgtgtgaagcaccacagtcaaagttagggcagtaaaaatttaaaaacaagacaacttgcctccaaataattcacacacttgttcatggggaaggagaaaatggaagacagacttctcaataagtacaaataagcagaaaagaagggacactgagatcccagccatgacacccaaggagtacactcaaccacccctcaccttcccaccaccccacccctttgatcaatatcccatgtgcttctaaagatgactgaatatagcttctagcccatccatgagtctctgctgagaaaggatttatggatgagaagcaggagatcttaagagattttccacttcaaaggaagtgaccatttcttaaggtaaacttaagtatacacagaaaattccaaattggtggctctggggctaaaaattcagggatggcctcagataagcattctcaaaatgtttttagggatgtgaaaactttcagaaacgtttcttacccattcaattaccactcaaagattgacttttcttatcaaacacagagtatgggcgacgttgtcctaaagcgtgaaaatgtaaacaataaaagagatgcaaaataatataacaaattgctagtaataaatctttctgcaaatccatctaggcaagttataatctttatatgtatcaacctctttatttgcaaacttggagggaggataattaacaccactctcatgattataaggaggattaaacatatataaacttatgagaattaaatagttataatttacataaaactcttagaacagttgctaacctacactaagtactcaataagtattatctcaagtaatggggaatatgtcccaaattttccagttttcaaaaaaagagaaaatgttcaagtaatgaaatagacattctaaatacctctg

SEQ ID NO: 915699 - DNA, 4001 bp, Homo sapiens
aaacggaacagaagaagctacctctgagcatccctgggcagtcagtcactgtctccccatgcattagctcccacccacaagccccagcaagctctcaactccctcccatccatctcactgatgggatgactggtgccctccatggagcaatcatttcctctcaccggatgctcagccagcaagtcagaaagtcctgtgtgatcacagaatggcacttctgggctccggctgccaagagccatttttgcaccgtgtggagggtcagtggggatggcctcaccagatcagccacattctctagggtcaggtattttcctgcagggattcagaagaggcacttgccctcattcattgctttcccaaactcccccttttggacctcaactatgagacatcaggacttcccaaagcctggaacagggtaaaggagggctatgtgtgcaggtgtagggtgtacttgggaagcagaggaagaaaaggctggagagacttgaaatgccatggccaataatatggatttaccctaaaggccagtaagttgcaaatgtcgcaccacagcatgtattgccatgatcatgaaaatgaatgaggttaatacatataaattttccattttaattttaagcttatgtccggtaaatgttttcaaatctttcggtaccagttattcagtttagctcaaatttgcatacttgttgattttaagcttaacacgatggtgagtcactgtttcctgccatgcacactagtgtcacactgccccgtccccagcctctgcagttcacaagcacacactccccctgctgtgaagggctttaaccaggagaaggaaccaatccattttgactgttggagagactgttttgaagcagagtgggggagtacagtgaggggtggggtggagggaggagactgcagatcagctggggagctgggcagtagtccaggagtgggaataaataacggagttggtcgtaacaaaagacggcaagaaggagattaatccaaaggctctttgggagttagaactggcagccttagtatgtgaacaaaagaggaaattagaatggatttgagggtaggggaaggaacgtaagttgtactagatgcctggtagctagtaagtagcagagtcagaatttgagttcgtatttgatcataaagcctgtatactgaaccacatccccttttaggtttctagcctgaggaacacaagtgtcttggcaggctctgacatgatcgccatcccatgcccaacccagccctgtgtccctccaccgcatcccacatcctgtcctcagtcccaaaaggcaccgtattgaggagagctgggatccgacacagcctgcaccagctccgagagtctttccacattctgctgtctcagggcaaaggtgagactcagctcttcctcagggtccgcacggcccagggacacccagcctgggggcagcctgtagggtcaggggtcagggacatggctttggttagggtggagatggaaaatattggtcatggaaggttccagattaggagctgagaccttggggaggatcctaggagcagatacagatcacatgaggtgaatgataggggactgaggctaggaacatagagatgaagctatggagtgcgtactaggagctggcacgggggtgagagaagctaggaccaggacagtgggaggcagaacagggtatggggaagggggcagtctgtgctaagtcaactcacgtcctccgctggtcgggctccgggctgtaactgcatttgccagagaggatgagggcaaagagccctaggaggctgtaggggcagcaggtgggtttcagtgggagctacgttgtccttgtgttcccaccctcccaatgtgtgctccctccaacgtgatccctttctcccgagccctctcaatttctcaccaggcttggagtcccattctgcccttccgcggatctgctgtcatgtgacggatcacatgagctctatattccaccaccactacccctctgcctagtaactagtgacggtactggctcctcccttgcatgggtggtcccaaatgctaggcaagggtggggccgccacccggattctcccctctggccagtcaagcactgagtaagcccagggctccccacctgcgtcctgagcctggtcccctgggaatcaccacaagtgagtgggctgtagagacccacagactggggttcttcctagctgtatgacatcagcaaaataacctctcagagcctaggtttctgcatttacaatatggagacttatataaaagtgatctgcctcgaaagattgcagtgaaaaaatttttttcctcttttatcctttatgtccccatattatcaattttgtcttcattttacgactacatttatgaacagagtaaagcttttgcaagaccaggatccttttattcaaatcagtttccagttttaagtagcttcccaggagatctacaatcagctggggtcctgtttattatgggttcccaaggttttcaaggaaatcaactttgttctaagggccatggaggaatcttgcatcttgtttagtgggctcaggtggataaaatggaaacggacctttgcttcttctaatggtaactcaaagcccacaaggaggtctgagtttactacttccaactggggtcattacaagaggattttcaatgagagttaaaaccctgaggattcaattcccttccagtcttcctttttttccccccaaaaatccatatggaagatggtgtcagcagtgtcattttaacttccaaaaccattaatccaatactcatgtgaaatcccttgttctgacctcaatactttttagatagatccctctactcctgctgttgtcctacaggccactggcttccattaacctatagattatattcccacactgaagattatggcacttcacctttctgtccatcccaactcctgcgatcatttgacctagatgatcaaaatatctaggtaaaagacccattcaacaccctaaccttccatttcttcatctcattaaacccagtgagcattaccttcacttcacttaagcaaaccagtcccatggctgcattgggcttgctatctctcaaaactgctctacctttgaaattataattatagaatgctttcttagactataaccttctgttttttcaagccattgtttttcctcactcctattaatctgacttctctctgtccattgatccctccagtttcccactaagcgtggatcctagagctgtatttactagcatcatgctcagaaacatttccctttgaccacaacttttttttttttttctaatttcctcaatctcatgaacttctcaaacactggccaattgcctttccctcacagcctggctccccaaagaacaggcaacaccagtggttcccaaatccctttgtatgactgtgaaaatttacactgagattaagcaaggcagccacctgcagagagcctgacatgacaaaggctcaacaaattgagctctttttacaatgtggatttttagtggcccccaagaagaacaaataaaccacttgactgctcttgtacccaccccaacttattttaagaacttcgggcccagagctgctcatccccaagatcccctctcccacccaactgatccctctcaaggccctgctggcctctttgcccatattagagggaaaagaatagctgcagagagatgtgatcatcagcctcaggctaggctcctgagctcccagtgccatccccaccccaccacccctctgtgcctcctgaggtatccacaatactctgccaggtgtcttccagtcatccctatagaacaaagctggagactggatacaaattgcagtttattaaggctccagagtgagaaatggcacttggttctgggcaggggcaggggcaggggtgtcagtggaacccaaaggagctgggtccaaacatgttggagggacctcctccatccccct

SEQ ID NO: 915700 - DNA, 4001 bp, Homo sapiens
aaagattgtggaacgttaactactgctaacttatttcagccgtaaaatgagtagtattgaaagcagccttgtcataaatcaagacttaaattcacgaattagtatctgggtgtacattataatcaaaagagaatactgtaacatgtcttgggggagggggaagtaggataatccacaaaaagtttgtcctccaaggcagatgctaaggaggtatgtgccaagttaaaagaagtcaacaagttatgtcttaaatgagtcaattttaagtcaactgaaattcatacgagtaaacatgtaacttattgaagtaaaaccatgtaaagaaaatatgagaaattatctttaatgtgctactagctttagaaacagaaactgtttaccagcttcttaaatttctaaagtgtgaagacctacaaatgtactccaatggccaagagatgctgcaaaatactcaactgttgtgccttaactttgaatccaaattcaaggggcattccccttcctgggcactatttactctgctccaggaggcaaggatttgaacttctctccaaatctaagtgtccaaaagtttaccggcatcacatgcccaaatttatcacagagaagagctcatgttacaattctgaaatattgtggtgcatgcaggctgaaactctgatgtgatcctgtacccaccacatgccggactccttcctagagtcacaaaagaggccacattgttcctgcctatacactcaacctcaaaatttgaaaagcccctctcccttccctagtaatcaaaggagaatgaatgaaatgatagcggccaagttcacaaggccaacacagaatttctttaccagtttttctcgtttctacatggaacctgtgtaacaagacattcagtaatagtaatctgctctcagagaaagaaacaattaaataccatacagcgaagctgctaatactttatttaggtgctttctgttcacattcaagacagtcctaactcagctggagttccccttaagccaaatactaggaacagctttatcaacccggcgtctggaacaatcgctcgaactaccgagtttaggggcgggggagaaaacattcgtgtcatctgagcctttttttttttttaaactcgctgcctgagacttctatagagttcaacagggaatccaaaaatagctttcccatgacagtgacagccggagtcgccaggaacgtaaaggattttttaaaaatttaagcaggtgtttgctccaaggagcggacaactgcaggaggcaatttccttatctgggaaggggaaaaagcggagttgaggggagcgaggttgagtaaggcgacgcggggttttttagggggtggaatgagcgaggaagaggaggcctggggagcagaggtcaggggacagggaacggtgtccccgacctgtgggaagcgtggggacagaggctgcgtcccgacctgcaggaagcgaggggcagggaacggtgtcctcgaccagcgggaagcgagaggacaggggcggcgtccccgacccgtgggaagcaagcgggtaggggcggcgtccctgacctgtgaaaagcgaagggacaggggaggcgtccccgactggtgggaagcgaggggacagggactgcgtccccgacctgccgagagcgaaggggcggggggcggcgtccctgaccgctgggaagcgaggcggcggccgccaggaggaggcgcctgaaggagactcaccgttctagtgcgcggggaggccgaaccaggagggcagggctcccccaccaaccgcacgactccgctcagccaaggcgctggtagaggacggacacagacactgcgcgccgagacgaggctgcttggacggcaaactctggatccagtgggagccttcgccaccttcgctggccgcccgcaggccaagccccagctgcggacgccactgcttccgccttctctgctggctgcggggagcgaggggcagggagcgcgccggggaggagacagagcggccgagttcggagagagtgccccctggcggtgatcctccaggcggactgtggcgcgggccgggcggcgcccccagccccgcagcctggctttcttcctgctcgggtgtcccacctgggaattcgttgcaccgcacagccgaacccgagtgtgtcaatgggtgtgtgttggaatgaggatggcgacgagaagatccctcccggaataacttaatttggtgagcagtggcgacagtagtaatcccaaactgcgcttttatagcacccctctccaagcaggagaaaaccccagctgggctagatcgcttgaccttcaggaattcttaaacccctccccagctccaccctccttgcccaggaagtttctgcgatccatagaaccctctattattacctgctcttccccttcatccggtccaagggagtcagcccttgccttaaatatttctttgaatttcctgccaagaacaccagcgctttgtctttctctgtcatgggaaaactattttaaattccctgtttaactggtcataaacgtctagagaatgtaccacgcgttttgctggagaagcacaaaagagtttcatccacctctgcatatttggttcatcgtccacctcttaggggaggttttccaggatagtagtcatgcgtatgtatcctgaagccagaatgcttggttccaatccggtttttcctacaataaatgtgtgattcaggtaaaatacttaatctgtacttgtttcagttttctcatctcgtattaacatggggataataatagtatctacctcacagggttgttggaaggatgagataaaatatgtaaagaaattatttaaaactatctggccaggcacaaataggctcatgcctataatcccagtactttgggaggctaaggcaggaggatcacttgaggccaggaatttgagaccagcctgggcaacatagtgagaccccatctttacacaaaatttaaaaattacctgggtgtggtggtgcatatctgtagtctcggctactctggaggctgaggtgggaggatggcttgagccctggcagtcaaggctacagtaagccatgattgcaccactgcattccagcctgggtgacagagtgagaccctgtctcaaggaacaaacgaacaaacaaataaacccaaaactaggacatagtatgggctcaataaatgttaccaatactatatgtcctactttctggctgccaatattcattaaaaatgcttctctttttaagaagaatttatcactggttctcaggttctgtcaacccccttttaaaagattgtattttgaaacacttaagacataaaaagagcacaaacatctgtgtgctcaccacccagctttaaaaaataaaacattgccagcctttgtgtatccctccctagaagctcctcttaaaaattaaatctcttatgggatggaagaaaagatcattatatgaaattgagagctggagaaaaggaagagcaagagaatcagagttccctccacttcttagtgtgagctctggggcaggttacataacctccatgaactacaatgaccaaaaactataaaaaaggggataatgtctaccttaccaggcttttgtcagtataaaataataaaaatctattgtgagagactccagcaccaggctttcaaaaagattaggtgttctgtgtatgtttctttacattgttttcataagtgccctcaaggggccttttcctactccttcaaatccaatttattcaatataggagagagttttagtgctcatccatgccttgggcacacaggaaacttacaaataccatttccctttgcaatcaggcagggccacgtgactagttctggcctgtgagctatgacgagaaggatgcatatcattcctaggtcaaagcgttttattttcattgcaagactgtttcccctgtgtgcaaccaaggagcaaagggcaactacaagagggaagagatgtatc

SEQ ID NO: 915701 - DNA, 4001 bp, Homo sapiens
atttgggagcctgaggcaggagaatcgcttgaacccagggggcggatcatgcccctgcattccagcctgggcaacaagagtgaaacatttcaaaaaaaaaaagaattgtgccaggaaaagcacaccccctcttcttgcttaccaaaggtgtctttggtcaaccccctcctcccaccttctccaccacactcctctggcccacctggagatgcaaacttatcagtatctcttccccaccttctccatcacactcctctggcctccgtggagatgcatacctgtcagtgtctggtagcagtgcaatttgaatgtgtctgtctccagcatctcaatgcctgagcttccctgttcaggagacagctgggagccgatggcaaagagcctatatgcaaaggaggcaaagttgctctaaggaaggagtgcttctcaaacttccactgaagtgtccctatttgctgaggagttcacattacagcctgggacagtcaggagaagtagtgtgaactgactggcagtagtgtcaaaatttctaagttcatttgaattctgtgaatattttacattcatactttgttacaagacattttacatctaaaactttgggtaaaatgaatactctaggaatatgtgccacgcttactaagcttgtgtttaagcaaaggccggcacatctgatatcacaattgagagcagaaaaagtttaaaggtcatttagttaaactggctttctttaaatatgaagaaactaaggctcagagaagagaagttgactttaagtaagatgacacctcggccgggcgcggtggctcactcctgtaatcccagcactttgggaagccgaggcaggtggatcacctgaggtcaggagtttgagaccagcctggccaacatggcaaaacccctctctactaaaaatacaaaaattagctggtcgtggtggcacgcgcctgtaatcccagctactcgggaggctgaggcaggagaatcgcttgaacctgggaggcagaggctgcagtgagccgagatcccgccactgcgctccagcctgggtaactccgcggcccctccccacccagcaaaaaaagatgacaccactgccgttattacctaaaatctagatctggatcggttgcgtttttcataacaccagaacgacgatttaagaaaaggtagacaaattacaagcgctgccgttcaggagacgggggacttacgagtggaacatggaggccagcataagcttctcattagaagtgaggcggggccggccaaatcgaatggacaccgggtaattagcagggttacccagatactccagcacctctttcccgtcggccgtgtacctgccattcacgtccatgccattgatggccagcactgcatgacccactgcagaggtgaagctaacggtcagcgaaggtgcagcccggggattccgccgaggggacaagggacccgacacaaccccttttcccccaaccccgcacctacaaccagcccacttctacagcactggggccctcccacccccgcacccgccacgggcccgagcctagcccacctcggatgccgtcccgctggccgaaagcaaccaacacacgctcatcgtgtagcttgagcagcagatccagcggataactgaaagttttctcagcctcagcccgtggcgcgtagctgtccaactggtaaatcaagccgccagctttgttcaccacatacacactaaaaatcgccatcgctgccttgccgctcggaaactggtattcagcctctacccgacggcccctccccggaaccgcatcacagcacttgccgccggccccaccccagcctcctcctcctcctcctcctcctcccgcgccccccgtgcagccacctgctgcacttgcgcactgggagcgacacgctcgggcataagtagtgccggaaagttagctgccgagacctggtggattgcttttcgtttatcagtgcaggaaaacagcgctatagtatgcgtcacaactagcgcagactccggcagtatttaggcggtgcggcttgggaactagaatccacttcctgtcttccgcctcaggctagagggcgagcgcttcgccgtgggacttcttctgcctggctccgccttttgccccggaagtactcacagcggacggtggtttttgggcccgtttctgagcagcgcttcctttttgtccgacatcttgacgaggctgcggtgtctgctgctattctccgagcttcgcaatggtaagcttcaggggtgtgaagtcgccggcgttcttgggtttgaggactcagtggggagagccttcggcgggagcgctccttggcctgccggcctcggttgcagggcgggcgcggttattgcttggcccatgtgctctggtggtggagtttgcgggggctgagggcgcagtattaggggactttggcgctatttgaggacctggttgcattcccgctgccctcctacagccgcctaaggacgacaagaagaagaaggacgctggaaagtcggccaagaaagacaaagacccagtgaacaaatccgggggcaaggccaaaaagaaggtagaaataagacctctctgaaagagactaggggtaactctctcgtaatcctctagtaataggtaacttgtatagtaagtggtttttcaggtgtagatttctagagtcaaaatgtgagagtttatcttcccgtcaccactcgttctttttcccattaggatcatgaaaatgggtctgttgtgcgaagtgtctgccgctgtgcctgctgtgttatttttaactgatctagtggggctcggcccctgtttgaaggccaaaaacgtgtcggtgttttttttttgtttttgttttagtaatgtgtaatttatccttgataacggtggaacagatttctctgacgcagattactcgagagggaaagggtgcttctgccagaaatactaacttgtttctgttttgttttggtgagcagaagtggtccaaaggcaaagttcgggacaagctcaataacttagtcttgtttgacaaagctacctatgataaactctgtaaggaagttcccaactataaacttataaccccagctgtggtctctgagagactgaagattcgaggctccctggccagggcagcccttcaggagctccttagtaaaggtgaggggtgtatcctacatgtgtgtttttgtaggttaaattgtcttgaccatgttaagcatcttcagtggttttgctggaaaagcagaattaaaaaaaaaaagcgtggcttgaccattggctgttagtaatgtaattctgacgtcttactcctgatcctgagatgaattctcagggttcttagccacttttgtgccgtggaccctgtggcagtttagtgaagcccaaggatcttttatgtttcgagtaaatggatgcatagaattacagggacaaccgtttttgaaataattagattactattttgaaacaactttgaaaatgtttaaaacctttatggtaaatattttgttgatgtattaaattttaaaaccagaaatttagtacggtctactcagtagtatggtctgattaccataattccacaataataaggctcagctaactatagtgactgaacgtctataattctagcactttgggaggccaaggcgggtgaatcaacggaggtcaggagttaaagaccagcctggccaatatggtgaaaacctgctctactgaaagttagctggacgtgggggcacacgtctgtaatcccagctactcaggatgctgaggcatgaggatcccttgaacccaggagatggaggtggcagtgagccgagatgacaccactgcactccagccttagtgacagcaaaagactgtctcagaaagggggggggggtggaagataatggagccctaatttaaaggaaaagtaaggatagatgatcgttaaaaactaggattctcggttaccgaacgtcagattaagcaattctggagcca

SEQ ID NO: 915702 - DNA, 4001 bp, Homo sapiens
cgagattgcaccactgcactccaacctggcgacagagcgagactctgtctcaaaaaaagaaaaaaaatgaaaccataatcatggtataaccatttggaagtgttagtgaatcactggcctgaggttggtcttagggaacaccagtaaagtcatcttcccctacatttggcaaacagcctaatgcttgacaaagcactggaccacccagcctctctgaagtcctcattacaattgctcaggacaaaacctattaattatcccaggtacacttttcccctttatattccacaattgtcatgggcaagcactgtcaactctccctgtaacacacaccctctattgaaccccttgtctctgtctctagtctaaccactggaacccaagcccaaaccttgttgcctggagccccgctctccccggacctgttcccactctgccccaatcacacaggccttcgtcccaatccctgaacagtgcgtcagggcctctgcatggccctttccatgcctggactgtcctctcccagatcagctcagcaatggttcctgccacaattctgcttacacatcacctcctcagagacaccgtccctccccatcctctctaacacaccctctgctcacccacaccagcgggccctaacttctctctacttcaaactgtgcttctgttactgttttgcttctattattattattattattatttgagatagagttttgctcttgttgccccgactggagtgcaatggcatgatcttggctcactgcaacctccacatcccaagttcaagcgactctcctgcctcagcctcccgagtagctgggattacaggcgtgcgccaccatgcccggctaattttgtatttttcatagagatggggtttcaccatgttggccaggctggtctcgaactcctgacctcagatgatagctcccaccttggcctcccaaagtgctgggattacaggcatgagccaccgtgcccagctgtttttcttctattattattgttcttgcaggagctggtaaagtggctgatgtggccacagctccataaatccatgtggaacgaagggtggacatcgcctgagtccaggagacaggacagggtcactcatctctgtccctggtgatggaaactcaggctcaggaaagagccttgacctgccctgggtcacagagagaatatgagggtcagggctcaagcccaagtgctgtcttcaggcccttaggctgcctctcacacccagactaggaagctggagcagaaagtttgctagaacaatcctgagaagaggcctgcacagttcaaggggcagcttggaggaggagaggaagggagggcgggctctggccagcaggctcttggacctcaggccaggctctggcagctgcgtctggtatcaggactgcaggtcccgacagggggcggtggctcacgcttgtattcccagcacagtcgccaagcctaatgtcccttccaacggtggaaaattttggtaaaaatcaatgacaggctgggcgtggtggtgcatgcctgtgattccagctactcaggaggctgaggcacgagaatctctcgaacccgggaggtctaggctgcagtgagtggagatggtgccactgtactccatctggacgaccgagcaagactctaacaacaacaacaaaaaaaacggactgcaggtgcagtgcccagcacagagcctgctacataggaattctcattttcttctcttccctactctttccttcctttataatctcttcctttccctctgaagtaccgaccccagagcttgagatctcatcccagcctccctcttattgccatcctcccctgctgccttccccacacccctacctctcacagggtgggggtagggcctcctgggaccccagtcccagccccagcagcagtagcaggcacagctcccaggtcctccctggcatggtggctgtgactgtgactgaatgagcaagcccaggcaccttcggcttgctgggcacagcctggctcacctgcctgtccaagtcggccaaagtccagcctttgaggcgtggccacctgaggggacgtgtgcttggtctgtgtgtggcccgcttgcccctcctgctctcagggcacagtggccacctcccttgcttctactttgcctcttctatttcacagtctcagctggtgccaatggctcaggcccttccctcagagcatggtggtgggggtggggagtgggcacccaaaggccagggacacagtcgaggccacacacctgtaacctggatgccaggttccttgggtggccccaagaccaccaacctcagagagttaccatttcccttaacatttcaaatggaatggctcaagatcctgtccctggtgtggtgtgaaattcagggcctctcactgttatctgcaagagatacagcggaagcacaggacagtagaaccattctgtctggggaggactaagggagacccacaatagtgtgtcatttgtaatgagtctttttttttttttttttgagactgagtctcactctgtcgctaggctggagtgcagtggcgtgatctcagctcactgccacctccgcctcccgggttcaagcaattctcctgcctcagcatcctgaatagctgggactacaggtgcccgccaccacgcccagctaatttttgtatttttagtagagacggggtttcactgtgttggccaggatggtctcaatctcttgacctcatgatctgctcgccttggcctcccaaagtgctgggattacaggcgtgagccactgcgccagtcctaatgagtcttgatgaccgcataggagtttgccaagggaaatgggctggagaccactacaatgtatgcagagcatgtgaagagaagagcaaacccctcagcctagctgcagagaacttggtgttcatgcagggaagggttttgagatagactggaggaacatgttggcaccagtctggaaatggtctttgccaagccaaggaatgtaattccttgtaattccccaaagtggaaccagcagagaagtttgtgagcttaagaagcagattcaggctgggtgcagtggctcatgcctgtaatcccaccactttgggaggccgaggcgggtggatcacctgaggtcaggagttcaagaccagcctggccaacatggtgaaaccccgtctctacaaaaatacaaaaattagctgggcatgatggcgggtacctgtaatcccagctcctcaggaggctgaggtgggagaatcgcttgaactcgggagacagaggttgtagtgagccgagatcatgccactgcactccagcctgggcgacagagtaagtctctgtctcaaaaaaaaaaaaaaaaaaaaaaaagcagattcggttactttaggaggctcatcccctcaacatatggaaggtgagctgaagggacaggggacagggggtgggcaaggcacatggagtttaatgataggcatgacctctcctgaaggacttaggtttgcagttaaggatgtcagttgtggcacctgagcagtgtttactgctattaaaaagaaaaaccttagacaaattaaatttaaccatttattcaagcaaagaaatgactcatgaatcaggcaccactctgaactagtaaaggttcagatagctccacccagtaatgtgggcagctggcattgttttttttgtttgctttgttttttgagacagggtctcgctctgttgcccaggctggcatgcagtggctccatcacagctcactgcagccttgatctctcaggtttaagggattctcccacctcagcctcctgagcagctgggaccacaggcacatgccaccacgcccaactaatttttaaattaaaaataatttttttttttttagagattgggtctccctatgttgtccaggctggtgtggaactcctgagctcaagcaatcctcctgcctcatcctcccaatgtattgggattacaggtgtgagcc

SEQ ID NO: 915703 - DNA, 4001 bp, Homo sapiens
ggataaagaaaatgtggtatgtatacacaatggagtactgttcagtcataaaatataatgagatcctgtcattcacaacaacatgaatggaactggaggtcattatgttaggtgaaataagccaggcacagaaacacaaacattgtatggtctcactcatttgtagaagctaaaaattaaaacaattgaactcatggagttagataatagaaagatggttaccagaggctgggaagagtaatagggagggtctgtgtgtgggggagaagatgggatggttaatgggtacaaaagtggagtgaattagatctagtatttgatagtacaacagggtgactatagtcaataatttaattgtacattaaaaataagagtataattgcatagtttgtattacagatgatcaatgcttgaggtgatagatgccccacttaccctgatgtgattattacacattgtatacctgtatcacaatattccatatacccataaatatacctactatgtgcccacaaaaattaaaaatatactaaaaaaagaaaaacaaaatgatgcaaaggaaaataaaaaataagaataaaaataatgggtcaggcacggtggctcacacctgtaatcccagcactttgggaggccgaggtgggtggatcaccttaggtcaggagttcaagaccagcctgaccaatatggtaaaaccctgtctctactaaaaatacaaaaattagctgggagtggtggtgggcacctgtaatcccagctacttgggaggctgaggcaggagaattgcttgaacctgggaggcagaggttgcagtgagccaagattgtgccattgcactccagcctgggtgacacggcgagactccctctcaaaaacaaaacaaaacaaaacaaggcataaaattaatggcaaaacaattaatgtcaaaaacagtaattacttttgcaccgatcaaacagtttgttgaataagtttattcctgttctgaataacaagaactcctccattgtttggtccattgatccagtgagacagaaggagaaactgagtccctaaaagagggaatgaaaattggcaagaacctcataaagctgttgacagttctactctcatcatgtccattcctgcttaaaccctcagtgctcatccatctcctgtcgggtaccaacaggcctccatgttgctgagaaattatagctactttttaccatgtaccttccatgtgccagagatacttcatgctttgaatatatcttcattaatccctcctataacggcggaagtcagttgcatatatgtatgtaggtgtatatgtatgtatacacacagagtaacaggaaccgtggccagcactccctgggctcttttctcagctgctccaaacttagtttagttcctgacaacacttattctaggacaaagaataattctgaaggcctatacatttctggttgaacatcctaaacagcctgcccctctcacctctggaggacttttggacctgggagtctccagaattgcagacctccccgacactgggctccctaccctcctggctaggctgtagtcctggctatcccagccacacccagccgtcatcctaggtcaggtgccagcatgggggcagccgggccccttccccttctgggtaactccacagtcacgtccacaacccagcctcctcccaggtagggggcagccgggccccttccccttctgggtaactcggcagtcaggtccacaccccagcctcctcccaagcagggggccagcaccggaagcgcagctggtcttgggttgagggatccctggtgggagaaggggcaaatgggaccggctcaaggatggagactggaaggggctctgcaaccctggggcaggggagagaggtcccctaggagggcaggggtcccttgatctagtggggttcactcacctttacaggggactcaacgctggtagccagctccctatttcactttcagtttccgctcagaagcaagtctgagaggaaaggggagggaggaggaggagccgtgggaggagtgagggaggagcagtgggaggagcagagccttgaaagggtgtgtggagaaatgcggctgagaagagaagtcagagttgagctgggggaggcttcagaggctctgcatgcccaggaggcttctctgagactgggaaggagtggaaactcagtagcccgtggtcctggttgcgcgctccctcccatgtcttcattatctgatttggtaaaatatctacaagacgggggagtccgggctgctttctttgacactggtcatcactccacacctagacgctatgtccatgtctggaagatgcttttaaggaagttttgatgcagagaagagtggccggtgctcttcctcgcgtgccaccatctgcttacttccagaagctaattattttcatgtgactgatgtgactaatattttttaacgcctgcaggtgagtgatttatttcgcatgaccccaaggtgagtgtcccaccagtgagtggtgagaaggaaattgacatttgacaaccaactgtgttcttgtcactgagctagggacattctcaggttatattatttttatttttaatcgtaaaaatatagaacataaaatttaccaaagtaatttttttaattttcaatcttgtgtgtctatagtaggtgtatatatttgtggggtacatgaaatattttgatacaggtagagcatacaatccgtaataatcatatcagggtaagtggggtatctatccatcacctcaagcacttatcatttgtgttatatacaatccagttatatgcttttagttattttaaaatgataaattatcattgactgtattcaccttgttatgctataaaatactagatcttattcattctctctcatgtatttttgaacccattaatcattccccactacccttcccagcctttggtaaccatcatcctctctatcttcatgagttggattgttttaatttttaactcccacaaataagtgagaacataacaatttgtttgtttgcctgtgtttggtttattttacttaacataataatccccaattccatccatcttgtagcaaatgaaaggttctccttctttttatggctgaatagtgctccattgtgtatgtgtaccacactttccttatccatttatctgttgatggacacttacgttgcttccaaatcttggctattgtgaatagtgctgcgataaacatgggagtgcagatatctctttgatatactgatttcctttctcttggatatatacctaacagtatttcttctgggtatatacctagcagtatccagtaggattgctagattacatggtagctctattttcaggtttttttttttttttgaggaaccttcaaattgtttgccatagtgtttgtactaatttccattcccattgacagtgtatgagggttcccttttctacatatccttgccagcatttgttattgcctttcttttggttaaaagacattttaactgaggtgagataatatctcgtagttttgatttgcatttctctgatgatcagtggtgttgaacacattttcatatatccatttgccacttgtatgtcttcttctgaggaatgtctattcagatcgtttgtccatttttgaatcagattattatatttttttcctatagagttgtttgagttctttgtatattctggttattaatcccttgtcagatggatagtttgcaaatatttactccaattctgtgggttatctctctacttcattgtttcctttgctgtgcagaagctttttaacttgatgtgatctcatttgtccagttttgctttggttgcctgtgcttatggaatatttgaaagaaatttttgcccagtccaatgtcctggagagtttccccaatattttcttgtagtagtttcatagtttgaggccttagatttttttttaaattatactttaagttctagggtaca

SEQ ID NO: 915704 - DNA, 4001 bp, Homo sapiens
gagaccacctctcatattgtcttatgcccaatttctgcctccaaagaaagaaaaagtaaaaactaaaaggcagaaatgaaatccacaagcagacagcccggggccacaccctggacctggtagttaaagatggacccctgacctaattggtttgttatctatagattccagacattgtatagaaaagcactgtgaaaatccctactctgttttgttccgatctaattaccggtgtatgcagcccccagtcacgtaccccctgcttgctcaatcgatcacgaccctctcacgcggacccccttagagttgtgagcccttaaaagggacaggaattgctcactcgaggagctcggctcttgagacaggagtcttgcctatgcccctggccgaataaaccccttccttctttacctcggtgtctgaggagttttttctgtggctggtcctgctacaaaggaagagtaagctgtgggtactcagaagaacaagttccctgtgactggaccttcagagacaagagaccaaagtggagctgcagagatgagcagcagtctgcccgtcctgcggcctctctcctcggactaaccagagggctgctaatttatcaggaaagctatggacagcatccaaaaagttaccagaaggcaagtaaaaggataaccttcaaaagggccttacttctgaagactgagtacctaagactccttcgcctcatacccagatccagataagggctctcatccctgctgaacctcatcatgaggttgctttatgaaaagtgaaaacaaagcttcattgcacaggcttcttcgggagaaaggaggaaggaatttgctgcctctgaataaaagaaaattctgatccacgttggcaaaatggaaaaatcaaaatgacagaataggaatgtggggtatgataaggtttctcttcaaatagcctgatcaatcctttattctttaattcacagtgcccctccccacttcacttttcttctcttctctttcctttctgcttttgctacatgcctagacatgtcacagtaccaggcgttatcagtaccaactcacattcctttccttattttggaagaagattagttatctagctcatcacacacaccccttccccatctcccctctctccctcacgtgcccaccttatctaaagaaagttaaaatgtttagccaactgagtctagtttagattgtgtggccgactccagccaatggggaaagggcaaaggggtaggatttgcgtcaggaataaaaactttcttcctcctttgttctagtgtgctctcatggcgactggcaaagaagaagcacccctctgcacagaaataaaattgctttgctgagaaatcctttgtttgagtgctcgtctcccttaagattctgagctttatttccaacaaggaaggtgatggaggtacctagattgaagaaatgaatggtccctctaggaaacaagcaaggctttttgcttttgcaaacctctcttctttaaaggttacccctctcccagactcagtgctttcttcctctgccatctcagcagacagttcacaagctgcctctttttgtttatgcagagcagcttcagaactacaaattaaactcacccagacacaatcaatctattcttctcaaagcctcccattctatgctcccacagattgctccactcaccttcagtccaaagcagaggagtcttgaatcaggggagaagagtgaaggcagggcaggagccggtgtaaaccagattcactcaccaagccagagggctggtctccacaaatgagtttccccacaggagctgagtgagaaacgaaagttaaattctcagaagtgaaagaaaacaaaggaagctgaacaagaacttacataacaataaaccctggggaaagtaatgctacattatgttctagcatctgctgtactggcaaggcactcagtcactacttccttattcttactgtggtttactcaagcaagaatatttgaataaaaagaatgtgaattacagttatacagcttgcctgaatacttagaattccaatgcagtcctataattattagtcgaatttatcttatatttaagacctaagccaggaaaataaagatccagagacttgggacctagcttcttgaaatgcagtctgacgaggaagatactcagttataaagctctacaaatttgggctgacaagatgagtattagcagctgacattgtgaatggtaaaaaaattatttttataaataaaaggatctttagtgtgagcccattgaaaaaaatgttctcaaaatgtcattaaatcttaagagtccatcaattaattatcacttcctgctcctaatccagacagaccagatgaggatggattccagagagtaatagaggtaaaactgtgtcagtgtcatgttacccagccactgaggcaggtgagaacatggaagttaacagatgatgctgtttaattataatcattcattgagttactctcatgccttcataatttttccacttttccctgcttctctaagaaaagtttggtcatttttacacaatcaattaaaaagcagcactgaaacatgttatacgtcatgcacatacttctgtaccctgttgtctattgtattcttgtttaactgcatgtgccagataatgccatcaaaaactgatggaggcctgtggtgtctcatgcctgtaatcccagcactctgggaggcccaggtgggtggatcacttgagtccaggacttcaacaccagcctgggcaacatggtgaaatcccatctctaagaaaaattaaaaaaaaaaaaatagctgggtgtggtgatgtgcacctgtagtcccagctactcaggaaactgagatgggaggatggcttgagcccaggaggtggaggttgcattgagccaagattgcgtcattgcaccatagcactgcagcctgggtgacatagtaagaccctgtctctacaaaaaacaaacaaacaaacaccacacaacacatacacacacacacccaaaaaaaaagaaaaaaaaaggcaactcatggagcttccataacatggatccctgactgacactatggagcatggccatcttcatactttaatcaatgatacacatgtaggatgactgagaaatcaatgtttattatttcaataatagatattttggtattatttgttgctcacagaataataagctaatcctggctataaattctttcctactcacttatatctatgaggaccttattcaatcagctgaaagccagaatagaagaaaaaactgacttctccccgagaagagggaatattaccagcaggcaaacctcaggcgtgagctataacgttgactccttcttggatccagagcctcttggcctaccttgcagactttggatttgccagtctccagaatcacctgagacatttctcaagtttctttccaaataaattcatagtttagtggttctattgctatgatgaaccttgactaagacaggcgtgaaattttcttatttcttcttgaagataaataagcaagagatgtaattttaggtatattccatgtttgaatagaatatcttgttgacatttgtaggggagtgagcgctcagtgagtgaatgtgttttttctggagtgcacagagtggagtccgagtgtcaaccacaatggacaaagtgaatgaactcatttatccagagacctgttctctgtccattatttcttcccttctcagcacttccatagatctcatagccatccttttattctcgtctggctttgaacatctgaagtgaactttcatcctggtctgatttatctcatgaagtattaattgcagctgagagaaaacagtagtaatattaggtcctgacaagataccagaaaacgtgggccaatagaaaaactgaatgcaccacacacagtttatcaccagagtagagcatgttggcaggctccatattctaacctatgttctaaatt

SEQ ID NO: 915705 - DNA, 4001 bp, Homo sapiens
cataaaataaacacatatacagatgctcctcaacttgtgatggggttatttaccaataaacccattgtaagttgaaaatgtgataggtcaaaaatgcttttaatacacctagcctaccaagcatcatagcttaacctagcttaccttaaacttgttcagagcacttacattagccgacagtttggcaaaatcttctactacaaagcctattttgtaataaagtgttggattttatggaatactgtactgaaagcatagcactttcacatcattgtaaatcaaaccatcctaagtcagggactagctgtacacgtacacgccatccacacacaaactccaaacttccccaacggtgtccgcctgcaggaatatgtgtgtccacacacaaccacacacgcaaaacacagggcccagctgggagaaggataaaggaggctgtggaggaagtcaagagaccagctggggatcagctagaacaagaagccactgtacgacaataaaaactacaaagacagcaagaaggacctttcagtgggccccaaaattctctccttctagtatctttcctcacccacaacccattccccaggggccagtccgactcaggttggaggaattatctcttcttcaaagcaaaaaaaaaaaaaaataaaagaagaagaagaggaggaagaagaggaagagggagaaggagaagaagaagaaagaaacacctcagccaggcacagagcccagaagtgaggtctatgcagttgggtcatactctctaacctgactcgaatttatcctatgactttggtcaggccctcaaccttttctgagtctccatccgctcatctagaaaatgtccctgtctcctgagaccttaggggattggggagcaacctctgatccccagctgggattaggggggacagggggcatgaggggaaataaatgttttctaaaagagccaaggacagtagaaacttaagccccaaacccgaggaagcccgagtggagaagatgaagttcggaggggtggggtgagagaggagaggcctggaggggcaggaggggccccagcacttacctccttctcggccttggcctcctccactgtcacggtgctatgattcttgtgctcctggaacatgcaaaggtagcagatgcaggtctggtcggtctggcagaagagctccatcgtcttgccatgcacgggacacttgcgggcctcaaagtcccggatgggctcgagcagctggtggtctcggaaggcggcgccctccaggtggggcttgagatgcagctcgcagaaggaggcctggcacaccaggcaggacttgaccgccttctgcttgttgccgatgcaggagtcgcacagcacctcctcggagccggacttggaccgtgaaaaaaggcccgtgtcggcccgggggtagctgttccgccgggtctccccgggctccatgatggacaccgtgggcttccgggactccgagaaaatggacttgcgcagctcgcccttttcggcaaaggtaacgggtggcttcttggcagcccccagctggagccctgcgtacggcgacctcttgccttccatagagtccatgctgaagtagttggagttcttgtcgtccccggactcgacaaactggatgatgggtcgccgccactcattgcccgcgaacagggcgctcctaccttcccctggcttcagggcgctgcccaggctcttgccctcagctgcctccccgccgtgcccgttggtggtcttggcatccttgccgtcagccttggtgccattctccaggctgccactggggcccgacgggctccgggcatccctggcttctgggctcgacccgttgctcctggaggcatctgcagcttccatcgcagggtgcttggctgagctgtttcaggcttgctggggttcaggataggtgacctttctggcaggcgtctcggcagggagtggggcaggcaaccacgaggactagagacacacctgtgaggaggaggagggggaggaggcggaggaggaggagggggaggagtggaggggaggagcaacaggcacaagcctgacacagcggcccgggagaagcagggagccccgcagccagcagagcagataattgcacaggaaccacgccctgcacattcatccctaacctgatttttaaaagaagtgttttttctcccccagcttattttccacaactcagcaaccagttgggctgcttccctctgacgcacttgcttctcatccggggagcggggagtctccgtcttcacaagtgggcaggcttcactgagcccagaggcccctggggcagaaggtgaggtgtctgcagaggcctaccagacacagggctgttaactgggtcacacaagccaaatagccttgtaatttgcaggcctgagtttcagaggaaagattgtccaccctgggactgtatcgctgcttttcaccttaagggggaaggatgggttccatttgatttggctactgagtattgaaccctacttgccaacctccaggcactttcctaggtattgcatatattacgagctcattcaggcttccctaaaacctgttcaattacccctttttaacagatgagaaaacaggctttaagaagataactcactggcctaagtcaagtggccgagctgggatttgaaccctaagcctttgagaagccaaagtcccttcttcagctgggtggtcatggagtcacctgaatatctcatcagaagatggcttctgagagtctgtcctatcccaatggccccaacaagatacatatagaccttagattattgctacctgcgtggattcaaatgaccaaggcacaacaatgaggggaatccaagcaatgccagcccaggtggttgggtcctcagggcccaaacacttgactctcacctgtctccacacttggtctgctgtgtgactcagaaaacacctgcccatcctctctgggccaggccacaggcaatgccctccaaaaagaggtcagcaaagtgtgagattcagataatctcagaagtcacctgttcaaatatgactatcatataaatacagacctcaggaagaaaagtgagaaaaacaaacttcatccccttcctctccgtggcccctgcggaacaccaggacccttagctcttgtaggacatgccccccagccacttctgggctctgacccattgacctggtcctaggaagcctccaaacccctaaggaaagggccgtgcctctccaaggccaggctgggcagggcagagcagacagtaggtgaggctggcgtggcaggttctgggctgtgtggaggggaatgggtttcccttccttcccctccaatccatgtcaagctaggaagcccccgcccctttgcctcaccaggctgagcagctaatcctttgcaaaaacagcccctgggaacaagggcagagacaagcccacctcacaaagcagttcacttatgagaggatgtatgtgaggtggtgttggcgtggggagtgctggcttcatgacggggattctcctcttgcctgaggtctctgtctgtgggccccaaaggagccccctcttgtttgaactcactggtgaattggctaagagcttgttgggccttctggggagggggacacttactcaaaatgccaggcccaatttctctgggctcttgcctgaggtacggagggagaaggagagaaggaagtcctgtcctggcctgctggattgggacatgcccctcccctttccctaataatatttccctaacctggagagaacaggcggtgaggagaaaagaacagagaggacacaaagaaacagaagaggaaagtcattgggttctggctacagtccaacatcaatgctggatgagcctggggcaccctggagggcctccgctagttcttacagttcatgcacccatcttccagaaatctggggaaagattctgaaccttaggaataggctgacacagagtaaatgttcagagaatatt

SEQ ID NO: 915706 - DNA, 4001 bp, Homo sapiens
gctgagttttaagtcacctgtgacactctatgaacgctctctattctaaccatatggtttttctgcttttctgaacctgggctatactatcccaacgatggactctttgctcaagttctctcggcaagaatgccattgtctcctaagtggctgtggcagtacctggcacacaggaagtactcagtatatgttggttacaggagagctctgtttaaatctctgcagttccctttcatcagagagagatgcaaaagtaatggcagtaacaagacaagtgaataaagtcccaagaagagagacctctgcttaatataaggaagcttttccacagcagaaagtagcaagtgctctgtcactggaggcatacaagcccaaggaggcagggctactgtcaggcctgcagctctgattccaattctgcagcaaatcatcccctgcttaggggatgaatgggcaccagtgagctagacagactggccaagggagacctgtgatgttttctgcacctgctgtgacctcccagatgtgatcttcctgctagggccagtcctgagtttctgttgtccacatcagagaacccccacaccaagaacaagcccagggcctgccctcagtcgaactgacctccctggggtgcagcctgcccctccaacctgcaaccatctgtccctgcaggtttgcagcccaggatctgaagccaattgcagaagggaggaggtcagaaccagggaggggcctggggtcctccaggcagggctcaggctacaggagaaccagaggggtcctttcctacaaaaaaacagcctccacatgaggctttctgtccacagagcagtgcatggggaggaaagggtgtcctccatcctgactggtgggcctgtgggtaccagaggatggaaggggcggggggtggggtagggtgggggtgggggagcaaggggtggaggtgtctgcaccagggagaaaagagcccttcagacaagatgggccacaatattccagagtcccactcagcacgcaccaccaccaccaccctcggccgcagcgttcagcaccctccgccaacacacacaagctcccaaaccccgcgctcccctaaggaaccatcacccatccacccgcgcctccccgcctcaaaacagggacctcacgtgagcagccacagcccgaagaatccccctgctgctctcacggacatggacacgcctcacgtgggcagagagaggcacagcttttgaaaatcatctgtgcccccacccacagacgctccgacccagacccgggctgacaggaatacaaacgcacccttggggcccgcccgtcgcactcaccgcgttggaacaggatgcgagggcaaagctcggactgcggccactctgaagggcccgcggcgctgctactgctgccagcgcccgtccgcccggccctgcccgcgcctccgcctgtccccgcgccggcgccgccgccggactagccgcacaggccggagggaggggccggggcggggctgcggaccggccgggggagggggtgactccagtagggaagacccacccacgccccgcccgccgccgcggaggccccgcccaccccgcctgcccacccctaccgcacccgcacgcccccccgccaacgcctccacctcctgcggacgctgcctccttggtgctgctagggagccggcgggccggcgagccggatcccggatctcggatcccggatctccgccagctgcctccggctccgggaagggcggtgtagtcggtctcagggattgagatgagactccgtcaagaaaaggcagctggggcagcagggatttcggactctgggagcctgtctgggccgcctgcctcctggaggcgccctttccggcttccttggagtgctcctatggaatatgctagtctatcggctgaccaggaagacgtagaaaccgtctgtacctcagcacgatctctgggcggcagaagggcagtacccagaactctgggagaaggagttaaggggtagaaaggtgggggatttgattaggctttgggcgcttcaggagccccctcctgaggaaattctggttcagaccatccagcgactcccttcctcacaccaaagacactggacaattctcagaatcatcgccttgtgcaaaaagcagccccaagtggaaaataattgtaacagtttacagggactgagtggttattatgtgccgacacagaactagccactttacatatattatttaatagtcagtaggtagcatcttttattagcccaattttacaatgggaaaaaatagggatcttgctccccagacgttagccctcatcactcagctagaaagtggcagaacctggagttgagccctgtttttaggccctacaaccagcatttggagactcggtacctttcatgttgaaaaatccccagtggcccattaagtggcagctcatataaggaccaccttccctgccccaaaaatcaagctctagtcagatgattgcaggctgatcaaagcccagaagactgtctgggagctgcagtatccatgacaaagggcaaagtcatgcctgtgaggatccctgcactatgggaatctgctgagtgggtcttccccttcctccagccttccagaggtggggaaaatcctgaaaaattctggtttccttggccaaagggcatacaggtgatgacacctagccctgactaaaccaaagtgctgttagggatctttcttgtgacctctccacaaggttcagatttaggctcaacacctgggtgcagcaggagctttgggaaccgcctcaacctcttatccacctgagttcagcacatagcacaagatgctccagtgcttgtgaaggaaacccagacggggatcatgcttgcagttttgggctggggctactatgctacccaagatgagggaactggagtctagatgacactatcttaagcctcagaggactacttttctcaactctatacttctcccatgcagtcaaatttctgcttaaaacacttctcagctccttctccagagggcaaaagtccttaaccagcctgcagtcttcatctagccactccctcttcatttttcattccaagcaattcctcccagttcctactcagagccttcattatatgctagcctctctgcctgggatgctcttccctttaccctgcctgtttgtcatctactcacccttcaggtctcagcttttttttttttttttttgagatggagtcccgctctgttgcccaggctggagtgcagtggcgcaatcttggctccactgcaagctccgcctcccgggttcacaccattctcctgcctcagcctcccgagtagctgggactacaggactacaggcgccagccaccgtgccgggctaattttcttgcatttttagtagagatgggttttcaccgtgttagccaggatggtcttgatctcctgacctggtgatccgcccgcctcggcctcccaaagtgctgggattacaggagtgagccaccgcacctggccaggtctcagctttcaaactgacatccccatttccaccccagtccatgccagatgcccctcctttgtgctcccacagcgccctctgtacttctgtatcctaatacttatcactgttttgtagttgcctggttacttctttccctcagtaggccctaagcactgtgggcagggaccgtgttttattcactgatgtttccccagggcctaacgcagtccctggcaaatgaaagcactcagtaaatatttgctgtatgaatgaatgcatgatgaaggtcagcaaacccaaccccctctggatctggtgctcttaagatccatagctatcttggtgctggctaaaggacaaagctttggctccaactgaggctgggagagaagactgggccttcaaaccatctctgaaacctgtgacttcagctgcctggccccagctcttttgacttgatagggttctggtgtttgattagactga

SEQ ID NO: 915707 - DNA, 4001 bp, Homo sapiens
ataaataaataaataaaaggcaccaccactcacccacccacacaagcgagaaccctggtagtcttctcaattacaccttttctttcacctttcagatacaagctatgactacatcctcaattctgcctctgaaatttggctaggtttaaaaagttaggagatctaggatctagtcctaatgctgtaactaactccactaacacaaggtgaaactctaggtaagttccaaccccattcccttatttgtaaattgggagaagagggatgttttctcaaaatctgagattcccaaggttccctctcaagccaagggcttccacagattgtaccatgagcccatgattaaatcccatcttgtactacctcgatgatttgacttctagtttccactgttaggctaaatgtgttagaggatggtcttagttgcctcccctccacactccccctgccccctcgcccccgtaaataaatgtttgctgagttttaagtcacctgtgacactctatgaacgctctctattctaaccatatggtttttctgcttttctgaacctgggctatactatcccaacgatggactctttgctcaagttctctcggcaagaatgccattgtctcctaagtggctgtggcagtacctggcacacaggaagtactcagtatatgttggttacaggagagctctgtttaaatctctgcagttccctttcatcagagagagatgcaaaagtaatggcagtaacaagacaagtgaataaagtcccaagaagagagacctctgcttaatataaggaagcttttccacagcagaaagtagcaagtgctctgtcactggaggcatacaagcccaaggaggcagggctactgtcaggcctgcagctctgattccaattctgcagcaaatcatcccctgcttaggggatgaatgggcaccagtgagctagacagactggccaagggagacctgtgatgttttctgcacctgctgtgacctcccagatgtgatcttcctgctagggccagtcctgagtttctgttgtccacatcagagaacccccacaccaagaacaagcccagggcctgccctcagtcgaactgacctccctggggtgcagcctgcccctccaacctgcaaccatctgtccctgcaggtttgcagcccaggatctgaagccaattgcagaagggaggaggtcagaaccagggaggggcctggggtcctccaggcagggctcaggctacaggagaaccagaggggtcctttcctacaaaaaaacagcctccacatgaggctttctgtccacagagcagtgcatggggaggaaagggtgtcctccatcctgactggtgggcctgtgggtaccagaggatggaaggggcggggggtggggtagggtgggggtgggggagcaaggggtggaggtgtctgcaccagggagaaaagagcccttcagacaagatgggccacaatattccagagtcccactcagcacgcaccaccaccaccaccctcggccgcagcgttcagcaccctccgccaacacacacaagctcccaaaccccgcgctcccctaaggaaccatcacccatccacccgcgcctccccgcctcaaaacagggacctcacgtgagcagccacagcccgaagaatccccctgctgctctcacggacatggacacgcctcacgtgggcagagagaggcacagcttttgaaaatcatctgtgcccccacccacagacgctccgacccagacccgggctgacaggaatacaaacgcacccttggggcccgcccgtcgcactcaccgcgttggaacaggatgcgagggcaaagctcggactgcggccactctgaagggcccgcggcgctgctactgctgccagcgcccgtccgcccggccctgcccgcgcctccgcctgtccccgcgccggcgccgccgccggactagccgcacaggccggagggaggggccggggcggggctgcggaccggccgggggagggggtgactccagtagggaagacccacccacgccccgcccgccgccgcggaggccccgcccaccccgcctgcccacccctaccgcacccgcacgcccccccgccaacgcctccacctcctgcggacgctgcctccttggtgctgctagggagccggcgggccggcgagccggatcccggatctcggatcccggatctccgccagctgcctccggctccgggaagggcggtgtagtcggtctcagggattgagatgagactccgtcaagaaaaggcagctggggcagcagggatttcggactctgggagcctgtctgggccgcctgcctcctggaggcgccctttccggcttccttggagtgctcctatggaatatgctagtctatcggctgaccaggaagacgtagaaaccgtctgtacctcagcacgatctctgggcggcagaagggcagtacccagaactctgggagaaggagttaaggggtagaaaggtgggggatttgattaggctttgggcgcttcaggagccccctcctgaggaaattctggttcagaccatccagcgactcccttcctcacaccaaagacactggacaattctcagaatcatcgccttgtgcaaaaagcagccccaagtggaaaataattgtaacagtttacagggactgagtggttattatgtgccgacacagaactagccactttacatatattatttaatagtcagtaggtagcatcttttattagcccaattttacaatgggaaaaaatagggatcttgctccccagacgttagccctcatcactcagctagaaagtggcagaacctggagttgagccctgtttttaggccctacaaccagcatttggagactcggtacctttcatgttgaaaaatccccagtggcccattaagtggcagctcatataaggaccaccttccctgccccaaaaatcaagctctagtcagatgattgcaggctgatcaaagcccagaagactgtctgggagctgcagtatccatgacaaagggcaaagtcatgcctgtgaggatccctgcactatgggaatctgctgagtgggtcttccccttcctccagccttccagaggtggggaaaatcctgaaaaattctggtttccttggccaaagggcatacaggtgatgacacctagccctgactaaaccaaagtgctgttagggatctttcttgtgacctctccacaaggttcagatttaggctcaacacctgggtgcagcaggagctttgggaaccgcctcaacctcttatccacctgagttcagcacatagcacaagatgctccagtgcttgtgaaggaaacccagacggggatcatgcttgcagttttgggctggggctactatgctacccaagatgagggaactggagtctagatgacactatcttaagcctcagaggactacttttctcaactctatacttctcccatgcagtcaaatttctgcttaaaacacttctcagctccttctccagagggcaaaagtccttaaccagcctgcagtcttcatctagccactccctcttcatttttcattccaagcaattcctcccagttcctactcagagccttcattatatgctagcctctctgcctgggatgctcttccctttaccctgcctgtttgtcatctactcacccttcaggtctcagcttttttttttttttttttgagatggagtcccgctctgttgcccaggctggagtgcagtggcgcaatcttggctccactgcaagctccgcctcccgggttcacaccattctcctgcctcagcctcccgagtagctgggactacaggactacaggcgccagccaccgtgccgggctaattttcttgcatttttagtagagatgggttttcaccgtgttagccaggatggtcttgatctcctgacctggtgatccgcccgcctcggcctcccaaagtgctgggattacaggagtgagccaccgcacctg

SEQ ID NO: 915708 - DNA, 4001 bp, Homo sapiens
atcagagcacaacttggttgtatacattttagagagacatgagacatcaatcaataaatgtgagatgtacattggttccatctgaaaaggcaggacaactcaagcagggagggggcttccaggtcacaggttggtgaaggacaacctgttgcattcttttgagtttctgattagccttttcaaaggagtcaatcagataggcatttatgtcagtgagcagagggatgactttgaatagaatgggaggcaggtttgccctaagcagttcccagcttgacttttctatttggcctagtgattttgaagctccaagatttattttcctttcatactaccaacatataatatattaatggtagaaaaatcatcacttttggaaactcttaggcattcttctggtgcctcactctcagctgagctgtgcttctggatagcagaaatgacctggacagaaaaatgagcaagtttagtcattcaagaatatgcagctatttccatgggcatgtacttagagctctatgtaaacaggagtggctaacaagagttggcaagggtcatatcctcaaggcttgtttacacaggcagagagagccagctgggaaattatctagagacaccagtgcaggagtaaagtatctgtcttctcagatccctctggctttactcacaccattctcccaggtcccaaagccctgaaaatgaaagtcataaatatcccaaaagagttacctggaatttaagagagtgcagcagcctggagtgatccagagcctcgggcattgcaataaaggggtgactgggatgcaggggttaaaggaaaatggatagaagtgaatttcctccagttgctatggatgagtgctggagataggaatgtgtgtctacacatagagaaactgcctgtatctaacttggaatcgcttcccccaccaaaggtcaccaagatatggggactaaaaatattctagtaaagctgggaccagaacagtaactgctttactagtttagaagcagagaaaggatagttggcaacaaaaatgccaaaagacacagggactctaccatatatactatgtgaacactgcacagcagcttttgccttgctatctcactgtaggagcagaacaggctttgcttcattcctgaggtctaccagagcctctcacttaatggaaagaagaagctaatctggaggaagagaacactgacaaacaccattgcagagggagcccatgacagtacttctgcccctcccaccgtaaggcataatgtgcacccataacctgaaaaatggagacttagctgggcagacagagaaagtgatttccaaagaaagagaattactacagaagtagaaaagaataccaggaacttccagttttagttccaacatgtaaagagcttgagactcattactgcaaccctcacaagagaaaaaaagcttggctggacgcagtggctcactcctgtaatcccagcactataggaggctgaggcgggcggatcacgagttcaggagttagagtccagtctggccaaggaattcgagaccaatctggccaacatggtgaaaccccgtctctactaaaaatacaaaagcttagctgggtgcagtggcgcgcgcctgtagtcccagttacttgggaggttgaggcaggagaatccatagaacccaggaggcggaggttgcagtgagccgagatcccgccgccgcactccagcctgggcgacagagtgagactcagtctcaacaaaaaaaaaaaaaaaaaaaaaaaaagaagaaagaaaaggaaaaaaaagctaaaccaactaaaaatcaatgactttcctaagtctcatcagataaagtcacaggaaaaaaactgccaccccaaaatgtagagacaggtaaacacagaataaacagcctaaatctgcttacctgaagcagaagttgcatgagtcaggacgggcgcagtggctcacacctgtaatcccagcactttgggaggctgaggcgggtggatcacttgaggtcaggagtttgagaccagcctggccaacatgtcgaaaccctgtctacaaaaatacaaaaattagccgggcatggtggtgggcgcctgtaatcccagttactcgggaggctgagacaggaggatcgcttgaacccaggagacagaggttgcagtgagccgagatcacaccactactctagcctgggcaacagagtgaggctcagtctcaaaaaaaaaaaaaaaaaaaaaaaaaaaaaaaaaatttaaaacaggagttgcctgagtcatatactggtaggaacacttaaatagtagttctgacaaattgccggaggctgattatggactagcttgagagagagaaactcctagcacctagacttagggccccgcccccgccccacttgcttggaatttacctccaaaaaccaaagtgagttcccatagtggaaagccaagaaaaagatcctttcttttctggcagagagagagtaaaagaaccattctgaaatatgttcagagcatcccccataacaaaggcctactctccactggaaaagactggaaagcagaatgctttctccaaataagacaaagaactgaagattcctgtacttctctggcaacagaatgaaggaggcgtattcttgtacgatcatgtggttaccactgaaactgttttgaggacatcaaaatattgataatggcaatctgttggcctttatggtacaaaatgcctgagaggcagggacagctattccatatgcagagtagatgtcaacttttgtcaataagtacttgcagaggctctttttaggtaataggagtaccaagtccacttgctacatacacaaagctggtcgtttttcccagggagttcatatgactcaggctaccctcatatcaccgtttgcacacaatacattgattcacacattcttcattttctccaggattactgtgaatttttacccaatgacatgaagcctgctcatgtgagtgatataaaatggcttgtccttatcatgctacactgatgtttcccaaataagtcacggttttagctttgtcactgtttctctcccaaatctgcccttaatgagatttgtgtcctccttatgtcttataattgtacaaagcttaaaatagaatttcctctcatagtccaatcttttctcccccagagtatactacatttgatgctatctataatcaatcaaggttcaagaatcaaaacaatcatgtacttgtgccattgttttatagtagattaatcaatatgcaatgtatacagtttatcatctaggttaattttctctcttcttttaccctgtatatccattgacattcctgactgtggtgttaaaatttgcatatgaaatgattttattttgtttttcaacataagctttcaacttaaagttttcatcattatcttggtcacgtaagctagaccccaagtttaatattacttatatcatttatgagtaatataggagtctattccttcattaggcctaagattacattttgagcattatacattactttgactatttgtttgtttgtttgtttgtttttgagatggagtctcactctgttgcccaggctggagtgcagtggtgtgatctcggctcactgcaacctttgcctcctgggttcaagcgattcccctgcctcagcctcccaagtagctggaattacaggcgcgggccaccatgcccggctaatttttgtatttttagtagagatggggtttcaccatgttggtcaggctggtcaaacagtaaatattttaggatttgcaggtcaagcagtctctgttgcaaccagtcaacactgctgttgtaacttgaaagcagtcacagatgatacataaataagcatggtgatattccaataaagtacatttacaaaaataggtatcaaagtaggatttgactcacacactgaccttttcagatttctaacagacagaaatgaataaaaatgttgcctctgaatttt

SEQ ID NO: 915709 - DNA, 4001 bp, Homo sapiens
gaggccagacttcataatggtccagttaggtccacatcacacatgccttcccactgcctcaatcctcagagctcaccatatttttttttttttttgagacagagtcttgctcttttcccccaggctggagtacaatggcgagatcttggctcactgcaacctccacctcctgggttcaactgattctcctgcctcagcctcccgagtagctgggactacaggcatccgccaccacacccggctaatttttgcatttttttagtagagacacagtttcaccacattggccaggctggtcttgaactcctgatctctggtgatcttcctgccttgtcctccctaagtgctgggattacaagcgtgaaccaccgcgcctggtaagaactcaccttttatgcctctccaggcacactcccatcttaatcttccacactgttctccttttaagcccgtgggaaaaaccattaaagcctttaatttcctcgcattcttaagattctactcaaatgtgttcttacaatgaaaactatttaaaactttcataaaaactatttaaagttgcaaggccttcatgaggtctttacagagtcattaccctaatgtaacttcttgaagatgttactccatagtattagtcatcttcttgtgtactctaacattcatcgatatggtctatgatcactttctatttggatgtaggcttccacgtatatttcatatttattgaatgttaaatggatgctaattgcacgtttttacattagcagcctgctttataatcaattttatcccatatgttgggtcttgtgcctgactagacgcctctgggagacagtcagtatgtaggcagacatggattctacccaggagtaaggcagagacacaggatggcagttacagtgaactctgaagggtgagagcagaggccagaatggcatgtgtcagaatatctgtaacatatcaatcaaggtgcaaattgctcacaagtgagcttaagataggacatactctatatcaaattcttaacaagaagattaaatccgtgggctccttctgagcccacaatgaacaacttctgttaagtaattgtgagcaaagaaaagcaataacaaattgaggttacaaatcaatgccaaggtgtgtctaagaggaagaatgatgaggagcaagttctgagacaggtgaagacgctggtagcacatgggttactgaagtaaaagtaaacaggtatgttcagggatgtgcaaggagagccctgagacctgcagaaagacataggaacagagggaacagagcggtgtgcggcagtcacatcactcaacctgctattgtcagggaggccaaggactaagaatacgtgaggatggccacagaaagccccttagtggttgccaggagggcagcaaaagaacccacttcaacccctggccgtgctcccatggctccattctatctgacgccacatactaggagctaagccctgcacacacttggaaaacagagacctcctttcaccaacttctcttttgaggagggagtaggaggtggaaaataagagatcttctgttcatctctttgagagagagaaagagagagagagaattgtttcctttgcaaggtagaaaatcaaaattatacaataggaagggaatggaaatagattcagcctggaggaaaaaaagacaccccagaaaacaaaggcggccttctgcctctttaacactgctttcaaggctgtccctccccagactctaggctgctatcagtgtgcactcaaagcaggaagcctgcaagctagcctttgctcccgacagagcaggggagacttggggccataaatcaaattcccctaacttcactgagaacttttctcctggagtctcataccctctaccccccacaaacctccccacacaccttcagagcaacagaaatctcggctcctggttgaagaggtgaagaaaagccagggtgggtgtggtcaggattcattcaacaaatgaggttcctctgtgtgaagaagtccctccctcctgaggaggaactgcctgagaaatgaaagtgaaatttttggggctgtcaggaagagaaaaggggaaggagcgtctaggtgaaatgagctgtgtagtcctttagagcctctggacagaaggtaatgctcttaatccagtgattctcgagggcagaatggaggatttgcactagatggcacatttggcaatgtctgaagagatatttggttgttaactaggggaatgctactggcatcttagtgggtacaggtcacagatgccgctaagcattctacaatgtatgggacagttcccacagcaaagaatgatccattccaaaacatcaatagtgctgtgtttgaaaagccctgttttaaccttccctgcctcccaggccagctaaacacccaactccccttctcctaccactttcatggttgcacatggtccctcgaatcagtttaccaatttgaattatccttcagctccaacgatccacttgtgtgctacctaccaaagtaccatgtcacccgctaggagatggaggatgggtggcggagaggtggatggtgctgagaaaagttggctacaaaggacctggggaacttttgggagtgttggaaatgctctaaatctttaaaaggggtaaaactttttcaaaactcatcaaactgtgcacagtaaatgggtgcatattattgcatataacatatatatcagtaacattatttaaaaatgaaaagtcttccaggtaatttttacgcgaatctgaggctgagaaccactagttgtaagtagtaaatcaggagttttgtgccctggacagaaagggctgctttgaaactgaggtaaccttgaaatcaaaccgaacgaggaggaaacttgaacaagagttgccactcgtttggtcacaggatgaccccacattgtgcctccacaaacagcatgctccattttcatgaggaatataagttgatagattcattttctgtgctgtatgcatcaaaacaatcctagtctacctcctgtagagcacattacataataaaaggtgccacctttggaaaccacctgacaaggtacaattttcatttttgccctctccatctgactcatgcatggtgatcaaggacaattataaacttgttggaagtttaacaactttcccacaaaaatgtatccacatccaataccttgggaatatgctttgactacttttaagggagtcaattactatcaggttagtgcaaaagtaattgcggcttttgaaattaaaagtattataaagccaactgtggtggctcacacctgtaatcccagaactttgggaggttgaggcgggcggatcacaaggtcaggagttcgagaccaccctggctaacatggtgaaacccccgtctctactaaaattacaaaaaaaaaaaaaaaaaattagccgggcatggtggcatgcgcctgtaatcccagctactcaggaggctgaggcaggagaattgcttgaacccgggaggcggaggttgcagtgagccgagatcgcaccactgcactccagcctgggtgtcagagcaagactctgtctcaaaaaataaaaaaataaaaataaacaaaataaataaaagtattataatagcaagaaccgcaattacttttgtaccaacctaatactttcagatttcttttccttatttcaatattggtaactaatacatttagatagtgtaaaagggaagaaaatctcgggacccaaaaatcactaagccaaagggaaaagtcaggttgagaactggttagggcaaacctggctcccattctattccaaaaaaagacagctactaagataaaaaaaaaaaaaaaaaaaaagctccagacagaactcaaagtcacccctttgctcaggtgagataaatgaatatctggttacttcctttgccctattgcttaatgcaacctgtttgtcttttatctacctatgacctggaaacccccttc

SEQ ID NO: 915710 - DNA, 4001 bp, Homo sapiens
catgactgcctgccttaccacactcctaatttgaatcttgaggaaaaccatagtcctttatgtagtgtcttccaccagaagtagtagagccccgttggaaaagagcaatggaacacagtatttgctagccttcctcatcatagagtctatctttgtgctcagttccaggtatgtatgtgtaattgtaacatgtccactttctagcctccacccccaacagggacaggacagagaagagaactaatcaaatggcttcaggactcatgcaatgtcaaggaataaaaaggacgaggcctccttggattaaggtcctgtcaagattcctgtctcagaaaaccttcagaatctcctcttgccttccaggaagttttctcttctctgatgtcagcttccagcttctcagcttcctcctcttccttcttcagcctcttgaggactgcctggagtttctcctatgagaagggaatcacactacagtcaagctataagctttcttagtatctggatagaggacaaacagggaaaaaatcaagttgatcccagaaaaaagcaatttacagaaactgtgaagctggtgattagaatctatgacatggggaaaattttgaggagatgaatgtattgttcattcattgtgatgaaaatcaatacccctcaaaaggagtagcctgattctgtctttccttagagtaagtatttaccctgcagaaagtcctttcctcttatcaatgctctttcctcattcaatccacaatgttccttagcaattatcctgcttagagaagcaagagagctaactttgggaaggaatttatcacttatacaatgaaaaaggaaaaaacaagacaaaaatttctcattcttggctaagagactgtactctaggatcatctgttatgtaaatgaaaggaatacacaagagtgtaccccaggcattggaagctgagcacagtgtgaaagatgtacatggagaagatcacgggactcagaattatggttccacagggggtaaagaaggatgaaaagggctgactcctttttcagactcagtccgcctgcacccaggtgattaaaaagctttattgctcacaaaaaaaaaaaaaaaaaaagaaagaaaaggccgggcatggtggctcacacctgtaatcccagcactttgggaggccgaggtgggtggatcacaagattaggagttcaagaccagcctggccaagatggtgaaatcccgtctctactaaaaatccaaaaaaaaaaaaaaaaaattagccaggcgcggtggcaggcgcctgtaatccgagctacttgggaggctgaggcaggaaaattacttgaactcagagggcagaggttgcagtgagccgagagcacgccactgcactccagcctgggcgacagagtgagactctgtctcaaaaaaaaaaaaaaaaaaaaaaggatgaaaaggtgagattttccaccaactaccatcttctgccccatctccctccatctagggccctacctgacattccttgaatacttcctccgtgaggactgtgtggtgaccacggtgctcctgagaccgctcacaaagccagcaaatgactttcctatcctccttacagaagagtaggagtttctctccatgatgatcacagagatctctcttcttcccattgtctgggctcaacttgacctccttgagtctctccactatgttggccagatgctgattagcctgtagatgttcaaatgagtaactgataccacacacaggacagctgctttttcctcccatgctggtcactgcctccttgttgctcacagtgatgcaggctcggcagaggctgtggccacagtctagactcaagggttctgtcaacagctccaggcagatgggacaggtcacctcctcttgtacgttaagcaagatttttgaagccattgcactgcttccctggcttcttctggtcctaactcctgaggctctcctctctcttctggttaaagacccctggatggctgagaagattgaaaggggatggtataagaatggtacaaataaaaagcattctaattgcacagacaataaagactggccgagactgcaatatcaaagaacaaagaagatgaggaagagaaaccaaaaatggctgaaagtggtctgggcgagctgttaatgcctcaaggcttttgcacttgttcattactcagcctagaattaccatcctgttgctatttgcatgactttcgtttatacttttttcaactttctccttacatgtcccttcatcagaagggctgctaagacaaacttaagtacagcacaaccacaaactcatcattcagtgtacatttgccatctttcttttattatcattatctatttttaaatgtccacctcttctttctaaaacataatctacatgtagattaggcacttttgtctttttactgctatagcctcagtgtttagaacacagagaagcacaatgtttgataaacatataaaaaaaacttccctgtctctccacagatgactaaaactttatcattgtttcattatcttccttccattatttggaaattcttcaatagctgaactttagaaccccagatgtggtttccagtgaagaagtgctcgcctcctaacacatctacccacacaaaatcctcccatgccctcacagactttccagagataccgacagaaacagcaatgaccacaatatggagatttcattaccagttacaatttaaaaatcactttggcctgtttgttcctccttccaaaattcttgagaaataagagtactccctttcttcagatgaataaataaaattaaatgatttacaaagatcacccaattcgatggtagaattggagtgaacataataccctcagagttctctttcagaggtctccatgctactccacttatttaaacaaagaaaagccgaggtaaagcctgaaagaagtagattgggatccagggttatgagagtgtagaaatggaggaaaccacataagttgggaatttctgggggggtcttgtgtttgtagatggtaggatttcttcttggcctgaaggatgttacagaggttgataggaacccaaaggtgtgtattcgttgggggaggggtgtaaccagctgaattacacatagatcacagattcataccaatgtcagatcatcgaggaatagaaatagcaaggagatggctgttggccatgagagagatgtcccaatacataaagggagaccacatttaggagcgatgaagttctgtctgtgttaaatccacatccactaattgaatgccaattattcatgtgtttattttggaaattctcactgaagacatattatcttccgtgattaaaattcaggaaatggattaaaatccaaagttgagtaatgaacagatggtattagccagaataaagtaaacagtcacctaagaagatagaagctaattatataatcattcataaaatgtaaaatggtaggtgtaaaaaacaccatcatagagaggtataggtttttagaagaccaaataatgtgctaaatagagaactatccaagatatcttgcttggataagtaagagtttaatgaaagctgaataatgagaaaggaatacagaatgagaaagaaaacaaatattttaggcagaaggaatcatggaagtgaatgccccgttcatggaggacatagcatcataacatgttcgaaagtttttaaatgtgtggctgatatgcaaaaagccctaggccttggcctcacatgagcctagaggaacctggatatgtgacacttcctaaatgaagtaaaagtgacagtctctttccaatgaataggaggtgggggcagggatgggaggatgcaggacaagttaacagagagaagcagatgagggtgggaagtagggtaaggtaaaggaaataagattggaagtcagactagacatgtgggggaaaaaaaggttatcattaggcttaagtcctttcttcctataaa

SEQ ID NO: 915711 - DNA, 4001 bp, Homo sapiens
tatttgttagactgtaagtttttacacactttctgaatgtgcattttacaattataaataggcactaaaaaagggaaaacctaatacagaggatcttcactctcaaggtatttgttatcccaatgccagctattccctattcagggaagcaaaagtcatcataatatgacaatgttcactaatacagattacttaatgaactgatcactccactcaaaatttccccctccctccccgattaacaccagcagtttctctcaatgatagtaaacatccacaatatgaataaaaggtgcatcgtctgcaaattcattcattcaacaaatatttccgaagtgtccactgttctgggggaccagtaaggtccacgacagacaaagatccagacagaggacatgggaacttccactcccaccccaatttggcctccatcttcttaccctccttttctactaagtttcaaacacgaagaatctaaaatgaactcggggcacatatgaagttactattaaaactattttgttagtcttttcaatgcagacgtatcacttgcttggattcatgtggcaaaatcctatttcccatgttttcaagtaggcaaaaagattgccttatcaagagccctagcacaaagcaccagtttcaacaatagtgatgctgtggaaattggcctaagtggggtcaaaactcccaagaaatgctttacctgggatccacagaccagaaacttgcaattttctagaaattgtatactagattttgtgtgtattttctcaggtcagagtccagaactttcatcagattctcaaaagagttcaaccaaaaacggtgaataagaactgctcccaaaaagttggaaagactagcttcttagggacacagtgaaagcgaatgtggtcacagccaggccacctgagttgaaacccaggtgtcctgacccctaggtttatgctctgaaggcccaatacttactcttaattcttcaaaggcttcgtctagggtggagagttggtggccctggtgagccccaatgactggacacaggacacagatgagctgcctatcttcctggcaataggtactcaaatcaagcccatggtccggacacttcctcttggccactctctctgcttccatttctatttctgggtcaaattcactttctgcctcagtttctccctccgcctcggattccccttcttcttggttgtcttcttcggcctcgctttcttgctcatcctccatttcttcctcgctgtcttcttcactctcctcatcgctctcatcctcactctcttcctctgtctcgctctcttcctctgactcgctctcttcctccgactcactctcttcccctgcctcgctttctatctccctctcctgctccaccttgacctccgcttcttccttccccgccccctctccgtcagctggcggggtccaggcctgggagccgtggacgtattcggccagatggtgactgaggaacttctgcctgtgcgcctcggcatggcggcggcagtagcagaagccgcattctcggcacacttcctcggcccccggagcctcgtcgggctcgcactcgtcacacgtgccgtcgtgaggcagttcctcgaaggccgcgcccactccagaggccatgtgggtgctgtgacgcggccaaggcctcggggccccggggctcgccgccttccttccgcgcggcctcacttcctcctcccgccccgggtcccttcctagggagtcgcctcccgcctggaccgcgccgcgtctcgaagcgggacctggggccgcggcagcccctgcccgggcgcagcagcaaagaccctttccgccggctcggcctgctccgctctgtccctgcgcttcctctgccgcgcaaggcacttccggcgcggccacccggcgcccccgtcggcccccgcgtcgcgccgcccgctcagcctcccgctaccagggagagatcgcggcagccgccggcccccgcgccgccccggttccactttccctttccccgtcaggaggcctccttttacttcctgagtcatttaaagtggcaatgacccttttctgcttttcccgcggggctcagctcctccgctccaaatctcagcgtgccttggaggaggaggagggagaaggaggatggaggaagtctcttactctctccagaagcaggaattgggctccacctcccccattccctccctggaagtgtcaacttgagttttcacggccactaggctggtgtccctgtgcatttcagtctctcttgtgccaatttgtcgccgcccgtcacagtccccagtgttctgcaaggtgcccggacagtgttgtttaccagactgaacctgacctcttgggatttcctgagtgcggaagggctatgtttgttctaggctaggggaattggagttaggatgagcaaacaaatattttcgatccaaagcaatactgtgctttgtctatttgcattgctacctcctaggatctcagaatttctggggtggtaacctctgtgcggttttctgagagctgccttcggttgggcagagacgtcaggtgaagtgaggtggggagaggcagtatttgtcgagtgacaggtccaggttgcagtcattttcctttatgtaaggtgtccctctagattcccactgggctctaagagaaaagaagggaactgttgtttataaagcagtactgtagtgccaagaacccggctacatctttttgtggctctttaaaagccggttttggaagatcctctgcccgatggtccccaaatcctggtgccactacctatcagttttatgaccatggacaagttaattcatcattctgttttccgctttttaaaaaagatgttaagtgaaaagaacggtaaatatctacctcatggggtagttttgtggattaaatgtaacgatgcctgcactgtagagtattcactaagctttcattattatttttggcacaaattatatttagtgctcacaatgcccctttgaaggaacatattttacacacacagggcattttcggctggctgctggtaatgtaggcaagtctccacctctaccccatatccatgtctctccattcacagaagagtttttgttttgcactgtatttgggagagggaaaattacgtttttatctagtcaagggagaggctgaggtgtattaagaaggatgaaaggggatggaatggtgtctgttttacattgattcccttagatgattttgagttagaatttccagatgctttcctcaaacataccaggggatgaggtggggtaaaaaaacctttttaatagtttttaatgtctccatggataatgtatgcctaatctttgtgcagcttttgttagatatttattttttagaaacctttctttttaacctcagaacaattctatacaatgttgaaaaaaatcaggtttattttgttccaattccatacacatttctgttttcccccagctcatttctctggaaattatttctgtgtctgcttttgaaacatgaattgaagcaccattctgaaaaaaaaaattcaacaaatgtcaactcaaacatcaacgttaatatacctaatgagaagtgtgccttgcttggttatttctactcctgtcctcccccaggcttaaaaggaaacaacttagcctttacaaacataacgttctcacatttagaaagtcttttattcaatgaaaataatttttattttttttatttatttttttttttggtgacagggtctctctctgttgcccaggcaggagtgcagtggttcaatcacagttcactgcagcctcagcctcttgggctcaagcagtcctcccaagtgcctcccaagtagctaggaccacaggcgtgagccactaagccccactacttgttttggtattttttgtagagacggggtctcactatgttgcccagactggtcttgaactcctggactcaagtgatcctcccacctcaggctcccaaagtgc

SEQ ID NO: 915712 - DNA, 4001 bp, Homo sapiens
atacccaaactctgaactaacatatagtaggatttttgttaaacttaaagaggtgtaattatatttccatggtgtgatggtgaattttaggtatcagtctgactggattaaccaacacccagggaaatggtgcagcattgtttctgggtgggtctgtgaaggtgtttccggaggagagagacatgtgagttggtgagctgagtgggaccatcatccctcagtttgagtgggtaccattcaatcagcttgtagctcagataaaaggaaaaggccagaggaaaggcaatttcctctttctttctcctgaagctggttctgaggctttcagccttgagatcagtcaagataccagtatcctcactacatcagcttaaagacagcctatatttggaactgctcagactccataatcaagcaaacgaattttcctgatgaattcccctcgtgtagaatcatgtgtagcttgaggacagatatatgttctaagaaatgtgtaaggaggctttatttatttactttctgaggtggggactcactgtgtcacccaggctggagtgcagtggtgcaatctcggctcactgcaacctccacctcctgggtcaaagcgagtctcctgccttagcctcctgagttcctgggattataggaacatgccactacacccggcaaattttttcattttttttttttccagtagagatgaggtttcgccatgttggccaggctggacttgaactcccggcctcaagtgatctgcctgccacggcctccaaaagtgctgggattacaggcatgagtcactgcgcctaggttttattgttttattgttttgacatgatagaatctacctttacaaacctagatggtatagcctgctacaaacctatggtatacagtacagcctattgctcctagactacaaaactgtacagcgtgttctatactgtatactctaggcaattgtaacacagtggtaattatttagtatgtaaacatttaaatacagaaaaggtgcagtaaacatactggtattataatcttatgtgaccaccatgtgtggtttgttgttgactgaaatggctcatgaatgtatctctacatgtatacatatacaccctatgattctgtctgtctggagagccctgactaatatataaactatggtctttggcaattttaagtccttttcgttactctcctttatttgataacgctgctgaattttagtgaaagcaatgaaaaatcttagaattgtaaatattctccagaggtcatctaagtcattgtaaggaatttttcatagtttaataagattaaaactcaagtgagatggcaaccaccatcacatatcaaattatatcatatatttatttggtcaaaaaattgtgttttgatttccaaactgggatgttttggggagctttctcatttttttcagtttcactatttttcatctctcatcattaccttactaatttaaagttatgtgtaaatgctgaatgaatgaatgaacattcattaatgtcttctcaattcaattgtataatattaatacactcattacacatatatttacacacacctatgtgtacatacatgtataaatatcaactccatatattcattatgcatacatatctgttgcagcaaacactagatattttcattttttcaaaactatattgaagaatgatagaaaatgcaaaataacaacaattaatatcctcataattcataaaatctatagtaagaatatgaattacagatggtatcattgtgtagatttaagataatgagatatttttaacactctaatttattattttgtaaaggaaagaagatataattttatcaatataagtttcactcaccgctgggttctttgaagggttcccacaatgattcttcgagacataattctgttaagtactcctcaaggtcaggagctcattcgctgcagtactgagtttcagaggtcaccaaaacacagctccctctaagtgcactccttctcctttggagaaaactgagcttgtctcttctatgtcctttataagaatctgtgaagaccacacccacctctttaagtgggtggagtattgagaaaggttgagaataagatgattaggtttatgcagtatttagatcacacctttgcacggctgattaaattatcatcactccttaaaaaaccatgactgaaatgaatcatatgtaacataaatcctatcagatttgacatacactgcaaattaaataagatgcattttatactgtttattgagcttcatccaagatacaggcattcctttaagggcacatttatttattctagagaaactgtctccttgtggagtgcagtggtataatcatagctcactgcagccttgaattccaaggctcaagggatcctccttcttcagcctcccaagtagctaggactacaggctcaaatcatcccacctggctaatttttttaaaaacttttcatagagtcagggtatggctctgtagcccaggctgttctccaactcctgtcttcaagtgatcctctggtcttggacttccaaagtgcttgggagtacaggcataaaccacctcgtccagccttaaatgctgctttagtacatttataggatattggaagagaagtccaacaggaaggtaaaacttttttttttgttttctaccactctaagagaaatcactgactaaccaaataactctactaatttgaggtctcttattgaatttacaaaactttgccaatctcgtgggtgaaatacgagttattattttaatgcttttctccacatggtgcatgatgttctgccatgactagaaatgcaatatagtaattaatttggggattataaacaagttttaggacgtaggctaattcacaaatacagaatccaaacgatagggatggattatatttttctttctataacaaatatttttgttgtcatgtgacaatttaaaaaagaaaagagatttcagaagcggctactcaaatatattctgacagaggaattctttgccaatagcccccacaagacttatattcaagagtttcagaacagtgaagacaaatctgtcagccctatgtctgtcgaggttcaaaaagtctgtcaaggttcaaaaatcgaagcagaacccataatatatatgtatacttagggagattcacatatgaattaagtgcaaggaactggtttccacagttgatgggatgcctgagcaagtatgagatccctgttaaagtcagttaggaagaaaaatcctcagctggctggatcccagtgatcatgattcaaagctttggtcccaagtcagtagggggcaattggaagattacagtcccattcgctattttaaatgttgttcaaggaatgcctatgtctttctttaagggactttcactgatgaagtcaggcttacctgaatacacttgctagttacaagagcaggacctttcattacctctgcaaaataccttcccagtaggtcctacgtgagtgtttcattgaataataataagaaagtttgtctatgccacacagtccagtttcattctcctacatgtggcttgccaatgatcccagcaccatttgttgaatagggtgtcctctccctactttatgtttttgtttgctttgtcaaagatcagttggttgtaagtatttgggttcatttctgggttctctattctgttccactggtctatgtgcctatttttataccagtaccatgctgttttggtgatgaataaaggcctggagtacggggatgtaatgctcaggggccagacagttggctgcagcagcacagcctcatccagcaattagagaggggataggaacagagaaaggtggggaagactagaggcaggtttatgaaaggaaccagagcccttggttgggtcgaaataggggtggagggagattccagcttgtcttctgcagcatgaataccttgaccccctgccacagacatct

SEQ ID NO: 915713 - DNA, 4001 bp, Homo sapiens
attaggtcttataaatttacttgttcgaaaaattgtgttttgatttctaaagtaggatattttggggagctttctcattgttttagtttcactattttgcatcgctcatcattaccttactaatttaaagtcatgtctaaaacctgaatgttatgaaagcaaataacttcatcattcattaatgtcttctcaattcaatttgacaatattaatacactcattacatacatatacacacacacctatgtgtacatatatgtatcaactccatatattcattatgaatacatatctgttgcagcaaacactagatattttaagtttttcagaactatattaaacaatcatagaaagcacaaaataacaacaattagtatccttataattcataaaatctatagtaagaacatgagttacaaatggtatcattgtgtagatttcagataatgagatatttttaacactctaatttattattgtgtaaaggaaagatgatataattttatcaatatgtttcactcaccctggagttcttttaatggttcccacaacgatttttccaaaaataattttgttaagttcacctcaagatcagaagctcattcactgcagtactgaatttcagaggtcgccaaaatgcagttctaagtgcagtccttctccttcagagaaaactgagcttgtctcttccgtgtccttttataagaacctgtgaagaccacacccacctctttatgggtatttagagcattcagaaaggtggagacaaagatgattaggtttatgcagtatttagaacacacctttgcagctctgattaaattatcatcacactttcattctgaacaccagtgcctgaatgaatcatatgtaacataaatcctgtcagagcatacataggctagaaattaactaagatgcattttatactgtttattgagtttcttccatgatacaggcattcctctaagtgcacatttatttattctagagaaagggtctccttctggagtgcagtagcataatcatagctccctgcagccttgaattccaagtaatcctcctgcttcagccttccaagtagctacgactttaggctcacactatatcacctggctaattttttttgttgaaatttttggtaaagtcagtgtatgactctgtagcccatgctgttctccaactcctggcttcaagtggtcctctggtctcggccttccaaagtgctaagagtacaggtataaaccacctcatccagcttaaatgctgctttagtacatttataggatatttccagagaagtccaatggaagataaaactttcctttttgttttctgttttctaccactctaagagaaatcactgattaaccaaataaacccactaacctggggtctctcattgaatttacaaaacttcaccagtctcatgggtgaaagatgagttatgattttaacgtttttctccatatagtgcatgatgtcctacaatgactaggagtgcaccacgggaattattttggggattacacataacttttagcatataggcaaattcacaaatacagaatccaaatgatagagatggactatatttttctttctatgccaagtctttttgttgttatatgaaaattattttttttaaaaaagagatttcagaagggactactcaaatatcttctgatagaggaattctttgccaatggtccagaagacttatggtcaagactgtcaaaacagtgaagacaaatctatcagacccaggtctgtccaggttcaaagacaaaagcagaacccataagatatatgtatagttagggagattcacatatgaattaagtgcaaagacttgacttacccaattgtgggagctgcttaagcaaatgtgagatcctgggtacagtccatcaggaaaagaaatcccccgctggctggatcccagtggtcatgaatcaaagctttggtttaaagtcaatagggggcaactggaagattagagtcccatttgccatttaaaatgttgttcaaggaatgcctatgtgtttctttaaaggactttcactgatgaagtcaggcttacttgggtacacttcctagttacaggattaggacctttgctcgcatctgcaaaatgcctttccagcaggtcctaagtaagtgtttcattgaagaataataaggtatgtctatgccacaaaatggctactgccctcatttccctctttgtacatacatgtactcaagttgacacatcataaaatcatccagagtttatatttaattaaatacaaggaattgaacaatagattttcttgttctattgtcagtttactatccaagaccaccaactgactgaccaccctgtatgcacattctgtacctcaataaatctaagtaattaaccaaagtgtccacacagaagtaagatctgcgctggttgtgtgtgggggccctcttggctcagtcctggactccagagtgggaaacttgtgaaaccctgggtcatggacttgatcctgtggacattctctgcttaaattctggagctccgtggcggggccctggtactccattacaaggtctgatgatgctgtgtatcaggaaggaattagggcaaggagagaaaggaaggtaggtagcttctgattttatttcaaccactttttgcaccacatcattcacttattcaaacactcagctttaggcagttgaagcctagagcactggaaattaggagctttcaattacagacctacctctgtctactgtggcattatcaaggaaacaacctattttcctacttgagtctcagaccatgaaacaaatataagaaagtaattctctttagagttggcattttgtaggttccaaaagtcctacccaatccagaagagagagtagaggtgggtataggcaagaacaatccgtgatgtggataaaggacactccagccaatttggaatatttccttatttcccagtgcttctccttttaataaaaaagatacttttttgtacatgagactgtttccattctagcatctgaaacctacctctaccacaaagttttctgttgaattacacatctatttttgagaatctggtaatagactcttttgttcatctgggttctaaaactcattggaaaatctttgtatgaaagttggtgatctatttctcgttccttaacatatgtagaaatctgactttatttaattctggaaatttttaaatttttataaaaatgccattctatgataaataccatttaaaacctaggtattataactactttgacattttgtttgttttatttgcgcacatggagagaattctgcatattttttcccatgctaacaaaatttattaattttccacaaatttatattttgctttgtggatcctgaatgtccagggctatcttttctttaacgctttttttttttttggcatttcttctcaattgttttacccgtttattgtctatttttctacaaaccccagtcattttctcttgaaacctcttatctatttgagtggagagaaatatgttagaaaaaggaaggggacaatgtgatacatgggctatgatgtaccagttactgtgctgtctccatgcacacattgttcctaatctccacagaaaacatgcaatatgtgtagcattgtcccaactttacatatgagcacataaaaggtaagcttttcgttgttgttgttgagtccgagtctcactctgtcgcccaggctggagtgcagtggcggcgtgatcttggctcactgcaagttccacctgccgggttcactccattctcctgcctcagcctcccgagtagctgggactacaggcgcccgccaccatgcccggctaatttttttgtacttttagtagagacgggattacactgtgttagccaggatggtctcaatctcctgacctcgtgatccgcccgcctcagcctcccaaagtgctgggattacagacgtgagccaccgcgc

SEQ ID NO: 915714 - DNA, 4001 bp, Homo sapiens
cttctttgtggttcctctggcctccaaatatacacaaactcaaaattactgcatatgctattctctccaactagaattacatatatatgtatacaaacacacacacatacatacatacatacatatatatatatacacacaaccacacacacatacatacatatacacactcatggtccacatatatatccacacacacatttgtgttccccctcctcttcaaaactttgtttcaatttgaatttttcagtgagtcttttttctgaccaccctatttaaaactcaaacactaatctccagtttctggcctccattgtccttttctacttccctgcttgattattctccaacaaaaaacctaccacactcaaatacatcatgtattgcatatatttgtgtattgaccatttgactctcttatttggattgtatgatttgtgaggacaaaggtgcttcctttcttctttactagtatattttctaatttaatattcaacgtagactaggttctcatgaaatgcttttcaacaaactaatattagctatcattccctcaaaatatacatccacaaagagaaaattatttttaatgtttttctgaagtcctcagagttctccttatatttagatactagttcccatatttctggcatgtttacatgtctccctcaagacacaaatccgtatttctcaccacttttctcatcgtatgttatgtatttttcaatattaattagttgagattcttaatttcatggtttccctagatttgccctgtcactttttctgcctcaaattttccatacaattccaaatactacttgcacactagcattcagattaatgctgactgacactcagaagtttcagctgagcattccatgactgccaaataacccttttgcctaacatttatccaaccagcaaatatagaatgctgtgcgatggcccagtttcttggatctgttggtgtataactataggtttgtatgaaacaaaccagcatgctttgggtgacatcagtagttttcttagaaatcctacctaacaggcatactattctatataaaaatgaggccactttttctcaatgttttctctcgctttttttttcttttttttttactgaatcccagaaacattacagtttgatatccagttcctattttaagagtcacccatttgcccaccataagttcctggagaaggtagagtagtacaggactaaccttccagcatctggttctggtggtttccacattcaggtttctgtgattttcacaagctttttcccacaaagactgcattttctgtaaaagcttctcctgcaaaagagccataaattgaagcaccagtgcagaccatgacatagggaggggccccagaatgagagacaaataaacccctagtaaatggcatttcctttgtttcccttcatgtttgtcaaagcccagaggttggaagctaagaaagcccaaacagagctgcttaaagggactcagagtttgttttatccaatctccaagaaaatagacccacaggaattttatgtatcctttacagaaatcgatcttcagagccatcacttacctggtgttcctcagcagccgactcaatgggacagtgtctgtgatcccggtgctcctgagagctggagcacagcaaacagagcaggctcctgtccacttcacagaacatcttctttgtctccctgtgagtgccacacatttgctcctcagagctcaggaatagccagagactgacttttctagcaagagaagccatcttcttgaaatgaatgttggttttgaggtttatctgccctgttgactttgtgcattcagagcactggacaagaaatgggctgtctttccagttgaggtagaaacaaggcctgcaaaagctgtgcccacagtctatggtgaccgggtctatgaagtagttcatgcagatggggcagatgagttccctctgaaagacctgtaagattccagaattcatgtttctgaggaacaaagagaaacatgtcattttggggcctgggttgatgaaaagcttctaaacatgtggagatatgtgatagttatattttcttctcttgacagtgttcattaaagtacaacaaactatttcttctgttacaaacttaaaaatttacacatagagggagtctcctggctttataacagatattactaactagagcactcacagtcccttctactcctagttcctgtctgtagcataatacgaacctattcaactacccattttctgaacgtagatctggaaattgggttttgattctaagtggtcagaataaatcatagttgtccctattcttctttcaataactgatgaatgactatgaaagagtgggaaaaaactacctgggccaaagaaatatgagaagatggccaaagaaatatgagaagatggttctatgacatatttttatagagggtcacaaaagccgggcagcaaaccaccatggcacaagtttacctacataacaagcctgcaagtcctgcagttatcccaggacttaaaattaaattaaattaaaaacaaagacccaaatcaaaacaaaattaaaaaaaaaagcccaccaaccaaataaacaagaaaaagactgcaattaaaccaatcaaggttcactagtagggaaaagaaaaattattaaagatattgggtctttttattttcttgcggattaaattaacttcccctagggctgtgcaaactctgaactaacatataggaggtttttgttaaactcagagaggtgtaattatatttccatggtgtgatggtgaattttaggtatcagtctgactggattaaccaatacctagggaactagtgaagcattgtttgtgggtgagtctgtgaaggtgtttctagagaagagagatatgtgagttggtgagctgagtgggagcctcatctctcaatgtgtgtgggcaccatccagtcagctgacacctcagatataaagaaaaaggcagaaaaaaggcaacttcctccgtctctctcctgaaacttgttctgaagctttcagacttgagcttagccaggataccggtattctcaggacaccagcttagagacagcctatgttggaactctctagactccataatcaagcaaattaattttcctgatgaattctgtcccatgtagaatcatgtatagcttgtggacagatgtatgttctgagaaatgtgtcaggtgtttttagttttttttgtttttcttttttttgagacagagtatccttctgtcacacaggctgaaatgcagtggcgtgatctcggctcactgtaacctgcgcctccaggttcagagtgattctcctgcatcaggttcccaagtacctgggattacaggaacgtgacactaggcctggctaatttttgtattttttttagtagagatggggttttgccatcttggccaggctgcacttgaacttctggcctcaggttatctgcccgctttggctttccaaagtgctgggattataggcacgtgccacagtgcccagccaggtggttttattgttttaatatgatagaatataccacacaaatctagatggtatagcctactacacacctatggtatacactatagcctattgttcctacaataggctacaaacctgtacagtatgttctgtactgcatactgtaggcaactgtaacacaatgataactatttgtgtatctaaacataattgaatacagaaaaggtacagtaaacatattggtattataatcttatgggaccaccatatgtggtttgtggctgactcaaatggccgataaatgtatcagcacacatatacgtatacatcctatggttctgtctggagaactctgactaatataaaaactataatctttgttttggcaattttaagtcctttagcataaagcagcataaagctgctagtttaatatcacttctgaatttaagtgaaagcagtgaaaaatctt

SEQ ID NO: 915715 - DNA, 4001 bp, Homo sapiens
aattaggtcttataaatttacttgttcgaaaaattgtgttttgatttctaaagtaggatattttggggagctttctcattgttttagtttcactattttgcatcgctcatcattaccttactaatttaaagtcatgtctaaaacctgaatgttatgaaagcaaataacttcatcattcattaatgtcttctcaattcaatttgacaatattaatacactcattacatacatatacacacacacctatgtgtacatatatgtatcaactccatatattcattatgaatacatatctgttgcagcaaacactagatattttaagtttttcagaactatattaaacaatcatagaaagcacaaaataacaacaattagtatccttataattcataaaatctatagtaagaacatgagttacaaatggtatcattgtgtagatttaagataatgagatatttttaacactctaatttattattgtgtaaaggaaagatgatataattttatcaatatgtttcactcaccctggagttcttttaatggttcccacaacgatttttccaaaaataattttgttaagttcacctcaaggtcagaagctcattcactgcagtactgaatttcagaggtcgccaaaatgcagttctaagtgcagtccttctccttcagagaaaactgagcttgtctcttccgtgtccttttataagaacctgtgaagaccacacccacctctttatgggtatttagagcattcagaaaggtggagacaaagatgattaggtttatgcagtatttagaacacacctttgcagctctgattaaattatcatcacactttcattctgaacaccagtgcctgaatgaatcacatgtaacataaatcctgtcagagcatacataggctagaaattaactaagatgcattttatactgtttattgagtttcttccatgatacaggcattcctctaagtgcacatttatttattctagagaaagggtctccttctggagtgcagtagcataatcatagctccctgcagccttgaattccaagtaatcctcctgcttcagccttccaagtagctaagactttaggctcacactatatcacctggctaattttttttgttgaaatttttggtaacgtcagtgtatgactctgtagcccatgctgttctccagctcctggcttcaagtggtcctctggtctcggccttccaaagtgctaagagtacaggtataaaccacctcatccagcttaaatgctgctttagtacatttataggatatttccagagaagtccaatggaagataaaactttcctttttgttttctgttttctaccactctaagagaaatcactgattaaccaaataaacccactaacctggggtctctcattgaatttacaaaacttcaccagtctcatgggtgaaagatgagttattattttaacgtttttctccatatagtgcatgatgtcctacaatgactaggagtgcaccacgggaattattttggggattacacataacttttagcatataggcaaattcacaaatacagaatccaaatgatagagatggactatatttttctttctataccaagtctttttgttgttatatgaaaattattttttttaaaaaagagatttcagaagggactactcaaatatcttctgatagaggaattctttgccaatggtccagaagacttatggtcaagactgtcaaaacagtgaagacaaatctatcagacccaggtctgtccaggttcaaagacaaaagcagaacccataagatatatgtatagttagggagattcacatatgaattaagtgcaaagacttgacttacccaattgtgggggctgcttaagcaaatgtgagatcctgggtacagtccaccaggaaaagaaatcccccgctggctggatcccagtggtcatgaatcaaagctttggtttaaagtcaatagggggcaactggaagattagagtcccatttgccatttaaaatgttgttcaaggaatgcctatgtgtttctttaaaggactttcactgatgaagtcaggcttacttgggtacacttcctagttacaggattaggacctttgctcgcatctgcaaaatgcctttccagcaggtcttaagtaagtgtttcattgaagaataataaggtatgtctatgccacaaaatggctactgccctcatttccctctttgtacatacatgtactcaagttgacacatcataaaatcatccagagtttatatttaattaaatagaaggaattgaacaatagattttcttgttctattgtcagtttactatccaagaccaccaactgactgaccaccctgtatgcacattctgtacctcaataaatctaagtaattaaccaaagtgtccacacagaagtaagatctgtgctggttgtgtgtgggggccctcttggctcagtcctggactccagagtgggaaacttgtgaaaccctgggtcatggacttgatcctgtggacattctctgcttaaattctggagctccgtggcggggccctggtactccattacaaggtctgatgatgctgtgtatcaggaaggaattaaggcaaggagagaaaggaaggtaggtagcttctgattttatttcaaccactttttgcaccacatcattcacttattcaaacactcagctttaggcagttgaagcctagagcactggaaattaggagctttcaattacagacctacctctgtctactgtggcattatcaaggaaacaacctattttcctacttgagtctcagaccatgaaacaaatataagaaagtaattctctttagagttggcattttgtaggttccaaaagtcctacccaatccagaagagagagtagaggtgggtataggcaagaacaatccgtgatgtggataaaggacactccagccaatttggaatatttccttatttcccagtgcttctccttttaataaaaaagatacttttttgtacatgagactgtttccattctagcatctgaaacctacctctaccacaaagttttctgttgaattacacatctatttttgagaatctggtaatagactcttttgttcatctgggttctaaaactcattggaaaatctttgtatgaaagttggtgatctatttctcgttccttaacatatgtagaaatctgactttatttaattctggaaatttttaaatttttataaaaatgccattctatgataaataccatttaaaacctaggtattataactactttgacattttgtttgttttatttgcgcacatggagagaattctgcatattttttcccatgctaacaaaatttattaattttccacaaatttatattttgctttctggatcctgaatgtccagggctatcttttctttaacgctttttttttttttgcatttcttctcaattgttttacccgtttattgtctatttttctacaaaccccagtcattttctcttgaaacctcttatctatttgagtggagagaaatatgttagaaaaaggaaggggacaatgtgatacatgggctatgatgtaccagttactgtgctgtctccatgcacacattgttcctaatctccacagaaaacatgcaatatgtgtagcattgtcccaactttacatatgagcacataaaaggtaagcttttcgttgttgttgttgttgagtccgagtctcactctgtcgcccaggctggagtgcagtggcggcgtgatcttggctcactgcaagttccacctgccgggttcactccattctcctgcctcagcctcccgagtagctgggactacaggcgcccgccaccatgcccggctaatttttttgtacttttagtagagacgggattacactgtgttagccaggatggtctcaatctcctgacctcgtgatccgcgcggctcagcctcccaaagtgctgggattacagacgtgagccaccg

SEQ ID NO: 915716 - DNA, 4001 bp, Homo sapiens
caggcctccaaatatacacaaactcaaaattactgcatatactgttctctccaactggaattttacacacacacacacacacacacacacacacacacacacacacaaacacacaaacacacatatacatatacatgtatacacactcatggtccacatatatatccatacacactttcgtgctccccttccgctttgaaactttgttcaatttgaatttttcagtgaatctttttttctgaccaccctatttaaaactcagacactaatctccagtttctggcctctattgtccttttctacttccctgcttgattattctccaacaaagaacctaccacactcgaacacatcatgtattgcacatatttgcatgttgaccatttttgcctctcatttggattgtacgatttgtgaggacaaagatgctttctttcttctatactggcaaattttctaatttaatattcaacatagactaggttcttatgaaatacttttcaacacactactattagctatcataccctcagagtatacatccacaaagagaaaatcatttttaatatttttctgaagtcctcagagttctccttatatttagatactagttcccatatttcgggcatgtttgcatgtctccctcaagacacaaatccatatttctcaccacttttctcatcatatgttatgtagtattcaatattaattagttgagattcttaatttcatggttgccctagatttcccctgtcactctttctgcctcaaattttccatgcaattccaaatactacttgtccaccagcattcagattaatgctgacccaggctcagaaggttcacttgagctttccatgactgccaaataactctcatgcccagcatttatccaaccagcacatatagaatgctgtgagatggcccagtatcttgtatctgttggtgtatagctacaggtttgtatgaaaacaaaccagcatgctttgggtaacatcaacggttttgttagaaatcccatctaacagtcacactattctacataagaaatgaggccactttttctcaatgttttcttttcttttcttttttttttttttttttttgactcccagaaacattacggtttgatatcaagttcctattttaagagtcacccatttgcccaccataagttcctggagaaggtagactagtacaggactaaccttccagtggctgattctggtggtttccacgttcaggtttctctgattttcacaaactttttcccataaagactgcattttctttaaaagcttctcctgcaaaagagccataaattgaagcaccagtgaggacaataaagtaacatgcagaccgtttcatagggagggggcccagaatgagagacaaataagtccccagtaaatggcatttcttctgtttcccttctgcttcgtcaaatctcggaggtttgaagctaagaaagcccaaaagagagttgcttaaagggactcagagttggctttacccaatctccgagaaaataggcccacaggaatttcatgtgtcctttacagaaatagatcttcagaggcatcacttacccggtgttcctcagcagcccactcagcgggacagtgtctgtgataccggtgctccagagagctggagcacagcaaacagagcaggctcctgtccacttcacagaatatcttctttgtctccctgtgagtgccacacatttgctcctcagagctcaggaatagccagagactggcttttctggcacgggaagccatcttcttcaatcgaatgttagttttgaggtttctctgctgtgttgtctttaggcattcaaagcactgagtaagaattgggatgtcttgccagttgaggtagaaacagggcctgcaaaagctgtgcccacagtctatggtgaccgggtctatgaagtagttcaggcagatggggcaggtgagttccctctggaagacttgcgagattccagaattcatgtttctgaggaagaaagagcaacatgtcattttggggtctgggttgatgaaaagcttctgaacatgtggagataagtgatagctatagtttcttctcttgacagtgttcattaaagcacagcaaactatttcttctgtaacaaaaataaaaatctcacacagagagtctcccggctttatagtagatattactgactagatgactcacaaccccttctactcctagtgcctgtctgtaacacaataccaatctattcaatttcccatttttctgaatgtggatctggaaattgggtttgattctaagtggcctagaataaattgtagttgttcctattcttctttcatgtaactgccgaatgagtatgaaagggtgggaaaaactgccttggccaaagaaatacgagaagatggctagagggtcctatgatatattttgagagacacaacagtggggcagcaaaccaccatggcacatgtttacctgtgtaacaagcctgcacgtcctgcacatttatctcaggacttaaaataatataaaattaaagtaaaataaaaaaccaaaaccaaaacgaaatagaaaaaccaatcaaccaaccaaataaacaaataaaaaacagcaattaaaccaatttaggttgaatagaagagaaaaaatcattaaagatattgggcctttttattttctcgtgggttaaattaacttctcctagggatacccaggctctgaactaacatatagtaggatttttgttaaacttaaagaggtgtaattatatttctatggtgtgatggtgaattttaggtatcagtctgactggattaaccaacacctagggaactggtgcagcattgtttctgggtgagtctgtgaaggtgtttccagaggagagagacatgtgagttggtgagctgagtgggaccatcatccctcaatgtgagtgggcaccattcaatcagctggtagctcagataaaaggaaaaggccagaagaaaggcaatttcctctttctttctcctgaagctagttctgaggctttcagccttgagctcagtcaagacaccggtatcctcaggacatcagcttaaagacagcctatattagaactgctcagactccataatcaagcaaacgaattttcctgatgaattccctctcgtgtagaatcatgtgtagcttgaggacagatatatgttctgagaaatgtgtaaggaggttttatttatttactttttgagatggagacccactgtgtcacccaggctggagtgcagtggtgcaatctcggctcactgcaacctccgcctcctgggtcaaagcgagtctcctgccttagcctcctgagtacctaggattacaggaacatgccactacacccggcaaattttctcatttttttttttccagtagagatgaggtttcgccatgttggccaggctggacttgaactcctggcctcaagtgatctgcccaccacggcctccaaaagtgctgggattacaggcatgagccactgtgcctagccgggcggttgtattgttttgacatgatagaatatacttatacaaacctagatggtacagcctgctacacacctatggtatacagtacagcctgttgctcctagactacaaaactgtacagcatgttctgtactgtatactctaggcaattgtaacacagtggtaattatttagtatgtaaacatatttaaatacagaaaaggtacagtaaacacactggtattataatcttatgtgaccaccatgtgtggtttatggttgactgaattggctcatgaatgtatctctacatgtatacatatacatcctatcattctgtctgtctggagagccctgactaatatataaactatggtctttggcaattttaagtccttttctttactctcctttatttgataacactgctgaattttagtgaaagaaatgaaaaatcttagaattgtaaatattctccagaggtcatctaagtcattt

SEQ ID NO: 915717 - DNA, 4001 bp, Homo sapiens
ccaggcctccaaatatacacaaactcaaaattactgcatatactgttctctccaactggaattttacacacacacacacacacacacacacacacacacacacacacaaacacacaaacacacatatacatatacatgtatacacactcatggtccacatatatatccatacacactttcgtgctccccttccgctttgaaactttgttcaatttgaatttttcagtgaatctttttttctgaccaccctatttaaaactcagacactaatctccagtttctggcctctattgtccttttctacttccctgcttgattattctccaacaaagaacctaccacactcgaacacatcatgtattgcacatatttgcatgttgaccatttttgcctctcatttggattgtacgatttgtgaggacaaagatgctttctttcttctatactggcaaattttctaatttaatattcaacatagactaggttcttatgaaatacttttcaacacactactattagctatcataccctcagagtatacatccacaaagagaaaatcatttttaatatttttctgaagtcctcagagttctccttatatttagatactagttcccatatttcgggcatgtttgcatgtctccctcaagacacaaatccatatttctcaccacttttctcatcatatgttatgtagtattcaatattaattagttgagattcttaatttcatggttgccctagatttcccctgtcactctttctgcctcaaattttccatgcaattccaaatactacttgtccaccagcattcagattaatgctgacccaggctcagaaggttcacttgagctttccatgactgccaaataactctcatgcccagcatttatccaaccagcacatatagaatgctgtgagatggcccagtatcttgtatctgttggtgtatagctacaggtttgtatgaaaacaaaccagcatgctttgggtaacatcaacggttttgttagaaatcccatctaacagtcacactattctacataagaaatgaggccactttttctcaatgttttcttttcttttcttttttttttttttttttttgactcccagaaacattacggtttgatatcaagttcctattttaagagtcacccatttgcccaccataagttcctggagaaggtagactagtacaggactaaccttccagtggctgattctggtggtttccacgttcaggtttctctgattttcacaaactttttcccataaagactgcattttctttaaaagcttctcctgcaaaagagccataaattgaagcaccagtgaggacaataaagtaacatgcagaccgtttcatagggagggggcccagaatgagagacaaataagtccccagtaaatggcatttcttctgtttcccttctgcttcgtcaaatctcggaggtttgaagctaagaaagcccaaaagagagttgcttaaagggactcagagttggctttacccaatctccgagaaaataggcccacaggaatttcatgtgtcctttacagaaatagatcttcagaggcatcacttacccggtgttcctcagcagcccactcagcgggacagtgtctgtgataccggtgctccagagagctggagcacagcaaacagagcaggctcctgtccacttcacagaatatcttctttgtctccctgtgagtgccacacatttgctcctcagagctcaggaatagccagagactggcttttctggcacgggaagccatcttcttcaatcgaatgttagttttgaggtttctctgctgtgttgtctttaggcattcaaagcactgagtaagaattgggatgtcttgccagttgaggtagaaacagggcctgcaaaagctgtgcccacagtctatggtgaccgggtctatgaagtagttcaggcagatggggcaggtgagttccctctggaagacttgcgagattccagaattcatgtttctgaggaagaaagagcaacatgtcattttggggtctgggttgatgaaaagcttctgaacatgtggagataagtgatagctatagtttcttctcttgacagtgttcattaaagcacagcaaactatttcttctgtaacaaaaataaaaatctcacacagagagtctcccggctttatagtagatattactgactagatgactcacaaccccttctactcctagtgcctgtctgtaacacaataccaatctattcaatttcccatttttctgaatgtggatctggaaattgggtttgattctaagtggcctagaataaattgtagttgttcctattcttctttcatgtaactgccgaatgagtatgaaagggtgggaaaaactgccttggccaaagaaatacgagaagatggctagagggtcctatgatatattttgagagacacaacagtggggcagcaaaccaccatggcacatgtttacctgtgtaacaagcctgcacgtcctgcacatttatctcaggacttaaaataatataaaattaaagtaaaataaaaaaccaaaaccaaaacgaaatagaaaaaccaatcaaccaaccaaataaacaaataaaaaacagcaattaaaccaatttaggttgaatagaagagaaaaaatcattaaagatattgggcctttttattttctcgtgggttaaattaacttctcctagggatacccaggctctgaactaacatatagtaggatttttgttaaacttaaagaggtgtaattatatttctatggtgtgatggtgaattttaggtatcagtctgactggattaaccaacacctagggaactggtgcagcattgtttctgggtgagtctgtgaaggtgtttccagaggagagagacatgtgagttggtgagctgagtgggaccatcatccctcaatgtgagtgggcaccattcaatcagctggtagctcagataaaaggaaaaggccagaagaaaggcaatttcctctttctttctcctgaagctagttctgaggctttcagccttgagctcagtcaagacaccggtatcctcaggacatcagcttaaagacagcctatattagaactgctcagactccataatcaagcaaacgaattttcctgatgaattccctctcgtgtagaatcatgtgtagcttgaggacagatatatgttctgagaaatgtgtaaggaggttttatttatttactttttgagatggagacccactgtgtcacccaggctggagtgcagtggtgcaatctcggctcactgcaacctccgcctcctgggtcaaagcgagtctcctgccttagcctcctgagtacctaggattacaggaacatgccactacacccggcaaattttctcatttttttttttccagtagagatgaggtttcgccatgttggccaggctggacttgaactcctggcctcaagtgatctgcccaccacggcctccaaaagtgctgggattacaggcatgagccactgtgcctagccgggcggttgtattgttttgacatgatagaatatacttatacaaacctagatggtacagcctgctacacacctatggtatacagtacagcctgttgctcctagactacaaaactgtacagcatgttctgtactgtatactctaggcaattgtaacacagtggtaattatttagtatgtaaacatatttaaatacagaaaaggtacagtaaacacactggtattataatcttatgtgaccaccatgtgtggtttatggttgactgaattggctcatgaatgtatctctacatgtatacatatacatcctatcattctgtctgtctggagagccctgactaatatataaactatggtctttggcaattttaagtccttttctttactctcctttatttgataacactgctgaattttagtgaaagaaatgaaaaatcttagaattgtaaatattctccagaggtcatctaagtcatt

SEQ ID NO: 915718 - DNA, 4001 bp, Homo sapiens
attaacttctcctagggatacccaggctctgaactaacatatagtaggatttttgttaaacttaaagaggtgtaattatatttctatggtgtgatggtgaattttaggtatcagtctgactggattaaccaacacctagggaactggtgcagcattgtttctgggtgagtctgtgaaggtgtttccagaggagagagacatgtgagttggtgagctgagtgggaccatcatccctcaatgtgagtgggcaccattcaatcagctggtagctcagataaaaggaaaaggccagaagaaaggcaatttcctctttctttctcctgaagctagttctgaggctttcagccttgagctcagtcaagacaccggtatcctcaggacatcagcttaaagacagcctatattagaactgctcagactccataatcaagcaaacgaattttcctgatgaattccctctcgtgtagaatcatgtgtagcttgaggacagatatatgttctgagaaatgtgtaaggaggttttatttatttactttttgagatggagacccactgtgtcacccaggctggagtgcagtggtgcaatctcggctcactgcaacctccgcctcctgggtcaaagcgagtctcctgccttagcctcctgagtacctaggattacaggaacatgccactacacccggcaaattttctcatttttttttttccagtagagatgaggtttcgccatgttggccaggctggacttgaactcctggcctcaagtgatctgcccaccacggcctccaaaagtgctgggattacaggcatgagccactgtgcctagccgggcggttgtattgttttgacatgatagaatatacttatacaaacctagatggtacagcctgctacacacctatggtatacagtacagcctgttgctcctagactacaaaactgtacagcatgttctgtactgtatactctaggcaattgtaacacagtggtaattatttagtatgtaaacatatttaaatacagaaaaggtacagtaaacacactggtattataatcttatgtgaccaccatgtgtggtttatggttgactgaattggctcatgaatgtatctctacatgtatacatatacatcctatcattctgtctgtctggagagccctgactaatatataaactatggtctttggcaattttaagtccttttctttactctcctttatttgataacactgctgaattttagtgaaagaaatgaaaaatcttagaattgtaaatattctccagaggtcatctaagtcattttaaggaatttttcatagtttaataagattaagactcaagtgagatggcaaccaccatcacgtatcaaattatatcttatatatgtatttggccaaaaaattgtgttttgatttccaaactaggatgttttggggagctttctcatttttttcagtttcactattttgcatctctcatcattaccttactaatttaaagctatgtgtaaatgccgaatgaatggattaacattcattaacgtcttctcaattcaattgtataatattaatacactcattacacacatatttacacacacctatgtgtacatacatgtataaatatcaactccatatattcattatgcatacatatctgttgcagcaaacactagatatttccattttttcaaaactatattgaagaatgatagaaaacgcaaaataacaacaattagtatcctcataattcataaaatctatagtaagaatatgaattacaaatggtatcattgtgtagatttaagataatgagatatttttaacactctaatttattattttgtaaaggaaagaagacataattttatcaatataagtttcactcaccgctgggttctttgaagggttcccacaatgattcttcgagaaataattctgttaagtactcctcaaggtcaggagctcattcgccgcagtactgagtttcagaggtcaccaaaacacagcttcctctaagtgcgctccttctcctttggagaaaactgagcttgtctcttctatgtccttttataagaatctgtgaaggccacacccacctctttaagtgggtggagtattgagaaaggttgagaataagatgattaggtttatgcagtatttagatcgcacctttgcaccgctgattaaattatcatcactccttaaaaaaccatgatttaaatgaatcatatgtaacataaatcctatcagatttgacatacactggaaattaactaagatgcattttatactgtttattgagcttcatccaagatacaggcattcctctaagggcacatttatttattctagagaaactgtctgcttgtggagtgcagtggtacagtcatagctcactgcagccttgaattccaaggctcaagggatcctcctgcttcagcctcccaagtagctaggactacaggctcaaaccatcccacctggctaatgtttttttaaaacttttcatagagtcagggtatggctctgtagcccaggctgttctccaactcctgtcttcaagtaatcctctggtcttggacttccaaaatgcttgggagtacaggcataaaccacctcatccagccttaaatgctgctttagtacatttataggatattcgaagagaagtccaacaggaagataaaactttttttgttttctaccactctaagagaaatcactgactaaccaaataactctactaatttgaggtctcttactgaatttacaaacctttgccaatctcgtgggtgaaatacgagttattattttaatgcttttctccacatggtgcatgatgttctgccatgactagaaatgcaatatagtaattaatttggggattataaacaagttttaggacgtaggctaattcacaaatacagaatccaaatgatagggatggattatatttttctttctataacaaatatttttgttgtcatgtgacaatttaaaaaagaaaagagatttaagaagcggctactcaaatatattctgacagaggaattctttgccaatagcccccacaagacttatattcaagagtgtcagaacagtgaagacaaatctgtcagccctatgtctgtcaaggttcaaaaatcaaagcagatcccataatatatatgaatacttagggagattcacatatgaattaagtgcaaggaaccggtttccacagttgatgggctgcctgagcaagtatgagatccctgttaaagtcagttaggaagaaaaatcctcagctggctggatcccaatggtcaggattcaaagctttggtccaaagtcattagggggcaactggaagattacagtcccattcgctattttaaatgttgttcaaggaatgcctatgtctttctttaagggactttcactgatgaagtcaggcttacctgagtacacttgctagttacaagagcaggacctttcgttacatctgcaaaataccttcccagtaggtcctacgtgagtgtttcattgaataacaataagaaagtttgtctatgccacaaagtccagtttcattctcctacatgtggcttgccaattatcccagcaccatttgttgaatagggtgtcctctccccactttatgtttttgtttgctttgtcaaagatcagttggttgttaagtatttgggttcatttctgggttctctattctgttccactggtctatgtgcctatttttgtaccagtaccatgctgttttggtgatgaataaaggcctggagtatggggatgtaatgctcaggggccagacagtcggctgcagcagcacagcctcatccagcaattagagaggggataggaacagagaaaggtggggaagactagaggcaggtttatgaaaggaatcagagcccttggttgggtcgaaatgggggtggagggagattccagcttgtcttctgcagcatgaataccttgaccccctgccacaaacagac

SEQ ID NO: 915719 - DNA, 4001 bp, Homo sapiens
aattaacttctcctagggatacccaggctctgaactaacatatagtaggatttttgttaaacttaaagaggtgtaattatatttctatggtgtgatggtgaattttaggtatcagtctgactggattaaccaacacctagggaactggtgcagcattgtttctgggtgagtctgtgaaggtgtttccagaggagagagacatgtgagttggtgagctgagtgggaccatcatccctcaatgtgagtgggcaccattcaatcagctggtagctcagataaaaggaaaaggccagaagaaaggcaatttcctctttctttctcctgaagctagttctgaggctttcagccttgagctcagtcaagacaccggtatcctcaggacatcagcttaaagacagcctatattagaactgctcagactccataatcaagcaaacgaattttcctgatgaattccctctcgtgtagaatcatgtgtagcttgaggacagatatatgttctgagaaatgtgtaaggaggttttatttatttactttttgagatggagacccactgtgtcacccaggctggagtgcagtggtgcaatctcggctcactgcaacctccgcctcctgggtcaaagcgagtctcctgccttagcctcctgagtacctaggattacaggaacatgccactacacccggcaaattttctcatttttttttttccagtagagatgaggtttcgccatgttggccaggctggacttgaactcctggcctcaagtgatctgcccaccacggcctccaaaagtgctgggattacaggcatgagccactgtgcctagccgggcggttgtattgttttgacatgatagaatatacttatacaaacctagatggtacagcctgctacacacctatggtatacagtacagcctgttgctcctagactacaaaactgtacagcatgttctgtactgtatactctaggcaattgtaacacagtggtaattatttagtatgtaaacatatttaaatacagaaaaggtacagtaaacacactggtattataatcttatgtgaccaccatgtgtggtttatggttgactgaattggctcatgaatgtatctctacatgtatacatatacatcctatcattctgtctgtctggagagccctgactaatatataaactatggtctttggcaattttaagtccttttctttactctcctttatttgataacactgctgaattttagtgaaagaaatgaaaaatcttagaattgtaaatattctccagaggtcatctaagtcattttaaggaatttttcatagtttaataagattaagactcaagtgagatggcaaccaccatcacgtatcaaattatatcttatatatgtatttggccaaaaaattgtgttttgatttccaaactaggatgttttggggagctttctcatttttttcagtttcactattttgcatctctcatcattaccttactaatttaaagctatgtgtaaatgccgaatgaatggattaacattcattaacgtcttctcaattcaattgtataatattaatacactcattacacacatatttacacacacctatgtgtacatacatgtataaatatcaactccatatattcattatgcatacatatctgttgcagcaaacactagatatttccattttttcaaaactatattgaagaatgatagaaaacgcaaaataacaacaattagtatcctcataattcataaaatctatagtaagaatatgaattacaaatggtatcattgtgtagatttaagataatgagatatttttaacactctaatttattattttgtaaaggaaagaagacataattttatcaatataagtttcactcaccgctgggttctttgaagggttcccacaatgattcttcgagaaataattctgttaagtactcctcaaggtcaggagctcattcgccgcagtactgagtttcagaggtcaccaaaacacagcttcctctaagtgcgctccttctcctttggagaaaactgagcttgtctcttctatgtccttttataagaatctgtgaaggccacacccacctctttaagtgggtggagtattgagaaaggttgagaataagatgattaggtttatgcagtatttagatcgcacctttgcaccgctgattaaattatcatcactccttaaaaaaccagacatctatacacagcagctctcctgtgactgacattcttggttattttcttgcttgatgcaattttcttccttgagtcaattgatttacttctggaaagtggtgtaaaaattggttcctaataaaatttgcaatttgaaaatattctatcttgaagcagaccaatggttaacaactttgcaaaaccaatatttatacccttgataaaatatttgattgctaatgtgttggctgctggatttctcccaacagagaacatcttcagagttattcttctctgctaagagaacatttctcttttgtctcctggtctctgtatgtctgaggaacccttttctatgtcatctggtaacttctcattttattttttccttgtataattttggaccagtccatgccatcttttcctctcattcttccctatatagcaatgaattttgtaaaataaagaaaatggcaagaagagaggaagaggatatcagtgaagaggatgtcatgctggacaccgtgttgttcttggcacacactgcatgcagtcctcactgccatcagcagggtggcttttattctcacattttttttgatctatctaataatgggaggggagagtaacactatcagtgtccctcacccagtaaaatgcagatttttattaagaggctgtgccttgctctgttgcccaggctggagtgtagtggtgcaatcatagttcactgtaacctcgaacttctgggctcaagggatcctccgatctctgcctcccaaacattgaaattacttgcttagctcttactggatctgactaccaagtctacccttacatatacgatattttttccatagctccacttatacatttagttaaatagttttcaaaataataacgttttaaagctaaatgaagtcaatatgattttcagttacaaagcaacacaaaataaaaaataaacatatccaaataaaaattaaacaaaaacaataaaatatctttaaaagaacagtatttctataattttccttcttaatttttaaacaacagagtaaaacagatcaacttcacaatttaactgaaagatgatttacaaattgtctgaaaacactaactaaagccaataaaactttctctagccacagatatgacagccgtgaacactttagggtaaccaacaattgttttgtctattctcaggttagagcagaaggaccctcagctgccgaccagtgggacatgacaatgccaagaaatctgggccacaaaccaggccattcccctgaaaatttgctgtagcttccttggagctaaaaagccaagattcccaacagtacccatgggcagagggcttaggtacctggtcagttacctctctaaccactcactgctgcatcaagcaagaaaataaccaagaatctcagtcacaggagagctgttgtgtatagatgtctgtttgtggcagggggtcaaggtattcatgctgcagaagacaagctggaatctccctccacccccatttcgacccaaccaagggctctgattcctttcataaacctgcctctagtcttccccacctttctctgttcctatcccctctctaattgctggatgaggctgtgctgctgcagccgactgtctggcccctgagcattacatccccatactccaggcctttattcatcaccaaaacagcatggtactggtacaaaaataggcacatagaccagtggaacagaatagagaacccagaaatgaacccaaatacttaacaaccaactgatctttgacaaagc

SEQ ID NO: 915720 - DNA, 4001 bp, Homo sapiens
atttctcgccgggccttagctgcctccccgcggggcagagctcaggacctgcagcccaccatgcctgagcctccccacgaccccttgggctcctgtgctgcgcgagcgtccctgacgagcaccgccccctgctccacggcgcccagtcccatcaccacccaagggctgaggagtgcaggtgcgtggcatggcacaggactggcaggcagctccacctgcggcccggtgcaggatccactgcgtgaagccagtggggttcctgagtctggtggggacttgcagaacctttatgtttagctaagggattgtaaatgcaccaatcagcaccctgtgtctagctcagggtttgtgaatgcaccaatcgacactctatatctagctactctggtggggacttggagaaactttatgtctagcgaagggattgtaaatacaccaatcggcactctgtatctagctcaaggtttgtaaacacaccaatcagcaccctgtgtctagctcggggtttgtgaatgcaccaatcgacactctgtatctagctactctggtggggatgtggagaatctttgtgtctacactctgtatctagctaatctagtggggactggagaacttttgtgtctagctcagggattgtaaatgcaccaatcagtgccctgtcaaaacagaccactcggctctctgtaaaatggaccaatcaggaggatgtgggtggggccagataagagaataaaagcaggctgcctgagccagcagtggcaacctgcgctggtccccttccacactatggacgctttgttattttcctctttgcaataaatcttaatactgctcactctttgggtccacactgcctttatgagctgtaacactcaccgcgaaggtctgcagcttccctcctgagccagcgagaccacgaacccaccagaaagaagaaactctgaacacatccgaacatcagaaggaagaaactccggacatgccgcctttaagaactgtaacactcactgcaagcgtccgcggcttcattcttgaagtcagtgagaccaagaacccaccaattccggacacagtatgaagacatgtgtttataaacagaggtggcacaactggagttccaccctataggctaacactcctttctctccccgtactcagttcttttaaagccaatgctttccactgttttgggggagggggctttagagaaggagctctcttactctccactcctagcaagaaataaaacctgcttgccttttttcccattatctttgtaaccaatatgaactagggaaagaactccatttacagtgacaatgacaggactacagaactggacagctgtcacaccatgaaggctgatgtcacagagccaggccaaggtgatgagaactgacctgtagagttatgcagaaacactacattagtaaactaataggcattaaatcattaggattccaaggcccctgtctttgcccttgttgttgggagaagacactgaaagagagaattctggctctctacagcaaagttcaattaaaaagtatagagtagggaggggatggggagagagtcagcatggaaaaataaccagccttcgggaaacaaagcccttcactttaaagctctcccttctttcaaatctgcctgcccgccaggcggctctgttcccctcagtcagctctggcagcaagaagtctgtgaactgtgtcttttccccacccccgcacagcttttcagataagttaaactcaccaaggtaaatacagttttgtcccaaagacttcctacttctgccctccacaaaatcactcaatacaccttcagacaccagtgcagaagtggtgattctggggagaagagtgaagacaggccagggaagacgtggttaggattcactcaccaatccacgggcctgatctgcacaaaggaattttcctagaggaaccgcaggaaattcttgctcacactcagggcaggaaagtgaaagataaactatgggccaatggcatttctccacgtagggcctggtgagtcccgccctctgaatgaatcagccgggccgtgtagctgtgctgttcacaggaggagccgtgggaactagaggcattcccactcaatctcccttttctcttgagtctcaggatcttgttatcatgccacttcttctgacatagtttcagattaacccagccaagtattaaaaattagaaaaggtgccctttttcgaaattcttccaatgtgctcctcttgctcctgatctcacagctgagttctgcttctgggtgacagatatggcccaaagagaaggaagaacaaagttaatgatttttagagaattgcagtagatttctggtctggacttaaaaatcttataggacctatgaacagaaaaggagctgcaggtaggagagatgtcatattattaagactccgaaacccagagaggacaggatgctagaaatttatctggagagggccgggcgcggtggctcacgcctgtaatgccagcactttgggaggctgaggcgggcggatcacaacgtcaggagatcgagaccatcctggctaacacggtgaaaacccatctctaataaaataaaataaaataaaataaaataaaaaattagccgggcatggtggcgggtgcctgtggtcccagctattccggaggctgaggcagcaaaatggcgtgaacccgggaggcggagcttgcagtgagcagagatcgcgccactgcactccagcctgggcgacagagtgagactccgtctcaaaaaaaaaaaaaaaaaaaaaaaaaaaaagaagtttatctggagagcgataaagaaataccacattatttctttcaactattcactttcaaagaactctccaacttcccgctgttgtcttttccaaagtatctattgcatccctgagcagggccaggccttcctctctcttctcttctggttactatgcaaaactggtccaaaaggctgaactgtggtccatgtaccatagcctcccttctaagctttcccttactggaacatctcaggaagtccacactggaactaggatcattggtagagaggagtatttagtttgaaaatgaaaatgcctcaggagaaggcaatggggagcactgcagtgggcagcctgttatcacttaattccatcatcagtaacctcataccccctccacactgtacccccgcagctttctgtttcatgaaatcaggtagggggcttttgcattttgttctttattgtctcagatttactagaatatggtgtatataaggagtaatatttaaatagatatgaagatatatagctattaatctaattttaattgaatatcttgatgtcacatttctgttctattcttgctgtaaagataactgctgtgtcacctagtttaattcaaatattcttctggcattagtaataattatgtggcagtaataattatagtaataattataataattagtattattaataattacaattattaatagttacaattataattaatattactaattgttatttagtaataattatgtggcattagtaataattatgtaatgattacatttgcagtggctcacacctgtaatcctcgcacttcgggagaccaaggcgggtggatcacttgaggtcaggaatttgagaccagcctgaccaacatggtgaaacctcatctctacgaaaaatacaaaaattagccaggtgtaatggcagatgcctgtaatcccagctactcaggagggtgaggaaggagaattgcgtgaacccgggaggtggaggttgaagtgagccgagatcatgccactgcactccagcctgggcaatagagtgagactctgtctcaaaaaaaaaaaaaaaaaaaaaaaaaaaaaaaaaaaaaaaaagtaattatgtaaatttttaaacaaattttaaacgattttttaaaatatcctctctgttttcttcctaagtattattcagactctaaccatat

SEQ ID NO: 915721 - DNA, 4001 bp, Homo sapiens
ctgtaacaaaaatgaaaaattcaaacacaaagagagtctttaggctttttagcagacactgctgactagatgactcacaacctcttctactcctggttcctgcccatagcataatgcaaatctgttcaaaaacctactccctggatgtcgacatgaaactcgggttttaatcttaagtggtctagaatgaaacatgcttgtccctatttctctttcaaataacaactgaatgactatgggagaggagtagaaaacctacattgggtaacaaaacatgagaagatggtcagaggttgctatgacatatttttagagagagggaccgagaagccggctctttaaaacaaaaacaaccccagaacaaaccaaccgaccagattaaaaaaaaaaagacagcaattaaaccagtctaggatcactaggagataaaataaataatgaaaaatgttgggtttatttttcttatggcttaaattaacttcttctttgggctactcaaactatgaactgacatatagtcagttttttaaaaactgaaatatatatcattatattactatggtattatggttaattataggtgttgacttgactggattaaataatacatggagaattggtaaagcatgatttctgggtgagtctgtgaaggtgtttccggagagtcatgtaagttggtgagctgagtgggcaacagcagccctcagtgtgggtggacactatccaatcagctggtagctcagactgaagataaagggcagagacaaggcagtttcctctctttctcctgaagctgattctaactcagccaggatattggtatctccaggacactaccttaatgacagcctatgttcaacttctcagactccataatcaagggaacaaattcccctagtggacttcctctcctgtacagtgtcatgtgtagagtgaggacagatatatgatctgagggacgcgttagacagtctcgttattgtttgaacatcatagggtatacttacacaaaccacacctatggtatacagtatagcatattgttcctaggctacaaacctgtatggtatacgataggcaattgtaccacaattgtaagtatttttggtatgtgtatatatatatatatatatatatatagttatagttatgtacacatcctatggttctgtgtctctggagaaccctgaccaatacaaactgtaatctttgccttggcagtttgaagtcctttaccttactctcttttactaaacactgctgaatttaagtgccaagagtgaaaatttaagaattgcaaatatttttcagaggccatctgagccatttcaaggaatttttcacagtttcatctgaggtaaacctcaattaaaatgacagctagtatcaagtatcaaatcattccttatacagttatctgctaaacaatcgtgttttgatttctaagctagggtattttggagagcattcttatttcctttagtatcaccatttttaactcatcattgcctcagtaacttaaaatcatgtctaaaagcttaaggttatgaaagcacaacatttacagtattcaataattatccttttttacttaattaagtgtaccaatattagtacatgcagtacacatatatatgttttaatatgaattccatatacccatgatgcatacaaatctattgcagcaaacactagatatctaaaatttttcaaaaatatatcaaacacttttggaacacacaaaatgacaacaataacctcatgtcataacctcatgtcataaaatgaatagcaataatatgagttacaaataagatcattcggtaagtttagacagttagatatttttatcactgtaatttactattttaaaggaagagagaaataattttctccatagaagttgcactcaccccaaggttctatgaatgtttcctgcagtaattcttccaagaaaaaattcttttaagtactccccaagatcaggagctcattccctgcagagttgactttcagaggtcatcacttgaatgcagttaactctaagtgctgtcctcctctggagaaatatgagcttgtctcttctacatccatttaggtgaatctttgaagaccacaaccacctatttagtgatatttagggtattaagaaaggtggagacagagatgattaggtttatgcaatatttagtacacgccttttcatcactgattaaattagcatcacactatcattgtaaaaaccactgcctgaatgaggcatatctatcatcaatcttatcagagtaaacatatgctagaaattaactaagttgattaaactgtttcttgagtttcttcccaaggcacaagcattcctctaagtgcacatttatttatttataccaaagaaagtttcaccctctggagtgcagtggcacagtcttagctcaccgcagccttgaattccagggctcaagtaatcctcccacttcagctttcaaagtaaaaaagactagaggtttatgccattgcacctagctaatttttcatttattcatcaaaaatatttttaaaattcttaggtgattacatgtgttacagtgaccatccggattagaattagattaggtttaaaatgatgaaagaatctgggagagggggcagagtgttggttgttaattagcacatggatcaaaggagattactgatgtgtttagaagccacaacattgacagaataaaagccggaactaacaatccaatggtaaatctctttactgtggtatttgctgccatttctgctccataagacacaccttaaccactttgtcatggtatctgcagtattctattttagtctaaatagcattttctctcaaatgcattctatttctctctccttcatcttccctcccttctttcttccagctgtattttttcactggagaacattagtagaatgttctcccaaatttcagatttcagatacgcatctgtaaaataatcttatggagacacattttaattgctactgaatacttggttgttttcataagttcgcagcattactactgcctccaaaaaacggtttcccatttccacagctaatctcatcattgactctgccatccaagtttattctgtgccactctggaagaatctggaaaaatacttaaaatacattttaagtattcatcatgcacatgtattgcattttattttatatatgttcaggtgaatatctttctccactaattgtttgcatttcaattcttgtatcatgttttttgaaacacagaagtcctcattaatataaacctactaatttttttaattgttaatttttgtcctggttaagaaatccttatgagaatattgtatcatgttccccttaccttcagaactggaatctatttggaaatgactgtgtgtgttttgaggtaggagtcaatatttagttattttttaaaattcaattaatccagcattgttctgaccaccttgtgtatttcaatgtagaagagcacactaataatgcaggattatttatctatgtggtgagaattccaaaatgaagcccagcatggaaggtcaaataatattaactcaaaggatagattagtaaaatgaaatgtgatggagaagtgcaatatagttaggtaaagagaaagaaaaacatttcccagctatcattaagacttcactccaagcttttgcatgaagcaaaagatcccgactctcttccattgattttaactccattcagacatgtctgtcatctattatttcactcagtggcagtcagaaataaagaaaaaaaaacagaatatattttatgccatgatcatgaatgatgatttttcaaaaattaataaagaaccaaaacatatacttttagtgtttttaccatttttaatagtaacacaataaatgagttttaataacattaggaggcaattcaagacataaaacagaacctatttgtcctgtttgataaggcacaaggaagagggcttcctg

SEQ ID NO: 915722 - DNA, 4001 bp, Homo sapiens
gaagatttagtttaaaaaagttaaaggatcttattaatttttttatgttgatcacatgtcctaattgtattttgcatgtattgggttaaatgaaatgtattaaaattaatttcacccgcttatttttaatgaggctacttgagtatgtaacattacatatgtggcttcattctatttctagttcattatatgtctttttcctatctaatatgcgctgtagatattcatctaatactctctttagacagagaaaaattcttgagcagaaaaaagatttgtaagagttgaggtctcttgtcaaagctgaggcttgggaaagaaattgtgaaggaggggagcatacagttagcataggtgacccttgcccacacaccagcaagccctgactgcccactgcagctaagtgcagcccaagggagatatgggaggctgccagtttccaactgaggccaagtctccagagcagtgtggacgggctgagagaaggcattctgactgtgaggagtgcagacgagaagagcctgcagtcccagagcccagtgcatcaaattagcagaagaaagagcccaaattcacaaccaggtgggaccaattaaatcagaaccagacgcctgaaaaaggtctgctaactagcaacactgcaagcacttggagttctttatgcagaatctcagtctttcctggaatgattcagaatctgcactttaatattaaagttctctaggtgattcttacgcacattaaggcttcagaagcactgccttagataaaggaccttctttcccaggtggatacaatttagggtgcaaaacagctagaagagggagggggacagagaatggcctgctatttagatacgaagcatcttttagaatggaagcttgcatcgatatcaaaatggctttcagaataaaaatcagtgactcagcaggggatactggggctggtgtaggctgggggttcagagttaggaatgacagagcgggcccgtccaccagctgggagccctagtgaaagtggaataaaataggtggcagttgcatttataagtgagttgggcatgagttcttgcactttaggaataacatttttttttatctttgtgtagggttatatttaacctattatctgcaattgattatctaacaggactcaataaatatttgaattggaacataatcagtttcaaaacaaaaaatttaatttccacttcaaaagaatttctaccccctgcatttcagaaacctataatttaaaaattgttttgattgtgcatttttttaaagctaggcatggagtttgccagtaataatgaccataatttgtgtcaggcagcctcctacgtgtttaaatctgtctcactcaatcctcaccaaaactctaagatatacatattactccgtccatcttatagatggaagaaactaaagctcaaagaagtcaagttaacagtcttcgggcacacagccagtgtctgtcagagtcaggatttgaacacatgcagtctggctgcggcatctatgctcctaaccacacatttctgtctctattgactgactgattaaaatgtctctaacctcagtggggtcatttgcagtgagaaagaaaaagaaataaagatataatgagttccgaaagggaaaggaccttatctctttcactgccctgtcacctctgccagaagtgacaataagagccagtcaacagaacggtagacatacctctctgacccgcacatctggggaatgagaagccaagaagttccagatgtaagcaatatcaggtggtcaaagctcttcagagcaatccaaggcaccttaaactaatcttaaggaacagagcgcgctcactcggcttttatctaaactcaaccacgcacgactctgctccgttccgttccgagaaaggcaggggatccctcctccgccagcctttggccgttgaacggacggacccacaggtcaggagtttgcggaaggctcatctcccaactccttctgggaggagtcgggccgcctggggtgggggataaacggtgctcacttcctggagcggccaggctggagatgggggaggggaagggggaagggggaagggggaagggggaaggggggaaggggagaacgggggaaggggggaagggatgctgactctgaatccacgcctgacaaaatggtttgcagtgattccctaaagcagtttccagagctgcctcctctacatacttcagcttgtagaatagaggtttaactctctttacacggcctattcccagctgcaaaggtgcctcttctgtgctcccttcccaaacttgagttcacttgaaaatgcagaagtctccctcattcttctttcacccgtgaaccacccccaacccgacctgcagagcgggtcaaactctccagacaagtggggacagcggtagctggccagaaaataaacttgctcactaacctggaatctgtggcctggatcagagccaaggacttgaagcagccgcgtcctccacccaggccgaaagactcaggggggaaggggcggggcctggggaggaggagggtcaaattgtccagccccgcaggagatccagccgattccatgggtgtggtcaccagtgacccctcaggtggtaagggagatggagatggtttctgaggccaggcgcggtggttcacccctgtaatcccagcactttgggaggccgaggcgggcggataacgaggtcaggagattgagaccatcccggccaacatgatgaaaccctgtctctactaaaaatacagaaattagctgggcgcgcctgtggtcctagctactcgggaggctgaggcaggagaatcgcttgaacccgggaggtggaggttgcactccagcctggagacagagcgagactctctctcaaaaaaaaaaaaaaagaatttttgaaggtagcaacgcaaagctgttcatcttacctgatgaacggcaaatccggaggcctttgagaacaccaggccagagatgacccttgtaaattgtctgcagtgtactgtagctttctaatatcatatcagagtttaattacactgataatacacctgtactccatatagacgtattaattaaaatgtctaaataaacatataaagttatacgagtaaaagcccctttgcataatggcatgttttgccaaacgatcattaaaattcatcagtttaaaattacacgtatgtatgtataaagctgtgtgtgtgtatctgtaattttgacctatataactagaagacaatctttgtttttatttaggtctgatgaatacatgtaaagcttattgagcctcagaactctaactacagggtttcaatagcacagaaactctgagaagaaaaagaatgtcaaagttcctccctaaggagactgattaggtgagtatcaccttgccttagaaggtggcttggggagggaggtatagagagagaagggactggggtgtccatacaaaagtctggacggaggattgggcagtagggagagagctgggttaagtatcaagagatttctctggacagtccccaggcaaatgaaaggtcattggaatctcgtaagtgcagacatgtgtcactatttcagtgactacctcatgtctgcaggcttaagaagccacgcaaaggttatttcagatcaccctttgtgtagctttcttcacaacggttttaggtatggctgcctccatattgcccctggatgacgcttcaggtcaaagcctgcttatgctctgaaattctcctgaccccacccaaactgcccagtatggacaccaccctgccactggcccagccaacatttaagtcccttggaatacaaaatggtatgattgacacccagagggttagaaatattggaaaagggatggagaagcccaacccagagtcccttctcaggccattttctaagagctgatataaatggaagtaacttacaggctccatagtcttgtcagcatagggcttcatttctggggc

SEQ ID NO: 915723 - DNA, 4001 bp, Homo sapiens
gcccagtgcatcaaattagcagaagaaagagcccaaattcacaaccaggtgggaccaattaaatcagaaccagacgcctgaaaaaggtctgctaactagcaacactgcaagcacttggagttctttatgcagaatctcagtctttcctggaatgattcagaatctgcactttaatattaaagttctctaggtgattcttacgcacattaaggcttcagaagcactgccttagataaaggaccttctttcccaggtggatacaatttagggtgcaaaacagctagaagagggagggggacagagaatggcctgctatttagatacgaagcatcttttagaatggaagcttgcatcgatatcaaaatggctttcagaataaaaatcagtgactcagcaggggatactggggctggtgtaggctgggggttcagagttaggaatgacagagcgggcccgtccaccagctgggagccctagtgaaagtggaataaaataggtggcagttgcatttataagtgagttgggcatgagttcttgcactttaggaataacatttttttttatctttgtgtagggttatatttaacctattatctgcaattgattatctaacaggactcaataaatatttgaattggaacataatcagtttcaaaacaaaaaatttaatttccacttcaaaagaatttctaccccctgcatttcagaaacctataatttaaaaattgttttgattgtgcatttttttaaagctaggcatggagtttgccagtaataatgaccataatttgtgtcaggcagcctcctacgtgtttaaatctgtctcactcaatcctcaccaaaactctaagatatacatattactccgtccatcttatagatggaagaaactaaagctcaaagaagtcaagttaacagtcttcgggcacacagccagtgtctgtcagagtcaggatttgaacacatgcagtctggctgcggcatctatgctcctaaccacacatttctgtctctattgactgactgattaaaatgtctctaacctcagtggggtcatttgcagtgagaaagaaaaagaaataaagatataatgagttccgaaagggaaaggaccttatctctttcactgccctgtcacctctgccagaagtgacaataagagccagtcaacagaacggtagacatacctctctgacccgcacatctggggaatgagaagccaagaagttccagatgtaagcaatatcaggtggtcaaagctcttcagagcaatccaaggcaccttaaactaatcttaaggaacagagcgcgctcactcggcttttatctaaactcaaccacgcacgactctgctccgttccgttccgagaaaggcaggggatccctcctccgccagcctttggccgttgaacggacggacccacaggtcaggagtttgcggaaggctcatctcccaactccttctgggaggagtcgggccgcctggggtgggggataaacggtgctcacttcctggagcggccaggctggagatgggggaggggaagggggaagggggaagggggaagggggaaggggggaaggggagaacgggggaaggggggaagggatgctgactctgaatccacgcctgacaaaatggtttgcagtgattccctaaagcagtttccagagctgcctcctctacatacttcagcttgtagaatagaggtttaactctctttacacggcctattcccagctgcaaaggtgcctcttctgtgctcccttcccaaacttgagttcacttgaaaatgcagaagtctccctcattcttctttcacccgtgaaccacccccaacccgacctgcagagcgggtcaaactctccagacaagtggggacagcggtagctggccagaaaataaacttgctcactaacctggaatctgtggcctggatcagagccaaggacttgaagcagccgcgtcctccacccaggccgaaagactcaggggggaaggggcggggcctggggaggaggagggtcaaattgtccagccccgcaggagatccagccgattccatgggtgtggtcaccagtgacccctcaggtggtaagggagatggagatggtttctgaggccaggcgcggtggttcacccctgtaatcccagcactttgggaggccgaggcgggcggataacgaggtcaggagattgagaccatcccggccaacatgatgaaaccctgtctctactaaaaatacagaaattagctgggcgcgcctgtggtcctagctactcgggaggctgaggcaggagaatcgcttgaacccgggaggtggaggttgcactccagcctggagacagagcgagactctctctcaaaaaaaaaaaaaaagaatttttgaaggtagcaacgcaaagctgttcatcttacctgatgaacggcaaatccggaggcctttgagaacaccaggccagagatgacccttgtaaattgtctgcagtgtactgtagctttctaatatcatatcagagtttaattacactgataatacacctgtactccatatagacgtattaattaaaatgtctaaataaacatataaagttatacgagtaaaagcccctttgcataatggcatgttttgccaaacgatcattaaaattcatcagtttaaaattacacgtatgtatgtataaagctgtgtgtgtgtatctgtaattttgacctatataactagaagacaatctttgtttttatttaggtctgatgaatacatgtaaagcttattgagcctcagaactctaactacagggtttcaatagcacagaaactctgagaagaaaaagaatgtcaaagttcctccctaaggagactgattaggtgagtatcaccttgccttagaaggtggcttggggagggaggtatagagagagaagggactggggtgtccatacaaaagtctggacggaggattgggcagtagggagagagctgggttaagtatcaagagatttctctggacagtccccaggcaaatgaaaggtcattggaatctcgtaagtgcagacatgtgtcactatttcagtgactacctcatgtctgcaggcttaagaagccacgcaaaggttatttcagatcaccctttgtgtagctttcttcacaacggttttaggtatggctgcctccatattgcccctggatgacgcttcaggtcaaagcctgcttatgctctgaaattctcctgaccccacccaaactgcccagtatggacaccaccctgccactggcccagccaacatttaagtcccttggaatacaaaatggtatgattgacacccagagggttagaaatattggaaaagggatggagaagcccaacccagagtcccttctcaggccattttctaagagctgatataaatggaagtaacttacaggctccatagtcttgtcagcatagggcttcatttctggggctagtaggctcagttaaaaaaaaaggatgttggctgggcatgttggctcgcttgtaatcccagcattttgggaggccgaggtggaaggatagcttgaatccacaattttgaggccaacctgggcaacatagtaagaccctgtctaaaaaaaataagtaaattgccaggcatagcggtacgtgcctgtagtcccaattacttgggaggctgagaggtgggaggatcacttgagcccggaaggttgaggctgcagtgagccatgatcctgctactgctctctagcctgggcaacacagtgataatcagtctcaaaacaaaaaagaaaacaaaaaacagaatgaaagactgtttctcagtgtgcagaatttttcctttttgtttgctaaccaaggcagtttttattttctctataatttctcatcttgaacagggagattgggcattctgacggttgagaagaaatgaaggtacttggcaataattcaaggggtctcgaaaagttagatataaatttaccacataatccatcaaatcc

SEQ ID NO: 915724 - DNA, 4001 bp, Homo sapiens
tgtctctgaggatggaccctccctcctcacctggagcagctccacgtcaggcacgtggcatgtctcccacagctctctgtacatgtctttcatcctttctaaatgttgggtcattctcacttgactgtcttgtagttgttggaaaagctcttctgcttctctttccagtgcctgcagatgccgttgctcctcctcatcgagaaatataggcatcttttgatattgaatagtgattatcctcttccttactgacacatagtcctgcagagatgtttggttaaaaggattacatgttctcactctcaatagaaaacttcaaataattatatgctgggtgtaatcaagcaacttataaactttctgcctcactcttgcaaggagtcttgaatatttgctatcttcttctgtccatctttttcaatgttcctattctctctccctctttaaatcaaacctatataaagactcctggtttctgtcactgtgatgcttcttcacagttgttactgagtcaattgtttcctctactaatctctcttttaggatttttccatgtctgctttgcctgcatgctaaaaaacatttagccatacaccatattatgcagtttttttttacttttaccatatttttactctatatactattctatttctttcgtcttcctcacacccaaacttagtgaaatgttgtctcatctgcagtgtctgaaaaggtttataccaaccttcaaatttgaactagaatacacatcatgccgtttatccaatatactagaattcatttggctagcttgtgtgggcttctctgtttgcaactcctattacatcaattgaaatcactacattttcttgggatgaaatcactatcttgcaacgggtagtttgaatttagctaaaaagtataagctaacattgtgtttatttgcataaaaacaaagaaaacattttcattcttacctttaacgaatgaaatgttctagtttcctgatttagattgtttcttgtctcttgattgatttcccataaatagtccatttcctttataagtttctcctgcaaaagaagcaagaagcttagcaataatgaagacagtatagtagatttcatacccttatcaattaaaaaaaaaggctgtaattgaaagaaacataaattaagttggagtgaagtggtcagatttttccaagttaaacacatttggttctaataatttggatgtgaaaagtgatagaaacataatagagagttttaagggacccttcagataatatcatcaatattctgagaaactggctttcagataacctgactttgaaaagtgttcttggtgctggccaccagctccacagctccattctacacgtttgaacaatgtttctaaggaaacctcctttagcgaagtctcaacacagctatgattagagtgccaaattagccagcaacattgaaaggacacatttatgtgttatgattgacatggaataatcaccacctccaccatctgcattctcatcaccatcattatcacaggccctcatcattcttatttgggattctgtataattcaaactgccttagaggcatcacgtaccctgcattcctcagcagcccatcctattgggctgtggctgtgagccatgtgctctggtgactcagagcagggcccacagagcaatctcttgtcagcctcacagaagagctccttagtctcctcatggagcacacagatattgtctgagctgttgatgttctgaggtctggtctgtctggctagggaagacagctttttgagtaccacattggtgttgaagttgggcttctctgagatttttctgcacgaagggcagcgcattggtgctctgccttcttctgagcagaggcagaggcagggcctgcaaaagctgtgcccacagtcaatggtgaccggatctatgaagtagttcacgcaaatgcagcaaatgagctcattctggaagacttgcaggtcgtctgaatccatgtttctggaaattaaaaaaaaaaaaaagtgagaatttctttctcttatttttatttaccccgatgaaaaggaaagaaaggccggtggacaattttccttgtctacttgagctctgtccagcatgtctaataagttagctccagcacaaactgagacatagtaaattcatacatgctggatttataaagttttccctcaatagccatcgaagattcggtcaaggactccctgagaaccaagatcctaagatgttcaagtctcttattagtaaatggtgtgaatttgtatgtaacctaaacctatcctcctgaatactttatgtctagattactttgaatgcctaatacaatgtaaatgctgtataaatacttgtaatgccatactgtttaggaacagcaagaagattaaaaatatgtacatgtttggcagggcgcggtactcatgcctgtaatcccagcacttcgggaggccgaggcgggcaggtcacgaggtcaggagatcgagaccatcctggctaacaccgtgaaaccccgtttctactaaaaatacaaaaaattagcagggcgtggtggcacgtgcctgtagtcccagctattcgggaggctgaggcaggagaatcgcttgaacccaggaggcggaggttgcagtgagccgagatcgcaccactgcactccagcatgggtaatggagtgagactctgtctcaagaaaaaaaaaaaagtacatattcagtacagctgcttttttcaccctgtaaatattttttatctgagattagttgaatccacgggtatgaaacttatgaatatgaacaacgaacaactgtgatgcaaatgagaaaatgagacaacagtcctcatggcatttttgttaaacaagccgtgctctcagtcattcccagttacctagacaagcttaaagcctgggtggagggtaaaagctgggatgatttctgagtcacttatgtaagctaattaacgaagaagcacattctgaatgtcatcctgtttctgtcattctatctctctcaataattccatgatgataatatatgaaagacacttagtatctatggtattattctatactccctgcctccaaactcacctatgaagtttgctcagacaattataaataaagtagcttttatctaagattgagtaatcacagtggactgtcaactcctaaaattatcaaccattaaatttgtccttttaactttaatatcaaaactcttcctttcaatacattaaatgtaaataatatctattatttttaattaggaaagttttttcccattgtcaattctgatgattagagagaacactttcacattctgaaatagccaatatttcaactataattaacaagaattaatcaacaactaattatcttctaaaataacaaaaaaaaagtgaagatatgtattaggttttccactctacactagaaaatccagaaatgcagttaatggaagcatggccgccaattcacctttcgcttagtgacttggaagttgcagcttcttgggagcccttgccagttggttagatctattgatctattttctttctttctttttctttctttttttttttttttttttgttgctgttgttgagatgcagtctcactctgttacgcaggctggagtgcagtggcacgatctcggcttactgcaagctccacctcccaggttcaaacaattctcctgccgcagcctcctgagtagctggtattacaggtgcccaccaccacgccaggatgatttttttggattttcagtagggactaggtttcaccatgttggccaggctggtgtctaactctagacctcaagcgatctgcctgccttggcctctcaaagtgctaggctgcaaacatgagccatcatgcccagccgattaaatctattttcaacagctttcaaatctagtctgcaaattgcaaattttgaagagacagcaaataagacctttgcaacaagaattttcaaagtaat

SEQ ID NO: 915725 - DNA, 4001 bp, Homo sapiens
ctgtctctgaggatggaccctccctcctcacctggagcagcaccacgtcaggcatgtggcatgtctcccacagctctctgtacatgtctttcatcctttctaaatgttgggtcattctcacttgactgtcttgtagttgttggaaaagctcttctgcttctctttccagtgcctgcagatgccgttgctcctcctcatcgagaaatataggcatcttttgatattgaatagtgattatcctcttccttactgacacatagtcctgcagagatgtttggttaaaaggattacatgttctcactctcaatagaaaacttcaaataattatatgctgggtgtaatcaagcaacttataaactttctgcctcactcttgcaaggagtcttgaatatttgctatcttcttctgtccatctttttcaatgttcctattctctctccctctttaaatcaaacctatataaagactcctggtttctgtcactgtgatgcttcttcacagttgttactgagtcaattgtttcctctactaatctctcttttaggatttttccatgtctgctttgcctgcatgctaaaaaacatttagccatacaccatattatgcagtttttttttacttttaccatatttttactctatatactattctatttctttcgtcttcctcacacccaaacttagtgaaatgttgtctcatctgcagtgtctgaaaaggtttataccaaccttcaaatttgaactagaatacacatcatgccgtttatccaatatactagaattcatttggctagcttgtgtgggcttctctgtttgcaactcctattacatcaattgaaatcactacattttcttgggatgaaatcactatcttgcaacgggtagtttgaatttagctaaaaagtataagctaacattgtgtttatttgcataaaaacaaagaaaacattttcattcttacctttaacgaatgaaatgtgctagtttcctgatttagattgtttcttgtctcttgattgatttcccataaatagtccatttcctttataagtttctcctgcaaaagaagcaagaagcttagcaataatgaagacagtatagtagatttcatacccttatcttaaaaaaaaaggctgtaattgaaagaaacataaattaagttggagtgaagtggtcagatttttccaagttaaacacatttggttctaataatttggatgtgaaaagtgatagaaacataatagagagttttaagggacccttcagataatatcatcaatattctgagaaactggctttcagataacctgactttgaaaagtgttcttggtgctggccaccagctccacagctccattctacacgtttgaacaatgtttctaaggagacctcctttagtgaagtctcaacacagctatgattagagtgccaaattagccagcaacattgaaaggacacattcatgtgttatgattgacatggaataatcaccacctccaccatctgcattctcatcaccatcattatcacaggccctcatcattcttatttgggattctgtataattcaaactgccttagaggcatcacgtaccctgcattcctcagcagcccatcctattgggctgtggctgtgagccatgtgctctggtgactcagagcagggcccacagagcaatctcttgtcagcctcacagaagagctccttagtctcctcatggagcacacagatattgtctgagctgttgatgttctgaggtctggtctgtctggctagggaagacagctttttgagtaccagattggtgttgaagttgggcttctctgaggtttttctgcacgaagggcagcgcattggtgctctgccttcttctgagcagaggcagaggcagggcctgcaaaagctgtgcccacagtcaatggtgaccggatctatgaagtagttcacgcaaatgcagcaaatgagctcattctggaagacttgcaggtcgtctgaatccatgtttctggaaattaaaaaaaaaaaaaagtgagaatttctttctcttatttttatttaccccgatgaaaaggaaagaaaggccggtggacaattttccttgtctacttgagctctgtccagcatgtctaataagttagctccagcacaaactgagacatagtaaattcatacatgctggatttataaagttttccctcaatagccatcgaagattcggtcaaggactccctgagaaccaagatcctaagatgttcaagtctcttattagtaaatggtgtgaatttgtatgtaacctaaacctatcctcctgaatactttatgtctagattactttgaatgcctaatacaatgtaaatgctgtataaatacttgtaatgccatactgtttaggaacagcaagaagattaaaaatatgtacatgtttggcagggcgcggtactcatgcctgtaatcccagcacttcgggaggccgaggcgggcggatcacgaggtcaggagatcgagaccatcctgactaacacggtgaaaccccgtttctactaaaaatacaaaaaattagcagggcgtggtggtacgtgcctgtagtcccagctattcgggaggctgaggcaggagaatcgcttgaacccaggaggcggaggttgcagtgagccgagatcgcaccactgcactccagcatgggtaatggagtgagactctgtctcaaaaaaaaaaaaaaaaaaagtacatattcagtacagctgcttttttctccctgtaaatattttttatctgagattagttgaatccacgggtatgaaacttacgaatatgaacaacgaacaaccgtgatgcaaatgagaaaatgagacaacagtcctcatggcatttttgttaaacaagccgtgctctcagtcattcccagttacctagacaagcttaaagcctgggtggagggtaaaagctgggatgatttctgagtcacttatgtaagctaattaacgaagaagcacattctgaatgtcatcctgtttctgtcattctatctctctcaataattccatgatgataatatatgaaagacacttagtatctatggtattattctatactccctgcctccaaactcacctatgaagtttgctcagacaattataaataaagtagcttttatctaagattgagtaatcacagtggactgtcaactcctaaaattatcaaccattaaatttgtccttttaactttaatatcaaaactcttcctttcaatacattaaatgtaaataatatctattatttttaattaggaaagttttttcccattgtcaattctgatgattagagagaacactttcacattctgaaatagccaatatttcaactataattaacaagaattaatcaacaactaattatcttctaaaataacaaaaaaaaagtgaagatatgtattaggttttccactctacactagaaaatccagaaatgcagttaatggaagcatggccgccaattcacctttcgcttagtgacttggaagttgcagcttcttgggagcccttgccagttggttagatctattgatctattttctttctttctttttctttttcttttttttttttttttgttgctgttgttgagatgcagtctcactctgttacgcaggctggagtgcagtggcacgatctcagcttactgcaagctccacctcccaggttcaaacaattctcctgccgcagcctcctgagtagctggtattacaggtgcccaccaccacgccaggatgatttttttggatttttagtagggaccaggtttcaccatgttggccaggctggtgtctaactctagacctcaagcgatctgcctgccttggcctctcaaagtgctaggctgcaaacatgagccatcatgcccagccgattaaatctattttcaacagctttcagatctagtctgcaaattgcaaattttgaagagacagcaaataagacctttgcaacaagaattttcaaagta

SEQ ID NO: 915726 - DNA, 4001 bp, Homo sapiens
cttcctgtctctgaggatggaccctccctcctcacctggagcagctccacgtcaggcatgtggtatgtctcccacagctctctgtacatgtctttcatcccttctaaatgttgggtcattctcacttgactgtcttgtagttgttggaaaagctcttttgcttctctttccagtgcctgcagatgccgttgctcctcctcatcgagaaatatatgcatcttttgatactgaatagtgattatcaccttccttaatgacacatagtcctgcagagacgtttggttaaaaggattacatgttctcactctcaatagaaaacttcaaataattatatgctgggtgtaatcaagcaatttataaactttctgcttcactcttgcaaagagtcttgaatatttgctatctttttctgtccatctttttcaatgttcctattctctctccctttttaaatcaaaccaatataaagactcctggtttccgtcactgtaatgcttcttcacagttcttactgagtcaattatttcctctattaatctctctttcaggatttttccatgtctaatttgcctaaatgttaaaaaacatttagccatgcaccatattatgcagtatttttttacttttactatatttttactctatatactattctatttcttttgtcttcctgacacccagtcttagtgaaaggttgtctcatctgcagtgtctgaaaaggtttatgccaaccttcaaatttgaactagaatacacatcatgccgtttatccaatatactagaattaatttggctagcttgtgtgggcttctctgtttgcaattcctattatatcaattgaaatcactacattttcttgaggtgaaatcactatcttttaactggtagtttgaatttagctaaaaagtataagccaactttgtgtttatttgcataaaaacaaaggaaacattttcattcttaaccactaatgaacaaaatttgctagtttcctgatttagattgttttgtgtctcttgattgattttccataaatagtccatttcctttataagtttctcttgcaaaagaagcaagaagcttagcaatgatgaagacagtagatcttatccctttatcaataaaaaaaaggccgtaattgaaagaaacataaattaagttagagtggagtggtcagatttttccaagttaaacaaatatggttctaataatttggatgtgaaaagtgatagaaacataatagagagttttaagggacctttcagataatatcatcaattttctgagaaactgggttttacataacctgactttgaaaagtgttcttggtgctggccaccagctccacagctccatcctatatgtttgaacaatgtttctaaggaaacctcctttagtgaagtctcaacacagctatgattagagtgccaaattagtcagcaacattgaaaggacacatttatgtgttatgattgacatggaataatcgccacctccactatctgcattctcatcaccatcattatcacaggccctcatcattcttatttgatattctgtataattcaaactgccttagaggcatcacgtaccctgcattcctcagcagcccatcctattgggctgtggctgtgagccatgtgctctggtgactcagagcagggcccacagagcaatctcttgtcagcctcacagaagagctccttagtctcctcatggagcacacagatattgtctgagctgttgatgttctgaggtctggtctgtctggctagggaagccagctttttgagtgccacattggtgttgaagttgggcttctctgagatttttctgcacaaagggcagcgcattggtgctctgccttcttctgagcagaggcagaggcagggcctgcaaaagctgtgcacacagtcagtggtgaccgggtctatgaagtagttcacgcaaatgcagcaaatgagctcattctggaagactcgcagggtgtctgaatccatgtttcttgaaattaaaaaaaaaaaaaagtaagaatttctttctcttatttttatttgccccgatgaaaaggaaaaaaaggccagtggacaattttcctttctacttgagctctgtccaatatgtctaataagttagctccagcacaaactgagacatagtaaatgcaaacatgctggatttataaagttttccctcaatagccattgaaggttcggtccaggactccctgagaaccaagatcctaagatgttcaagtctcttattagtaaatggtgtgggatttgcatgtaacctaaacccatctcctgaatactttatctctagattactttgaatgcctaatacaatgtaaatgctgtataaatacttgtaatgccatactgtttaggaacagcaagaagattaaaaatatgtacaagtttggcagggtgcggtcactcatgcctgtaatcccagcacttcgggaggccgaggcgggcggatcacgaggtcaggagatcaagaccatcctggctaatatggtgaaaccccatttctactaaaaatacaaaaaattaacagggcgtggtggcacatgcctgtagtcccagctattcgggaggctgacgcaggagaatcacttgaacccaggaggtggaggttgcagtgagctgagatcgcgccactgcactccagcatgggtgacagaatgagattctgtctcaaaaaaaaaaagaaaaaaaagtacatgttcagtacagctgcttttttcttcctgtaaatattttttatctgaggttagttgaatccacgggtatgaaacatggatatgaaaaaccgtgattcaaatgagaaaatgagacgagagtcctcatggcatttttgttaaacaatccgtgctctcaatcattctcagttacttagacaagcttaaaacctgggtggagggtaaaagctgagatgatttctgagtcacttatataagctaattaatgaagaagcacattctgaatgtcatcctgtctctgtcattctatctctctcagtgattccatgatgataatatacgaaacacacttagtatctatggtattattctatactccctgcctccaaactcacctatgaagtttgctcaggcaattataaataaagtagcttttatctaagattgagtaatcagagtggactgtcaactcctaaaattatcaatcattaaatttgtccttttaactttaatatcaaaactcttcctttcaatacattaaatgtaattaatatctattatatttaatttaggaaagttttttcccattgtcaattcagatgattagagagaacactttcacattctgaaatagccaatatttcaacataataattaacaggaattaatcagcaattaattatcttctaaaataacaaaaaaagtgaagatatgtattaggttttccactcaatactagaaaatccaggaatgcagttaatggaagcatggccaccaattcacctttccccttagtgacttagaagttgcagcctcttgggagctcttgccagttgattagatctattgatctattttctttctttctttctatctttttttttttttggtggttgttgttgttgttgttgttgagatgcagtctcgctctgacttcaggctggagtgcagtggcgggatttcagcttactgcaacctccgcctcccaggttcgagcaactctccagccgaggcctcccgagtagctggtattacaggcacccgccaccacaccaagataatttttttgtatttttggtagagacctggtttcaccatgttggccaggctgatgtctaactccagacctcaagcgatctgcctgccttggcctctcaaagtgctaggctgcaaacatgagccatcatgcccagccgattacatctattttcaacagctttcaaatctagtctgcaaactgcaaattttgaagacacagcaaataagacctttgcaacaagaattttcgaagtaa

SEQ ID NO: 915727 - DNA, 4001 bp, Homo sapiens
ttcagctgtgatgtagctcccctctggcagagaaaagggcagattcccaacagacaggtagtgacctgatatccctgtacccggggattggcactgagctgggagccagactcccacagctcaactgcaggacccatgagcaggcctagagtgcagcctgaggtttggcactaccaagaccgctgctgggacctagaacatgtgctgagcctaagacttagtgaggcagcaaggaagtggggcccacacatgtctgtttcagacatgaacagcagggccaaggcaacacggacaccagagaggtaggggaggagagaaatcccaaagaggtctcagaaagctggtatcgggtcagcttaggccaccaagtgaggacacactcgttgcataagcctgaggccaatgctaagcaatcctctgagggttaggaagacttcattccacagctcttgtccagggctccaggcaacttgaagctggggtccgagctctgatcccaacagagcaatagcatccactggaggagcctgatgctcctccgctagttccaacccgtagacccaaagctggacagagcttcactgttcatccagccaattccccaccacacagatgatgacatggaggccctgggacagggaggagcttagctaaaatcacatggcccttgtataacataggtgataccgtgaactactaagcagtccctgattacctctgtagccacaggtaagatgctctacctccctatgcctctgtcagacactaagcaacgagaaaaaacactctagttgtatcctctggcaggctggacatcctcaccaacagtcctgccctcccacccccgggcagccccagtctactgagcaccaggagcaccagctaaggcccccaccacacagcccctgaaggcttcctccaacccaccactcagagcagcaccaccttcaagaaacatgttgcacccaatccccaaatacccagaccctgctagaaagacaaatttttgtccaagtcacccctaaagtgactgctgcttctgccccagctgccagcaggcttatctgtggccctgctgccgtgattagggcaacactgggagagaagtcagagaagcgacaggtgagaccaccacaggtcccagaggatggcgcttaccaagcgcccaggaacacccaccctgcatgctgcagccaggcgggctgcaaggcctaagcctcggggaatggatactggatagggtaaggggagcagcctggatcctctcctcctttctctgatgcatcctcagccagggctgcatttctctagctcacctgagatactcctgcaagaaagagcttggttgactcctcctgtttctgtttatctcgaaggctctgcagcaattttcccaaactgaacagcaagagggagacctcaaagaggcgactctcttcctagctgcatctccttcctaatcctctgggtgccttggaatagaagctcagaaggaagaaaacgacattttcaactttcaggaactagctctgtcgccctctgcacagctcgggagacagcactctcagccttttaggactccatccaaaaatccttcagccctccatgttccccaaaatgacagtgctcatgtgtggctggaacctgccccgatccggcagctcatttaaatagagctcatcacaacaacagtgttggtggtgaagtgagtagctgcaggaccctggggaccccctgtttatacgtaggaagaatgatgcaatctgggtatcaaaatagcaatccagaatggaataacaggctcacgcagcagcggtgcctgcacagccagagctcaagttgacacactctgtcagccccacactgctgcagcacgcagatgccaggcacacactctcaccgcatcattttaaaaaacagcaggagcccaagatatccctccatgcccccggcactgaaggagggtgtgggggggccttcaacagacattgaaatctgtctcctacatactcacctgctcctgccacttcacctgaagtccttatcctgtgacgtcacagtcagttgccatagtgaccaattgtccgtcacaagcagaggattaggacttcggatggagaagacacacatttacgatgcacaaaggtcctgggaggtctcccttggcagttaactctacccaccaggaagatccagtcacacacaagcagggagggaaaaagggaagaatgaacagggttgactggaggagacattaggatggggcaagactacaagtacagcataatttcaaaagcacagagcaaccagatgagggggagtggcagggatgtgcttggaaagaccggaaggagagtaagctcctgaagggacctgaatgctaagctcaggagcttgaccttcatcctaaaataaaaggcagcccaaaaagtttctggagagtgactgagctgggctttatgattatcttgatggactgaacacagggaggtcagggtagttgagcattaatgggaccctaaataagggtaaaaatggaaaaaagcaaaagaagactcatttcaaagagaactgacaggacacaagcaaattaggatgttggggctagtggtggtgtgtgaagaacaaggaatcaagtggaggggctgtcatgaacagaggtaggtaacaggaggaagagagcagtggccaaatctcatgttatctataccttcctttctctggcatccttgccctcttaatatcaggcctcattctgccttgcctggaccagtgatgccccaatctggagagcttgttagaaatcctgaatctaccaaacccaaatctcttgtgtgtgggtgtgggactgggaatctgtatttttagcaagcatcacaaacaattcttaggcattcagaccagcactggttcaaggcccagcaatcaggaaccaatggcctggacagctgcggttgtccagcaggtcttcctgtatccagtcctgtctcctccaatcattcttctcactgggccaactgaatttgtttttttcttgtttgtttgtctttgtttgttttgagacagtgtttcattctgtcacccaggctggagtgtggtggcatgatcatggctcactgcagcctcaacctcctgggctcaagtgatcctcctgcctcggcctcccaagcagctgggactacaggcgtgcaaccagctaatttattttttattttctattttttgtagagacagggccttactatgttgcccaggctggtgttgaactcctgacctcaggatatgtgaccatattccactgatcaaaaaccttcaatggctccccactgtccacagaatagcttaatcaagatccttcacaatttggccctaaatttcctttctgaacagaatccccacttctctccttcaagcatcccatactccagccaaaattaactccctcctgtttctaatatttgccttcccctcccctgcgtgtgcctcatcctaacactattccctacctgggagtcccttgcacatttttctgactctgcctggttcctctacagctattcctacttggtgtcacctacagattcaaaccacccaatttccccagacagaacctaaaacaggggtcagaaaaccacagactgcctgttcttgtaaataaagaatacagtaatgcccattcatttccatattgtctatggctgccttctgcttttctgctacaatggtagagctaagtagttgtaacagagactgtatgacccacaaagcctaaaatatttactatctagccttgtgcagaaagtttatgacatctggcctaaagcaacagctccttaaattgtgctagcctcaccctttggagtttaattctgattacggggattttgcttgttccaagcccacgtccatctttgtgaactctaattctgataactgggtcacatctgagctggaccttcaagtttgtgtaggatgtttcaagcaagaaaaggcatttcagg

SEQ ID NO: 915728 - DNA, 4001 bp, Homo sapiens
gatgatcatcacacccatattgatgaaatcactacaccagcaagaaatctgagatttttgccagggccacatatgggcatggaacttggtcaatggcaggctcttggctcagttggcaatatttattcattcactttgctagtttgtgttaccagctagaatctatacaaggaagggacatgttgatcctagttcctgttgtatcctcagcacctaaacagcacctgcaatgcagatattgctgagtaaatatttgttgaatgaattaaccagctagacataggaaatagttcctaaacccaaaatccttttagcatttgtgaggtaaattgagagcatacattaataataaaagcaagcactctttgagcagttctatgatgtgccaggcactgttctgagcactttacatgaattaagttggtttatttcacaaccctaggcagaggccattattgttctcattttacagatgtttggcttggggctctgccatctatcttgggcaaatttcttaacctctttagctttaaggtataatacaaattcaagaggagagaaaaatcactgtggtttagcgcagtccagtagcaggaagcaggaagcagagcagtaaatcttgcaggactctgatatgccattggcagggcatgccttctcactagactccctgcctcctgcttttcttcctcccactatcactaccaaactgtgggatccagtatcctaaaacctcattttggtaaatcactaacttactaaataatctatcctggctcccggttaacaagatctctccttgaaacagcacctgtgcccagctaggcaaaggaataaacttccacacactcccgcaaacccctcgtccattcaatctacctgacttgggtgcctgctattctcccagctgaaaatgacttctacatgatcctgcctttgacgtcatttgccatgtattcgtctattgtcttacttcccatactagaactttttcatgtggatagggtcattgtctgttttgtccatttctatttccccagtgccaagaacagtgcctcaaatacttgttgaatacgtgaaaactaaatgtaaatgttgagttccaaccgatagtagattgaaagtggaggatgtgttaatatccttagctaagtcagtagagacattaagagacaccatctaaagtcaataaaacaataaatggaagttgatacccattatttaaagctacaaatggaagacctaaaatagcgatggaaaattgacaagattgtggcagtaagaaagtaaggcaaagaaatatcaaaatgataaatccagaaatacagtggaacgcatattattttgatttagggtgctaaaaacatctaaatggggacaaactaaaagtggcagcctctgcaaagatctggggatgggtagttactgctcttcaaaataagacctgctttaatgtttgactttttattatacatgaattactttgagaaaattcaaataattaaacgttcggttgctttgactgtgccttccgtagggtacagcgagagtctgagaagggcatttgagaagggggcggggcctggaagacttccagttaggaccccagcgggaagggagtcgaggggcgggcggtaacctccggagtcagggagcagctcctggcctggccacagggcgttgggcaggtccccaggacagcgggcgggtgggggtaaagtgagcgtgcgggatctgacttcagaaaaggcagagttatctacccacctccctcctcggcccggactggcgcttcgcggcggaaactcaaagtgaagaagcctggttccgcagcgtccaatggcccagcgtcagaagctgccgttcccggcagctcagcacttagggccagagagcggcagaggcccagaacccaaagcccggcagcgcaggcccagtagcccgcagctcccagaatactacacccggctctaggccccgctcgcgggacggcagccaatgagcggccggctgggcccaggttggcttcgcccagggggcggtgtgtttgtgggggcagccaatcacaggcagggaccagggtacccctagccaattggtgatgagacgggggtttcggcgcttctaggcatgtcaatgttttttctctacttcctgggtttttctggtcccttcaccgactcagattcccttaaactgtagagggttctaggagttagttctaggataggtcaaaggattgaggctcccaaatgatgccgctcaggcactgcattaagagaggctcaggtggctattcatttgccagtttgacttgttaaactcagaagcctgagattggccaagtctggttctgtgacccatcttagcaaagggttgggcgcacatatggtgtggactctgctgttcctggcaagattcgcgacctctcatggttccaggctttaaatactgggttcttaaacaaaacaaaacaaaacaaaacaaaaccctctcttttttcgtttttacttcagcaaccagcttgtcatcactattgccacaatccacttttagagtgaaaaacagacaacagagaccgggagttgatggagaaatggaaaccctggtcaaaaattgtcattaaaaaaggaaaaaaaaattaaacaactggtatcccttcctcacccaaacacatagacacatgcacgcacacacaaaaactgttacttaagacagtgatatgggtttttctttgtactcccagggccttgtccttctcttgacacttaggttttaataagcaagtgaaggcacctcctatccgcatagaaaataaccaggaaatcttccaattgaagctcggttccaaattatataatatcttaattgttaggacagatactccagaatgctcatgccagtgtctgagccccggccatggttaaaattctgaagggtgaggcccagaaatttcctgcaacaaataggtctatgagaaaaaacaaaagtatcttaggtctgagctgtaccctctgtctcacccagttttggagaaatggctgctctaatagaataatgaatggattaattgaaataagccattttaaacatttatttaacatcaattttcttgacaatattttactgggtgctgggattacaactatgggacatatagtctctgcctttaaggagctgaaggtcaagttggttgtactgctctggaatctctgtgaagttaaaacagttaatggggagatcattttcatgtgtaaggtgcaatttgtaactatgacggactgtcaagaaccctggcaatcagggtagctgggggtgggggcttgcgttcatgtggggaaggctggagagagggcttttgaagacagaccagtttacttccaaggcatagaagctttcctttacagatgtcttcagaatgttttgtttgtttctttatttgtttgctgtgagacaggtgtgtccaggtgaggctctgtcgtggacaaattccacagctgtagctgcagaccccaaccctctgccctgaatccaggatagaccaggacaacaagatgagtggctaactgtaggatggtgtccatctgtgctctaggggaggagtagcatcaaaggagaagcaagaactgagaactgtttggggcactgaagaagtaggactaaggaagagttagggggttagtacaaatctgaggcctggttttctggaaagagaccagagactgaccttattgcatgtcatacaacatgcttgcttagagacccctaatttattttcttctcttactctttctgaggaagcatgagccacaccctcagttagttttgtataatcttaggcttgatgagaatataatcttagtcttgaaggctttaaaggggaagaaatagctgtctgtgttagtggtgtgtcagtcagcaggagaacctgctaggggtggaaggaggagggtaggagtatagcctagaccatgagtagataccccgctccaccttgaaag

SEQ ID NO: 915729 - DNA, 4001 bp, Homo sapiens; identical to SEQ ID NO: 915722

SEQ ID NO: 915730 - DNA, 4001 bp, Homo sapiens
cctcagaaaatccatctgaaatgatcaacatgatttttttgttcccctttggcattctcacagtatcacatatcaattattattattctctactggtccctgtttatatgtccccttcagaagtgcttgagatctttgagaataaaaatgttgtttaatttacttattcagttttaggtacttaattcatatttgtgaatggattatataatcctaaattcttacctaagcattcacattctagacctggccataagtacatttatagccatatctctcaccactgcctgactctttttcatgaattaatcaagaggagttactcacatgcccaaataattttaccgcttttctaactttcagctttcttattcctaaaatcttccaacattatcatcggtaaatttctaaattttactaacacattagcatcagattgattttcacctagaagctatttttttttagcatttcatgtctgctaacctgctgtagaaccacatttttaccttcattctagtgatcttacatgccacttttagcacatttcttgtcactgctgatgtattattggtagatactgctttattcagaaaaatcaggatatttttagttatatattggattcaacatgaaatctcacactaaagattaagttatattgtagagaaacacatgtaggtcctttttctgatcatcctattcaggggacacatggttaactcaagttcttctcccacaagtcacattttctattccaaactggttctgagagaaatgagcttactgcttacttcccatgttccgattatgttggtctctctgtttagatttctttgatttttctgtttttttttccagatggacttcatttgaatcaggagtttcttctgaaaaacaaaactataaatctgagcactagaaaagaaaatatagtatatttcagatactaccaaaagaggtacagacatgggacaagtaaagagtgcagaatgcagacatgcaggggcttttcttaagggcactgattgtcaagtccgagaggtcaatgaaaccaaaggtagaattcccaaatttagaaaacaagacccattatcttagaagtctggcactgaaactgatacaaccttgtcaattttcagaagtaactcttattttatatttaattttaaaatgctagccctcaacttatctacagtactattggagcatactgaccagtatttattagaattttctataatagattcattgcaatcatgactgtgttagccaatgactatcatggaaactagtgattaatatagagcttcttacactgaaataccagaaccctaatgctcatcaactttatcatcattcttctccctcagcccaagagaatttaaatttcaggtgagcagggatgtttggtttcttcagtgctttatcttagtgtctagaacagtgtctaatttatggtcataagcaattctgtttgtttattgcataaaattattaataacaataatgataagtatatctttccgtattacctgtaggattcagggttcttcacatttcaaagtgcaatcagtagcatttacttaccctatagtattcatcagcctcccttgtcatatagtgtttgtgagtagcatgccttggggattgagagcatagaaaacacagcaggctcctatcagtttcacagatgaggttcttgatttcctggtgtctcctacagatcagcatggcagagcttgataactggcaggggactgattctcttgtaggaataacttgtttctcagcaaaaataatgcgtttgaagtacatttgctgtgatatttccctgcacacagggcagcaattaggagttagtgtatcttcccacaagaggcagagacagggactacaaaatctgtgcccacaacaaatggtgacagggtctgtcaaatagtctgtgcagatcgagcaggtgagctcactggtagaacactgcgtgatagcagaagccatgtttctgaggaaataaaaggaaagtgtcattctttcccccatggcatatgaaatgagcttaagacctttttttactaatttgtgtatgcattgtagcatgacaggccatgttttctgaaagactaaaataggatggagagacacaaacagtgcaacagattgatcacatgtcctctttcttgacaaccttggcctatagcactattttccagttccctaatagaaatccaatatttttcatatctgttatctctcctacaaaaacataaaaattacaagtcctgggctcatctgtagccacaggcagtggatcattattttgtccaaagctatcaagatttccccctttttttctctctctcttattggtcatcataagacacgtactccaattctggccaagagaacaagaaagtagactcgtagaagaattctgtaaaaggtgttcttgctacagaagagacacatagaagaaacaattgctttttctgcctctggacattatttggatgcaatatttgtttgtgtaaccactttgtggactcatagtgaactaatctaagaccaaagccaatactctaaggaaaacagaaaagtggaaagaaactgcatccttaataatacaatagaacactacgtaattctggagaggccaactaatgcaatagaaggaatggtggacaatcatcattttactgatgccataaaaataactgaatcaggcaagaatcattaatggataataaaataactaagtcatagattttgtgaaagagcctatttacatatcatcaaagttctaccccacatgtcagctctatccacagtgttattgaggcataatagataagtgaaagtgtataatttaatgtatacaaacagaggtagatgactaaggacacaaaacacctctgtagtatttttgccaaaaacattttacctgcatgtaaccatgggaggaaattagataaatgcatttgaaaaacactatgcaaaaaataaaactggcctattaaaataattttaatttctaaggagaaaatgtctggaaacagctatatagcaaagataactaaaagaaataaaaaatctaactatgatgtaattatagtatcattgatttgtacctggtttgaaaaaagtaacagccgattaggacatttttagaacgttcagggatatcataaaacctagtagagtcttatggttgcagctcagaaatggagaaggttgaaaatactattgccacctccctgcaagaaaaaaagtccgagagaaactaaagattaatgaggtttagtttgtttgtttgctttgtaaaccattagagaacagaggtaacaagacaactcaatcagttctggatagagacaggtacagcactgagaaaaacaggacccatgcatatgtttatctggggcagattctaccaaaggccataaaaacagaaaataaaccaaatgattttaatttactgctaaaaatcaaagctgggctagagtgagtgtgcaaagacccttagggtcacagacatagaagaatcctcacccaaagggagacttttccaacagaaatgccaagaggctctcacagggaaaaccaggaagaatcaagagaaattttcccttcttgtggtactggccggaagagaaaaatggcagcaaacacatgaaatcaactgaaatatccatcaatgatagaccaggtcaagaaaatgtggtacatatacaccatggaatactatgcagccatgaaaaggaacgagacaatgtccttcacagggacatgggtggagttgaaagccattatcctcagcaaactgcaggatacagaagaccaaacaccacatgttctcacttataagtggaagctgagtgatgaaaacacatgaatacatggtgggggacaacacacactggggtctgtcaagggtaggggttggaaggagggaaagcatcaggaagaatagctaataaatgctgggcttaatgcctcggtga

SEQ ID NO: 915731 - DNA, 4001 bp, Homo sapiens
aatgccatcagcccctgggaacaggccccacgccctctcctccccctcctagggggtgtcagaagctgggaacgtgtgtccaggctctgggcacagtgctgccccttgcaagccataacgtgcccccagagtgtagggggccttgcggaagccatagggggctgcacgggatgcgtgggaggcagaaacctatctcagggagggaaggggatggaggccagagtctcccagtgggtgatgcttttgctgctgcttaatcctaccccctcttcaaagcagagtgggacttggagagcaaaggcccatgcccccttcgctcctcctctcatcatttgcattgggcattagtgtccccccttgaagcaataactccaagcagactccagcccctggacccctggggtggccagggcttccccatcagctcccaacgagcctcctcagggggtaggagagcactgcctctatgccctgcagagcaataacactatatttatttttgggtttggccagggaggcgcagggacatggggcaagccagggcccagagcccttggctgtacagagactctattttaatgtatatttgctgcaaagagaaaccgcttttggttttaaacctttaatgagaaaaaaatatataataccgagctcaaaaacactgtgtttggtgtcattgggtcaagggttggggatacacacggcagaattcggaaacagggtatagatcaacaaaaatacacagtcataacaagaaaaactggcgcctggcacaatcaactctcagtttcctcttcactcagcagcatgttggggatcccgcggctgatggggaacatacgtccagattccgggcactgcagggtgccctctatcacttccacctgcgggcagggagggacagagctgagcactggcagcctcagtgcgggaggcaggtggcccgggaagcaagtgatgggccgcttctcacctccagcagcaggtggtgcatggtcctcagaaactcctcattctcctcatatccctcaaccggccctttcggcacctggatcagacgcaactgtgggcaagaggccaaaattatctccgggcatcccgaactcccgcctcagcccggctgaggtgtgcccgccccgcattccccgggatatgctggggcggggtaaggatcctcacgttatcggccgcctccaggaacgccgaccactccactttaggtatcatacgcgccacgaagttggggttgaattccacagggcagatacggacctcggtggcctgcagggcggaggagtttaggcaagcactggaccccggcccaccatcccgcccgaaaagggaagactgccgccggcgggtacctggaggcgcagggggaagccacgggaccccaccccccgcacatgcgagctcagcagattgtgggtaagcagtttcatgtcgccgcacaaactctcgccaggccggaaccggaaaaaggtcgtcctccgctgcctcacttccggggatgctcctctcgatgctattggatagccaggagaaccggaagtggcgaacttgctggaacttctcgtgtttgtgggagctgaggtaggtaggtgaaagacctgtcgggtcacgcgccgctaccggaagcgtctcagcaggaggttcctacggcgcacgcccagcttttttttgccacaaattcttcgtaagatgcaaatcatatgcaaaatagctgcaatgcaggagctctcgttgaatgcaaaataaacacattttactcctacacaggcgcctaacaccgtcgtcctctgtatcccactttcggttaaggggcagaaataccgccctatctgtaaattaggcccatggaagccgagccgcacctcattcctatatgcaaattagctgctccagtgccgaaagctccgccccatttgtagttgcgtcggctgtccagcacccagtgcaaacgaggcgtgggtcccggaagctctgttctgcgggtggccgctcgcgcctgcgcagtggaggcggcccaggcccgccttccgcagggtgtcgccgctgtgccgctagcggtgccccgcctgctgcggtggcaccagccaggaggcggagtggaagtggccgtggggcgggtatgggactagctggcgtgtgcgccctgagacgctcagcgggctatatactcgtcggtggggccggcggtcagtctgcggcagcggcagcaagacggtacagtgaaggagagtgggcgtctggcggggtccgcagtttcagcagagccgctgcagccatggccccaatcaaggtgaccgctggcccggccgggcctgacatcccccactacccccatggcaatccccgtcccgctagtctgagagtatcgctttatttcctgcctgccagacccctcccctccgcccgcccggctcatcccttcagaaggccctcgtggctgcccacctttctcgccaatcgtgggggcctcacctcccgggacagtcccgaggcattgtgttttttgttttttgtttttttttgagacggagtctttctgtgtcgcccaggctggagtgcagtgacgcaatctctgctcactgcagcctccgcctcccgggttcaagcgattctactgcctcagcctcctgagtagctgggactacagatgcgagccaccacgcccagctattgtatttttagtagagacgggatttcaccccgttgttcagattggtctcgaactcctgacctcaggtgaaccccccccgcccccccccgcctcggcttcccgaagtgctaggattacaggtgtgagacaccactcccggcctgatttcccctatcttctgaaacagctgtcccttagcgcccccgcgggggcttaccccatcccactccatgacctcccctccccccatggcgaattcccacctttctgtctttcactcacttcctggaaccgtccccagggccttggaccttcccccttctcctcccaaaccttgtgagaccccattccctttctacttcatcctgctctcaacctttgggctcctcagaggccctcacctctgactctctctccctacccactctggtcccatgaagccctcaagtactctggggatggatccttcccccttcaaaagattccttcttttgttctacacctcctgggtgtaggggcctggacaccctcccccaacgttccacctgccgctgcccttcctcttcctcctcctgagggtgggaccctcagacctggccaagatcctctccctccatgttgtcagggactcctcctcacccccaaatacagccctctagcccctgtccattttattccactcctttcctgtaacctagacagcatgttatgcaaccctttgcgacacatggggaaaccttccctccctttctctgttgtcaccaatggccccttaagaggagcagggccaccttgaaacttggaggatatggggtaacccagtgggagcgggcagggagggcccttggaaactgacagggctggagtatcctgctgggtttcagccccggttcctgcaggcacagctgccaggctctctgttcaccttcctgcctctggtttgccccggctccctcaccccccttaccctggagtccttccttctaggtgggagatgccatcccagcagtggaggtgtttgaaggggagccagggaacaaggtgaacctggcagagctgttcaagggcaagaagggtgtgctgtttggagttcctggggccttcacccctggatgttccaaggtgaggcccttccccttctgaagatcaggacctgggatcttttgtgttgctcttaagtcctccacatagtcctgataggactcctaaaaagcatttcagtgccatcacaaaacaagtagagctgggtagagctgggcgcggtggctcacgcctgtaatcccagcactttgggaggccaaggcgggtggatcacgaggtcaggagttcaaaaccagtc

SEQ ID NO: 915732 - DNA, 4001 bp, Homo sapiens
acataaaaatatcttctaatttaacacatcaagtgtaagatttctttgagggatgatgaaattgtcctggaattagatattagtggtggctgtacaactttatggatatattaaaaatagtgcattgtacaagttaaatgggggaattacgtggtatgggaattatgtcttgaacttttaaaaagaaaaacatatacataattgtaaatgctcttaacttgcacagcacacagatgaatgaaaccagttctaactattctcctttatctttgagaaaagttagatgctccctttactgcggctcacctcttacttcgaaagggcaccgcagcagggcttgaggctgggcagccctgacacagcacccatctatcaggagggtctgccaggcgcctatggggtggaatcctccctccaactaaagctgtttatagagctgagaacctcgggaaaccgcttgcgggtggatgtgacaagtcaggaaacttgactacccaatcacccaaaggggcaatgggacagaaatgctatctgcccgctgcacatgtggtcacagcggtgtcggggaagcggagtcttttcttctggagtccactctgcttactccctacctcccctcccgccacccacccagctaaaaaaaaaaataccctagattcataaacaaaagcttgcagttacccacagcccaatacaaacgacccgacgccctcacttctatagcccgtgagtctcccagcccctaacaggctcgtctccccagacgccccgggtgaaaaggttcgcgccgccggtggagagtcctattggttctatttctgtcttcactccaaggccccaggaccggggagaggtcctggtctaactttggctgtcccacggtccaaggacctcagcgctcagcccgaaacgctaagccaagcgtggagaccgccgggcgcacccagcacccaggcagctccaacccttggagttctagtcatctctcccccacataggctaagagtcacccgggcgcacatctgaatcagccccctgttcagatcccgcctgttacgtagcgatcctgtctcttgtagagcgcaggatgaaggggtctggagaaatcgaccacccatctaatcacctgcaatggtggtgttactatgcggtctcactctcgtgggcaaacatatccatgcgtacctacgaggagcaaacctagacaaccccgcctcccccactccccgcgcgcccctccactcactcaggtcccagccctggctctcgcggacctcccagcaccgtcctaggaggtacacacgcgggttcaggacgcgcgcggacggactcggccactcctgcgagcgcacaacctccctccgcgcagcccgcgcccgatccgccccgcgtcgccggcactcacaagcaggggtagtagccgtagcaaggcagcggggcttgcgggcagccgtcttctcccagctccgagtccatgagcagatagtcctggctctcgttgcgccgcgcagcggctccggcagcgccccggggagaactgcccctccggggcccgaacgccgggctctggctcatggcgggaacgcccgactggcctgggccccgctcccgggggagccgagtgggcagttccagcggggacccggtgcggagggttcgcgtcagcggccgaactggacctgggcagaccggtgcccaggggacgacggtgaagcagggggtgcagacgcccgccgcaagtggctcgcccactggcccggggaaaagtcaccacttaagggggtgcaaagaggatcttgacctgagcaggtcaggccgaggagaccccgcgaggatgcgtctggggcgcccgggcagagagggcacaggcggggccgctggtggtagcgaagcgtaagagcggagagcaagggagacggagctgaagagttactatgtcaacagagactctccagccctcagctcccgccttcatcccccgcactctccgtcaagatccccacctttaaagggatccgagcgacgttctagaaagcagccaaagcctgtcctgtagccacaactttcaggaggcggtatgagcctgaactaggaggagccaggcacgcactctttttttcccctccactatttagttggctcatttagtaaggataccaactgcggacttcgtaggaagcttcctttaagaaccactctcaaagagccaaggaaacctgttccttaaaagggacacgagcctcttctttctccagactgccttcattttctttggtcattttctctcttaccctcaactcataaagttattatgactctgctttaaaaatgaacaacgttctatgttccaaacgccagatgttcccagttcctgagaaaaccaacaaaaataggcaagcattttccaatgataccgataaagaggccaacaacctgcttacttcagagaaaaaattttccttccgtcactgcgaatgcaagaatgatttctctgccagatgtttcccacgtttccaagctgttttatttttaagacttagttttaaattctgattaatatgcatacgtgtgagaagtaaaaacttgtcaacaaggatgaatcagtatttgtagacctttaagcagtagtagccaattaagaatccattcattaagtcaacaaatatttaatgaatgccaactgcgtttcaaatcatttcagaattcggaggcaaagaagcagatgaggcacctgtctgccctcatagagctttcgtggcagaaagggggaccaattaaataagcaaatgaaaaaatatcaaggacaaatgctacaatgaaaataaaacaggttgatgtgatggcagctggtgaatgactacttcagatgagatggttaaaagaggcccctccaaggaggtgctcgttaagttgagacatgcatggcaagcagccagccatgaaaagatcagaggcccattgcaattggatgaaagaaagccagactgaaatctgtctgcaaaggtgcctttgcttcccatgaacaggtggacaacaaaatgaatgttggaagtgtgggaaaatgcaattgatttgatagaagggaaaagagctcacacatttagaaacttctgagtttgcctttaaatttagaactgaaactcagagagagcagaaaccactgtgtcctgaggatccagcttcgtatttgacacaggtgtgtagggtgcatgcatgcatgcttgggtgggtgagtgggtgggtgggtggatggatggatggatggacggatggatggatggatggatggaaggaatatagaaaaaataagaaaatgctcttggccctggaaagaacattttccctggggaaacaaacaacctgcatcattctgaagtctgttctttctgatttaacagccttcctttttgatctttcaacatgtggagccatgatttaaaattcttataattttctagttactatacctagcaataagatattcttcctaaaatttgtttgtggcaactgctatctgtaagtattcattagctttgatgcttgaatgaattaatcaataaacgtttagttaaacagtgccaaggtaatctctttggcaacaccaagtatggggaaaacattcatgggaaaagtaatattcaaaggttttctacccaattcaaattctgtgagttaaagccaaattaataaacatttgtagtgtcagttgaagtgttaacctttcacataaaaagaaaaaaaacaaaaactgagacagaatttattttgctgttgttacactgtttttcattcacaggtaacaaccttcacactgaaaaaattactacagtaaacttattctgacatcaatttatcatgtggtaagacatgttttcctctgtttttttttttttttttgaattattgtgagtactagaacaacaagcccagtcatttattgagtacccagaaggaataaggtggtgtacaaatgttagaagattctgaaagagcttatgaca

SEQ ID NO: 915733 - DNA, 4001 bp, Homo sapiens
gaatgcggcggtgcaggacgcggcccagcgaggccatgccgacagcaaccacacggaccttggtggacgtgctggccagcgagtggtcgcgcacggcctgcccgacatgcctggccaggcccacgcggagggcactggtcaggatccaggctcctgtggggatggaagagggcctcgttgtgccgcacgccccaggtcttccctagctggccccacgccctaacccctaggcccaatcagcagccagttacctgggagccaggggtgggtgctggggaatgcctcacggtggggtggggaagccgaggcccagagagggcaaggcacccacccaaggctgctcagcagcagaactggctgggcccagaacctgtgaagtggcacccccaccccacctggagcgcacaaactggggtccagtccccccaccgtgctccctccgggacacatccgacacaactctgtccagctgcctctgctgggtgagaatcccaggatgttttcccaaatgacaaagccctcggcccttgtctggctggaagatctctttgggtttgccacagtcatttagtgagggatcctgaaacctcaagtccttttctcctgggtgttgtataggccaagctgcctcaaaaaacagcccagccattggactctggcccctgcagctggcggcccgactgcttccccaaggggtcccaccctgtatacacccgggtgctctggtcccaggtgagtgggagcagggacatctcatggcggcccatgggccctgctagtggagggggcagctctaaggaagggccaggcccagctgggggaggtcctggtccagtacgtaggcactgctgcacctgtgggtactgcagaggacgggctgagagtttcgggaaatgttctcgtgatggcctggagagtcagggggtctggctgccgtgtggggtgggagcattgcctgtgccgggtggggggacagtcagggggtctggctgccctgtggggtgggagcactgcctgtgccgggttgcggggacagtcagggggtcgggctgccctgtggggtgggagcgctgcctgtgccgggtggggcctcacctgtgctctgagccgccttcaccagccccttgcgcagcacatcccgcagccaggacttcatggcgaaaggctgctcctcacccaccagggacaccaccaggttgggggccggcaggtgccactcagcaagcagcaggtcaaagagcacagacggggccactccgctcggcacccgtacaaactgcaaggcaggtctgcagctcagggctttcggggcacggggcatgggagctgctgggcattggggggggctggacacaagggggcactggggaggtgctgagcatggggggacactgggcactgggaggtgctgggcatcaagggggctggacacagggggtaccggggaggtgctgggcattgggggcaggtagcaggaggagagtggcccccaatatcccttctgggacagggccagtcctcccttgacctgctgtgtgacctgggcagtcctgacccctctctgggctggcatccccctcagtgagccgagggcgctggacagaggtggggccctggatgcacttgaccttgcacctccaaatctctcggggggacttcaggggtcccggttattgcagggaggtaggaggccggccagagccactccttccagctctggaactctgcctgtctgggggctctgaatatggccccaggggagcagaccccaggggtgaggaggaccctggcactcagcttccagggaaggaaatggggcctcatgggttccaggtcaaggcggacatcacctgaggcctggggcctgcccttaccttgcctcgcttcttcccagaccctccaaagttgacctcgcccctgtgcaagcccagctcccgccggtcttcagcatccccggggcttccgggacgggggccttggacatcctgcatggtggcctctagagctgcagggataccctggcccttgagggctgagaaggcccatccccacctccctcccctcagggggctggctctgctttcccctgggaagcccctctccagccaacatgcacaaggagacctggggactgcccccaggcatctctgccccagggaccttctctccagccaggccctgcccagcgaccccctgcagctccgacactcgctgtagcaccgccccaaccaagctccttcccaggtgaggatgggatgtgtggggctccgctgtcagcgcctggttcctctactcaccccactcagggcacctcaggttggccacacctgcagacatttctccagaggccttttgtggggatgacctggaaactccgaaagactcagcagaggccttgcagtcccctggccacacagcccacccgctcccaggacagggatgtggagaccctgggtgcacctgggtagaggtgaaaaggtgagacaggtgccctcagctcaagtgcaggaggcggtgtggacgagagaccaccttccttgcccaggaggtccaggaggcccaggacacacagagagaggaggccttgccccggcccacacagcatcagcagcagagctattcccgtggcgctcccacatcagcaagcgggggtagaagaggccgcgtgcgcctcagccctattccctcaaccctcatggggctcatgtctcccagctgcccggtgaggtcgggcatctcagcccctctctatgtggcagggatccaaggatcggcactggcccctcagcgccctggctccgcccctgcccacagcctcatctgtcagctgcccagccccagcctggctgacctcggtctggcttggtcccacctccctccgattgctcctctgaaaactcaatattggaagctggtgcttgaggacaagccctggcaggccgagggcacctgctcctctgtctgccctcctggaaccacgcgtcgggtcacaggccgctgggcagaggtctccgtgggcccccagccaccctaccctgtccgacctggggctacctggcagctcctgatcccacagggctgtcccttggttctcctgtgcccaccttgtacccaggcgctctgggctgtgtccaccacagaagccctttgtgagaagacaatggaccgttctgtaaaaaccttcatttcctagagaggggcccacctgtgaccccaggaggggatacaggagttggggggaacttcagagatgagagggagtgtgtcctgggacccctggggctggctttggggcagaggctaaggccaaggccctccccattaggcctctggagccagcacagttactgcatccccaaacaggtatgtccaagtcccaaaccccaggacctgggaatgtgacctttggaaacaggccctttgcagatgtattaagatgtaagtaaagatgaggccatgctggagcagggggagccctgattcccaggttctgatagagaaaggggacatttggacgtagagacagacgcgcagggaaaaacaccctttaagacacaggggaggggtgaaggcagtggttgggtgatgtggccacaagccaagggacacctggagccccgaagctggaagaggcaggaaggatccccctcgagggcttggccttgccgacagtttgacttaggactcagcactggtggcctccagaaccatgagagaatcaattgccattgttttaagatgcccagctcaggctggttgtcttggctgcccagggcccccctgtgaggcccaagtcaaccccggcacgacttctggtgactgccagccccaggcaggacccacccacgggcctcagccccctcctccggccaggcctgtggaggcgccctgatgccctcagcaccacgtgggcctcagctgtccctgcagggtgatgcaaatcctcccgcacttctgcctccagagcaggaaccagcccgcggaccgcagagaggcaggat

SEQ ID NO: 915734 - DNA, 4001 bp, Homo sapiens
aagggcagctcctgctttgtccagactcacctgccagagccaggggtccatcgatgaacacagctatttcacaatgggaccgcatgcctgcagagacagctggagctgaggcctgggcacctggagtgcagtcagcaacctaggcagactggggtcctgggctgggggatgcaggggtgctgctccatgccggacatggggtggccccagacaagtgttgtaacctttgaaggggacctgggaggacagagtgggtgggagtagctaggtggaggggagggcactgaccactgatgataccggggtctccaggcagtcctggggccaggtgaatgtgcgtccttccctggcaggacaggcctttgagtaggatggatggccagtgcttccagaatgtaccatggactagcatcgggggcagggcctgcggtgtctccaggggcatcagctccaacttaggtacctggttgaacgggtagcagtgagacccccttcgcaggcaggggtccctcccatctcgtctcgcacttgtcccctcaccccgacctgcagggaatggccctggttggcccggatgagaaggccagtgctgggatcccccagctgcagggcgaaccgctgcttcctattggtgtccaccacgcgctgcacatcttcagcagagaagccgcggaactggggcaactgcaggagggtgcccaggggcacgaagccatctgtgggcaggcagggtgctcaggagctaaccttgctctggactgggccagggttaacagggagccacaggcaaccgaaacaaagtctgggcttggagatcgcttgggcatcctctgtgggacctttagaaagtctcccctttctgggccgcagttttttcaacttacataaaaagaggatctgcctcacggaggggcagggaggtgagtgcccagcatagcgctggcccggagtgcacactcacaccaccagctgcaccgtatcctccagggctcgccctcggggtaagtgctgatctggctgcttggctggagggggcggtcaccaggcctggcccagacaagaactctcctcagtctgctgtggacatgacaggggctctaggccttgctctcctctgtgcatggggaggaagtgcactctgtgccttcctcagggagcggtggaggcagccatcagggaggagtcgcagacaggctcacgtttctctctgggctcaagccccagcctccaaggcccctacttaccagctcccatgggaagccccagcttcaaggccccatggcgcagggcataggacagagccttggacagctgcacgtctcggtcctgaaagaacccagcggtggcccctagtctccatggtgaccctgccctactgcccatcctgaaccctcaatgacccactgcagagagagcccagagagaaaggagtgccagtggtctccaggaatagtaggacccttcagctccgccccccagcaactcccagggagcctggactggtgggagggggtggggaggaggcgcgcacctgttctcggggtctgggagcccttctacccctggaccctgctgcttcctgcctccctcctccagagaagttcatggttaagacctgtggggggcagtgacgaggggggactgctttaaggccccttccacgtccccatccctcccagaaagtcacaaagcctcaggaagtgagcgctgggtgggagtatacggctcattaagttcaccacccccaagtccctgctgcagagagggaaactaaggcccagcaggccagacttgcccaaggtcacacggtcagccaggagcgcagggaggccgagccccgcaccccagatcgctggtgcgccccgcagggtggtccgggaggcagggccgacgtgccgacggaccgggcggaagcgtcggggcggcggggacaaacctccaggatcctcgaccgcggcggacccgccaatgaaaagccgcgtggaaagggggcgggcacttccgcttcggggaaggggcggagcctgagggacccggcggctggtgagcgcccgctggaggctggagcttccgggccctggaaaggggtccccgcgcgccccgggtcggaggcagacccctgggtttgggggacatgggcatttggggcgcctgaacccaagacctctggatggtagggatgcccgggcgtcctggataccctgcgggactcggggctcctgcggggaagatggcacgttttactgcccaaggagtggtcaggggggtggagaagcgctgcggataccctcaggaggtctgcgacagagggggctagctgcgcagcccaggagtggtagtggcccccctggatgacaggcctggccgtatcctcccccagagctgccccgttcagaccatggatcctgaggtgaccttgctgctgcagtgccctggcgggggcctgccccaggagcagatacaggccgagctgagccccgcccatgaccgtcgcccactgccaggtggggacgaggccatcactgccatctgggagacccggctaaaggcccaaccctggctcttcgacgcccccaagttccgcctgcactcagccaccctggcgcctattggctctcgggggccacagctgctcctgcgcctgggccttacttcctaccgagacttcctgggcaccaactggtccagctcagctgcctggctgcgacagcagggtgccaccgactggggtgacacgcaggcctatctggcggacccactgggggtgggcgctgcactagccacagccgatgacttccttgtcttcctgcgccgctcccggcaggtggctgaggcccctgggctggtggacgtacctggtgggcaccctgagcctcaggtgagattccaggctgggcacaaagacccagacagctcaagggagctgcagctctccaccctcccaatcctcccagctttggtttcctcattccttaaagggaaaattggcctggtatttctctggaagtttgctcagggcagtccacctgcctccccactgacccctgccccagtcctgtgagaaactagaaaacacgggaggaaagattgggcacaggaagaagatgccctactccacccctgccccctgtgtatctcctttgaagctggacctctggttgtctgtcagggaaaggacaccagactcaggatcactaactctcttacactgtgccacatcagaccctcaaggccagcaggtataggcttgctggtcctgagatggggcagggggaagaggtggggagcaggggctgagcctgacctctcacaggccctgtgccctggtggcagcccccagcaccaggacctcgctgggcagctggtggtacatgaactcttttccagtgtccttcaggagatctgtgatgaggtgagtgaggttgacctggacagggtggtagacatgaagggagggggtaggacttgccagaattctacaggtctgggctggcaggaggcctgcaggcatctggccagcaatgagggaagaagttggctttgcagctatacatacttggagtggaattctagccctcagtaccctctgccttggattcttcttcttttcttttttctttctttttttttttttagacagagtctcgctctgttgcccaggctggaatgcagtggcacgatctctgctcactgcaagctccacctcccgggttcacgccattctcctacctcagcctcctgagtagctgggactacaggcatccgccaccatgcctggctaattttttttgtatttttagtagagatggggtttcaccttgttagccaggatggtcttgatctcctgacctcgtgatctgcctgcctcagcctccaaaagtgctgggattacaggtgtgagccactgcaccaggccggattcttcttcttttttttttttttctttttgagacagagtcttgctctgttgcccaggctagtgcagtggtggcatatcggct

SEQ ID NO: 915735 - DNA, 4001 bp, Homo sapiens
aatattttattgttggatcctcctcctttctctggagctgtgcttggggctactctgacactctgtctcttcatcaccagccaaggaaaggggctttcctgataaagacaagagttggttagagaaagggacacctaagtcagtctagggttggaagctaggagagaggtgagggcagaagggcacagctttcaggaacaaggaataggggctggggtggtggttctcacgggtagggcgtagctgcagggcctccttgaagtacttgggaaggaggaagccatcagtattccctggagtcagaatcaccccattggcagagcggaagaagggtattccatctgctgacagagccagagatgtgactcatgccctccccgaaggcaagggcagctcctgctttgtccagactcacctgccagagccaggggtccatcgatgaacacagctatttcacaatgggaccgcatgcctgcagagacagctggagctgaggcctgggcacctggagtgcagtcagcaacctaggcagactggggtcctgggctgggggatgcaggggtgctgctccatgccggacatggggtggccccagacaagtgttgtaacctttgaaggggacctgggaggacagagtgggtgggagtagctaggtggaggggagggcactgaccactgatgataccggggtctccaggcagtcctggggccaggtgaatgtgcgtccttccctggcaggacaggcctttgagtaggatggatggccagtgcttccagaatgtaccatggactagcatcgggggcagggcctgcggtgtctccaggggcatcagctccaacttaggtacctggttgaacgggtagcagtgagacccccttcgcaggcaggggtccctcccatctcgtctcgcacttgtcccctcaccccgacctgcagggaatggccctggttggcccggatgagaaggccagtgctgggatcccccagctgcagggcgaaccgctgcttcctattggtgtccaccacgcgctgcacatcttcagcagagaagccgcggaactggggcaactgcaggagggtgcccaggggcacgaagccatctgtgggcaggcagggtgctcaggagctaaccttgctctggactgggccagggttaacagggagccacaggcaaccgaaacaaagtctgggcttggagatcgcttgggcatcctctgtgggacctttagaaagtctcccctttctgggccgcagttttttcaacttacataaaaagaggatctgcctcacggaggggcagggaggtgagtgcccagcatagcgctggcccggagtgcacactcacaccaccagctgcaccgtatcctccagggctcgccctcggggtaagtgctgatctggctgcttggctggagggggcggtcaccaggcctggcccagacaagaactctcctcagtctgctgtggacatgacaggggctctaggccttgctctcctctgtgcatggggaggaagtgcactctgtgccttcctcagggagcggtggaggcagccatcagggaggagtcgcagacaggctcacgtttctctctgggctcaagccccagcctccaaggcccctacttaccagctcccatgggaagccccagcttcaaggccccatggcgcagggcataggacagagccttggacagctgcacgtctcggtcctgaaagaacccagcggtggcccctagtctccatggtgaccctgccctactgcccatcctgaaccctcaatgacccactgcagagagagcccagagagaaaggagtgccagtggtctccaggaatagtaggacccttcagctccgccccccagcaactcccagggagcctggactggtgggagggggtggggaggaggcgcgcacctgttctcggggtctgggagcccttctacccctggaccctgctgcttcctgcctccctcctccagagaagttcatggttaagacctgtggggggcagtgacgaggggggactgctttaaggccccttccacgtccccatccctcccagaaagtcacaaagcctcaggaagtgagcgctgggtgggagtatacggctcattaagttcaccacccccaagtccctgctgcagagagggaaactaaggcccagcaggccagacttgcccaaggtcacacggtcagccaggagcgcagggaggccgagccccgcaccccagatcgctggtgcgccccgcagggtggtccgggaggcagggccgacgtgccgacggaccgggcggaagcgtcggggcggcggggacaaacctccaggatcctcgaccgcggcggacccgccaatgaaaagccgcgtggaaagggggcgggcacttccgcttcggggaaggggcggagcctgagggacccggcggctggtgagcgcccgctggaggctggagcttccgggccctggaaaggggtccccgcgcgccccgggtcggaggcagacccctgggtttgggggacatgggcatttggggcgcctgaacccaagacctctggatggtagggatgcccgggcgtcctggataccctgcgggactcggggctcctgcggggaagatggcacgttttactgcccaaggagtggtcaggggggtggagaagcgctgcggataccctcaggaggtctgcgacagagggggctagctgcgcagcccaggagtggtagtggcccccctggatgacaggcctggccgtatcctcccccagagctgccccgttcagaccatggatcctgaggtgaccttgctgctgcagtgccctggcgggggcctgccccaggagcagatacaggccgagctgagccccgcccatgaccgtcgcccactgccaggtggggacgaggccatcactgccatctgggagacccggctaaaggcccaaccctggctcttcgacgcccccaagttccgcctgcactcagccaccctggcgcctattggctctcgggggccacagctgctcctgcgcctgggccttacttcctaccgagacttcctgggcaccaactggtccagctcagctgcctggctgcgacagcagggtgccaccgactggggtgacacgcaggcctatctggcggacccactgggggtgggcgctgcactagccacagccgatgacttccttgtcttcctgcgccgctcccggcaggtggctgaggcccctgggctggtggacgtacctggtgggcaccctgagcctcaggtgagattccaggctgggcacaaagacccagacagctcaagggagctgcagctctccaccctcccaatcctcccagctttggtttcctcattccttaaagggaaaattggcctggtatttctctggaagtttgctcagggcagtccacctgcctccccactgacccctgccccagtcctgtgagaaactagaaaacacgggaggaaagattgggcacaggaagaagatgccctactccacccctgccccctgtgtatctcctttgaagctggacctctggttgtctgtcagggaaaggacaccagactcaggatcactaactctcttacactgtgccacatcagaccctcaaggccagcaggtataggcttgctggtcctgagatggggcagggggaagaggtggggagcaggggctgagcctgacctctcacaggccctgtgccctggtggcagcccccagcaccaggacctcgctgggcagctggtggtacatgaactcttttccagtgtccttcaggagatctgtgatgaggtgagtgaggttgacctggacagggtggtagacatgaagggagggggtaggacttgccagaattctacaggtctgggctggcaggaggcctgcaggcatctggccagcaatgagggaagaagttggctttgcagctatacatacttggagtggaattctagccctcagtaccctctgccttggattcttcttcttttctttttt

SEQ ID NO: 915736 - DNA, 4001 bp, Homo sapiens
ctggagtgcagtggcctgatctcgactcactgcaaccaccgtctcccaggttcaagcgattctcccatctcagcctcccgagtaggctgggattacaggcacccgccatcatgcccggctaatttttgtattttaggagacggggtttcaccatgttgatcaggctggtcttgaactcgtgacctcaggtgatccacccgccttggcctcccaaagtgctaggattacaggcgtaagccactgcgcccagcccaaggactaaatcttaatgactatgctatcaatttaaagatcaaaaatgtcatggaggccaggtgtggtggctcacgcctgtattcccatcattttgggaagccaaagcggtggatcactgaggtctggagtttaagaccagcctggccaacatggtgaaatcccgtctctactaaaaatacaacaatcagctgtgtgaagtggtgggcacctgtaatccccagctacttgggaggctaaggcaggagaatcgcttgaacctgggaggcggagattgcagtgagccaagatcgtgccactgcactccagcctgggtgacagagcaagactctaaaaaaaaaaaaaaaaaaaaaagagtcatggaacagatactcttcagttacatactatgtaaaacaatataccgtttttttcaaaaagtgatatataaaagttacaacatggatctttacctgggtcacaatcttctatggcttcccatatgtcttctataactaaggataacaagtttatcaaaacaaaaccaagaagcctaaaatatacgattacacaaccaatatatgctttattttgaaagctgtcattttctccttagagattatttggtcttcaatcaagaactatgggggcgatttaactggaaaaagtctgtttttaaaaaagttttacacataatagtgtgttttattaaaaattgaaaccgcttaaaccgctgattgctaccattcttgctttgacaaaactatcccaagctaacacgttgaactggtcaagactcaactctcaatcattttacatagttttggaaaattacaacaaaacataacaaaagccattccactctggtgtgaggtgccacgtttgaagtaattatataaataaatcatggctttaaaatacaaaatgcttaactgcttttttaaaaattgaaaaaaaaaacactagtcttgagccgtgaagatcataaattaagctcaaagcaaataaatacgcgttataagaagcatacacttaaaagtagttactcttagaaaatccctgaaatggtaatggtatgtatttcacctggggcagtaagggactggtattttcgcttcttttctggagaatacaaaactgaaaaggccacactctctgcgggtcggcaaaagaaaggctaagactggaggatccctagattgggacaggagtagaggattgcctcagatctacaactaagtatgatcccttgtttgtgtttataaaaacaaacgaaaaactacactgccccacagacagctccaaactcagtggaagagaggagggcgggtgggcggcaggtgtcaggtagcctccgctccacgcctttgttgactgtcgccgtcccccaccctcccagctcccgtacggggattcccgcaccaggcgacaggcgcctcggggcggggttctgaggaggtcgctaaggactgcaccggggcttccggcccgtctgggaagcttgcttggctgggccgggacggactcgacagggcgcggaagggagcggtgggcgcgccctgggaggcgagcgcgtcgcagcctcaccttggacaccattttcttgagctggctctccgacaccgccatgacggccgcctggcgactcccttccccgcaggcagagggtcagccgctgctgggctgccccagaccgtcccacacaatcgcacacccccaacccggcctcaaacaacaggaagtcggcaccactacaccacttccgcttccactacgtcacttccgggccgccgtcctgcgggcaagggtggacaccgtgtgggattgagaggggcctggtggggtgggttccaaccaacccgcccctcgagtgccggaatcagcaggacgaatcgggtcccaaagatgtgggcaagactgttccgagggtcgaaactctggttcaggataagattagcaggtatttcacagagtcgacttaaggaagctagtgccggagagggaagaagtacgaagggcttgccagtgagccttaatgactgattgatcaagtgggagggcactgcactggcggtcagagaactgttctgtcactgacttgctcttgtgataatggtaggctagtgcatttctagctcaggcgcaaatttctcccgactctaaagtcatacacttgccttagatgatgcccagtggtcctctaattaatgattttttttaagcttaaagaccttcatactatacgttggcaagggtaaagtgtagagcctttgtttcacaagaagccagatagtaatttcttctccaggaaatcattccgtaagtcagaatttctcctctgtacccacccataaatgataatacaggccgtattttacctggtgctgtatttgtgtacctgtccgctgtcaaaatccaagcccttgaaggcaggcttccttcagatcttcattgccttgcacaatgcaagggtaggtacttccatcttaattgaatttttacttcccataaaaattcttcatggtgacttacattagtcatcattacacatcaccgtcagttttgtaagcacagtgtcattcaaggtattgtaaaattttgagtttgatgatgtgtgacagtttcaattattttagtacagccctaatgagaacaaggccgtagtattgattcccttcaaagttggcgtctaagtgaaggtcacattcacaaggagggcctaactgaaagcatgtggaagcatcattataaactgttgctaacacgcacaaataaaggctattaataggtattgtttttctttttctttttcttttttttttttttttgagtcactctcactccatcgcccaggctggagtgcagtagcaccatctcggctcactgcaacctccgcctctgtttttcagctccttagttaagcatacagctccagtcaaaccaaactagaggtctgtctgtccttccattttacttgctgttttatgtcttttaaaagcaagaaggttttcaaactgttcttaaagccacggcttaaccaggagtccctttaattagagcaactgtacctttgtgagttggaggaatgccaggtaatatatattatttatatattttataaatgcaacatttataaatattaaaataaattttacatatatatatatatatatatatatatatatatatattttttttttttttttttttttttttttttgagacagagttttgctcttgcttcccaggctggagtgcgatagtgtgatcttggctcactgcaacctctgcctcccgggttcaagcgattctcctgcctaagcctcccgagtagctgggattacaggtgcccaccaccacacccagctaattttttgtatttttagtagagacaggatttcactatgttggccaggctggtctggaactcttgacctcaggtgatccacccgcctcagcctgccagaatgttgggattacaggcgtaagccactgcgcccagcccatttatatatttttgttgcccaggtcatggtgcagtgatgtgaacatggcccactgcagcctcgacctccctggctcaagtgatcctcctgcctcagcctcccatgtatattgggaccacatgcgtgtgccaccatgcccagctaatttttaatttctttgtaaagatgaggtcttactttgttgcccaggctggcctcagaactcctgggctcaggtgatcctcccaccttagcctcccaaagtgctgggattacaggtgtgag

SEQ ID NO: 915737 - DNA, 4001 bp, Homo sapiens
tctctgacaaccagccctccttctgcagggagtcctgtgctctccctcctcagcctcctctgtggcctctgaaaattgctcctcctctgagatcgaccccctcctggggcgctggggcagcaccccagaactcagacccctctcggcctcctcagcacccaggctttgcagctggacctgcttgtcggacgccgatcctgatcctggcctcctcccaggcagctggagaccactggggggctctgatcctagctcccctttgccagtagggatggagacaccgccccaggctcccagctgctgtctcgccttcaggttttgcgcctctgtcttccagcagcagccatgggcctctgggaggttggccgtggacttgcgcctggactgacgctgggagaacgaggagggcatgggcagggcttggtggccaggggttggggagcttggctgaagcacagcccggacatctgtggcgatgctctcccaggcccactggaaggggaaggagggtttccgaggaagaagcgggaagtgactgaagaaggaaagggtgggggtcagggtcggcgccagcccccagagggccctgacccccaacagcctcctgacccatcccactgctgcttactcttcagactcttcagagccctgtcctttcttgctctggcccctgggcttgcggtccttctttgctgtctgccttgagctctgagacctctgctgcaggtcttgatttggcacaccatcaccactccccaggcagccctgggcagagacagtaggggaggagcagccagcttgagcagcctcctggactgtgttgcacctcacccgggtgctccctctgtgcacctggctgggcctggctgggtccctctgggccctcgttaccataaaaaccaaccaaacagggctggatgtggtgctcacacctgtaaccccagcactttgggaggccaaggggggcggatcacctgaggccaggagttcgagaccagcctggccaacatggcgaaaccccatctgtactaaaaatacaaaaaaaattagccgagtgtggtggcctgcgcctgtaatcctagctacttgggaggctgaggcaggacaatcgcttgaacctaggagttggaggctgcagtgagccgagattgtgtcattgcactccagcctgggcaacaagagtgaaactccatctcaaaaaaacaaacaaacaaaaaaacccgaccgagcaccacctccgttctgcatattaaaatagcaacagctgccacctgctgagcacctattgtgtgctcaggactttcatgcataaacacacgtaaccttcccaaggaccctaggaggccggtactcactatcacctccatcatgtggaggagaaagctgaggctcagagaggctgagtaactgaggtcacacagctgggaagtggtggagcccagatttgtcaccattgcgctaggccacctctgggccctggactgcactcccaaatgtcccactgggccctggacctgctacagccaaggcagaaaccaaggtggtcttcatcaaggtggtcttcatctttcctgaaacctgctccttccgcagtgttccctgaatggccccatcatccctgggagtcactcctgggcgtcatccctcggcttctcccaaggcccttaggcctccctgtggtccctgtcccactcctgcctccctgagtttcatctggacctcagctcaggtcttgtggcttctcaagggcctccccagcccaggcctccctgacccacctggctctaggcagctggaagtgtcctcactgggcctccctcacctgcttgtcctgagagacggtcgacagcagcttgagcagccccgttctggttcctggagcctggagccgcacgtcctgccctggtcgcaccgacggggtcctaaccaactgttggtaggtatttagcatatcggtgtcctgccccatcctgccccatcccccatccgcaccgtagaactgcctaacaggccatctctatggcaaccagtcctcagccagtctcaatgggtctggcaaaaagcatgctaggaaggggtcagtggggtatgtgaggccaatctccttctgggagagagttcagcaggatgcccaggagtcatttagcgcagagacccaggcccaagtcctgcctctgcctcatccacaggctccccgtgtgacctggtgtaagtcccctgtccctactctgcctgtgtttccccatccatctgtacaggggagtcagcctgtctcctgtgctgccccccggcctggccgagtccctgaaggagccaaactgaactttcacaagattttatttaaatccttgcactcccaggctgggagtggtggctcacacctgtaatcccagcactttggggggctgaggcaggtggatcactggaggtcaagagttcaagaccagcctggccaaaatggcaaaaccccatctctaccaaaaatgcaaaaaagattagccaggcctggtggcgcatgcctgtaatcccagctactcaggctgaggcacgagaatcacttgaacccgggaggcagaggctgcatcgaccccagattgcaccactgcactccagccagggcgacagagtgagactctgtctcaataaaaaagaaacaaataaacaaatctttgcactcccagccccagccaggaagttgaatgctgtgtccaggagagaggcagcaggccattcagagcctgggcccaggcccacctggccatcttcataggccatgaggttctggagggagttacaacattgaaagcttaccccaggccgggcagtggctgtaattccagcactttgggaggccgaggtgggcggattgcctgaggtcaggagttggagaccagcctggccaacatggtgaaaccccatctcccacctggattgaaactctatctctactaaaaatacaaaaattagccgggcatggtggtgggcacctgtaatcccagctactcgggaggctgaggctctccctctccgggttctcttgaacccgggaggtggaggttgcagtgagccgaggccacaccagtgtactccagcctgggcgaaagagtgagactccatctcaaaaaaatatatttttttaatataaaaaaagtaaaagatcttaccccaaacttctagcagtgctcaaaagccttggaatcttaagtccccatgggacgcctggtgctgaccactgaggcttgcagtacagggatgtggtgctgagctgaggccctggagacggaccaactgggctggaggcctggtctcactagctctgtgaccaactccccactctgcaaaactggaatcacgggcccagctcataggtttgttgcaaggactacatgaaaccccaaacgatgacatcggtaaatgttattattactaacactagctggccgttcttttgaggcagcagagcatcatggctaagagcatagaggaagcgcttgggtgcaaatcccagctcctccacttgtcccgtaccctctcggtgcctgttttctcataggcaatggggaggggatggttataatcggatctactcccagggtagtggtaaggattaaatcactatgcagatacaaacagaacatcctcatggctcatgggaactgctatgttagcattgctgttattcttattatcttttttttttctttttgtgatggagtcttgctctgttgcccaggctggagtgcagtgatgtgatctcggctcactgcaacctctgcctcctgggttcaagcgattctcccacctcagcctcccgggtaactaggattacaggcatgtgccaccatgcccggctaattttttgtatttttagtagagagagggtttcaccatgttggccaggctggtcttgaactcctgacctcaagtgatccacccaccttggcctcccaaagtgctgggattacaggtgtgagccactgcaccgggccgtgttgctgtta

SEQ ID NO: 915738 - DNA, 4001 bp, Homo sapiens
ggtctcaaagcggagcctgtctccctaccaaacagacgcaactctggatcacactctttccaagaagcgcggggagggcaacgccagccgccctgtcccttcctctccccagcccagggccggagcctgggacccaccgctcgcctcttcctcccagccggggtctgagggggagtccgcacgctccgcccagcccctgcccagccagtccccaggcgctgccgatcccccgaccaccaatcccgtcgcagccccttgctgtcctgggacctcaggagggggagggggagggctgtctgcgcccccggccgggtagcggtggggaggactggggctgttgcccgaggaaccgggagaaaagtttggagccaagtcgtgggcccgaggggacggcgggggagcgggggggtggggcggcgttgggctctcggtgcgcacaccctctgcggacacccagcccagacacgtcggcaggcaccgaccacgtacgcggagacacgcgatgcgcccaccgacgcccacagccaagcgcaggcccgcaaacgtggacacgggcgcaaagcagccgcgcaaagccacggacacacaaaggcaccgacagcggcgcgtccccgaccgcaaatccacaaagacccacaaacgtgagatgcacgtgtccgcacaaagacccacacggcccctgggcgtagcctttgtctcccgcaagacctctcccctgggtcggcgttccccactcccgcccagccctaggcgtccgacgaaagttgaggggcctcggcgggacccagccccgcccctgcgcccggcgtccccagcccgccctccgaaggggccgcgaggctaggatcggggacttgggatcttcaaccgcagcgcggactctcgccccgcccggggaactgcactcacctggaagcctgcgccacagccgcctcggcacgctcaccccggcggcccggccgcgggccctccggccagcgcttttctccgcgcggcgcggcccgccccccggtccccgcccgcagccaggctcccccctgccgggcgccgggtggcggctcgggccggccgcggggcggctcagggagtgtcgccaaagtgccagcctctctcggcgcgcgccccgcccgcggagcctgagccgagcccgggttccactctagggagcgtctcaaaagtgcgctgctcccgccccctctagttggcctcgctcacagcttcctgcatcccggatccctgccccctccccctgcgcgccccagcaatctaagcagatggccgcactgtcgggaacatctggaggtcgccggagtacgtgcctgtgtatgtgtatgtgtgtgtatgactgtgtgtgtggaaagagagagggaattagttgctagtaagaaagagatttggtgggtgggtgagggcttcctctttgcttgttcaccgcccctccccatttttttttaaagagtgaaagaggttcagggactaccgggagcaagaaaccaagaatctgaagcagagaaagactggctgaaagacgaacccacagagaagagagagcccggctcgggcagaaaagctggcaggagaggagagagaaagtcaacagattgagtttttcttttaggaggaaaccattggcttctggttagagttctaagaagggaaactggcgtgtgagtaggcagcagtttcagtctattccccctgctgtagctcttgggctctcacccctctttatgttaaaaaaaaaaaaaaagggcaggaaagcatccaagacactttaaaatgagggtttgcaggagaaatgacctggtggacgcatttcctaggaggggagagtcaggtgtgtgggtggctcccagtctacacaccccgacaatgcctaccttgggagaggggcagttcacaggtgggagagttgatagaggctttggtcttgggccctggacctcccaggagcttctcctagactttggagggcctcggggtgcagaaattgggcaatgtacctcctgcagtggcccagacttgttaacacacccagtctgcttgctgcttctttccttattactttttcttattcattaaaaaaaaaaaaaaaaaaaggagttgcttgggcctgtgtgtgcatgcatgccggtctacttggggaagaaggaagacactagagaggtggtgaggtaggagtggagaccactgccccaggcctcaggccagcaaaatcatctgctgcccagaaaacaaactggtcttgcaggtcctttctgcactcagagccattgtgtggtcttggggatgcacttgggttgacacctgtggaccctgccagttaggaatgtgcagagaaaaggctaggagcctggtctcatatgtgtggaagcagggagaactcccgtctctcctctccattcattgtcctctcctgattagaatcccagctttcagaactaggagtccttctgtgatcatccagctcacactccttatcagtctttgggatggcaccatgggccctttggtatccagtgtcttcctcactgttgggcttaaaagggctgcagggattcaactccacaacccctgggacccatagagaggagtcgggcccctcccatttcccaccctcccattccctcccctctctaaaggctcctggcctagatgggagagagacctgcaatcagcatcgggtgagggccaagcttggtcaggattcaggttccagccctgccacttaccagctctgggtaactttaggcaagttacctaacctctctgagactcagtgtctgcaactgtagaagaggctattgtgaggaataaacaaggtaatttaggtaaagcattagtctggctcacaggaagctcctttgtgtggttgctaaatgtcttccgtcagggactggggtagagactggaaagcccagcaggcttgggaggggagggtgcccgggaatgacctctggactccctggcttgtctagcttatattcctcctgcttcctcccctcccatagggacattcttttgaaggaatggcgcccccctccccttgccctagactaacgatttccatcctctcctccatgtggaattgtttagcgagtctcaagttcagcatctgagaactggagatgaaaatacccaactgcccgggaactcagggaagctaactcccactgcactgtgtgtgcaggttctagccagctgggctggaggctccaggcctcacatttaacataaaagtaatcaacaacccttcacactggctggtagctggcagcagtttctgagcactttcacattcatcatttcccttgacctccccttagggagaggtggccttgaggggcttcagctggtggatctccatgaactttacccacctcccctcatcactgtgcctccagttgagagtctctgtgcctctagactctcctcttctgtctgctgtccacattccagcaagagtgccctttctaaactgcagatctgcagaatggatcatgacacttgcctgcttaaaacctttcaatggcaaaagccaaactgcttggtgtggcattcaaggcctatgtgatatgcccccacctcaccttaactctccagcatcagttctggccaccccctcttacacatcccaagttttagtcccctagtcacctagaagtaagggaagggaggtggaccttctccattcttcatgtctgttcagtgtcttcgcccccagggagtcctctctctggcgaagttggcctctccatctgtgatattgccatgtcctttgtatataagcaccatcattttcaccgttctcttccccttcttgtgatcatcttggccactgtgacatgtcagggactgtgctggatacttttaagatcatgatttaatccaaacaaccacactagatggatagtggtgcggcccagaaagggcaagagatctgtctggggttacatagcatgttctctgcggagctggcacaacatttagggctccagtgc

SEQ ID NO: 915739 - DNA, 4001 bp, Homo sapiens
aactgtcatttaaaaagtaagaggagaaaaggtcaatccccctcccttccctctccatttttgactcatttatcagcttttgcctttcctggtgttggaggaagggtaggtggaagcccggtggcggttgcattgcagccttcctggggagcaaagtagtgcctcggaataggtcaggtcagaatggaggtgtaggttaaacatcaaagtgtttctgggttctgggatctgaagcagtcagccagaacagaagaggctatcaatacctccccttccagaagggaaactgaggccggagagggaaaggaaaatgcccacagttgtttctttcccaggttagcggcctgtgcccttccatcatgtctgcagcatccgacaaagttctaggttaaagactggagtgagcagtggggaggagggtgtttacggttatctttgcgacttaggctcaaaagcccagcaggctcctgcagctctgagcacccccccccccccacctccggtcagccccaggcactgcaagtctagacttatccgaagggcagggcgcacaaagatgaaagaagaatcgaaggtcttgagtcacctcctcgccaggccaagtgtgggctggcgctgctctccgcccggctccagaggcgcgggttattcccaccgcacgccccgagccgcgagggagttctcgccctgtccgtgccagagtgaccgcgactccgcgaagctgagcaacttgccagcgccgcacaggggccagtggccgtcccagttgaaacctgtgtatgtgaggctcccacggcccccagcccagctccgggtcctgtgagccggcgcctcgggcatgcccagatctggactggcagtccccctctcccctaccgggtccgagggttggccccctaccccgggggcgggctgcaaacggagagtgggtctcaaagcggagcctgtctccctaccaaacagacgcaactctggatcacactctttccaagaagcgcggggagggcaacgccagccgccctgtcccttcctctccccagcccagggccggagcctgggacccaccgctcgcctcttcctcccagccggggtctgagggggagtccgcacgctccgcccagcccctgcccagccagtccccaggcgctgccgatcccccgaccaccaatcccgtcgcagccccttgctgtcctgggacctcaggagggggagggggagggctgtctgcgcccccggccgggtagcggtggggaggactggggctgttgcccgaggaaccgggagaaaagtttggagccaagtcgtgggcccgaggggacggcgggggagcgggggggtggggcggcgttgggctctcggtgcgcacaccctctgcggacacccagcccagacacgtcggcaggcaccgaccacgtacgcggagacacgcgatgcgcccaccgacgcccacagccaagcgcaggcccgcaaacgtggacacgggcgcaaagcagccgcgcaaagccacggacacacaaaggcaccgacagcggcgcgtccccgaccgcaaatccacaaagacccacaaacgtgagatgcacgtgtccgcacaaagacccacacggcccctgggcgtagcctttgtctcccgcaagacctctcccctgggtcggcgttccccactcccgcccagccctaggcgtccgacgaaagttgaggggcctcggcgggacccagccccgcccctgcgcccggcgtccccagcccgccctccgaaggggccgcgaggctaggatcggggacttgggatcttcaaccgcagcgcggactctcgccccgcccggggaactgcactcacctggaagcctgcgccacagccgcctcggcacgctcaccccggcggcccggccgcgggccctccggccagcgcttttctccgcgcggcgcggcccgccccccggtccccgcccgcagccaggctcccccctgccgggcgccgggtggcggctcgggccggccgcggggcggctcagggagtgtcgccaaagtgccagcctctctcggcgcgcgccccgcccgcggagcctgagccgagcccgggttccactctagggagcgtctcaaaagtgcgctgctcccgccccctctagttggcctcgctcacagcttcctgcatcccggatccctgccccctccccctgcgcgccccagcaatctaagcagatggccgcactgtcgggaacatctggaggtcgccggagtacgtgcctgtgtatgtgtatgtgtgtgtatgactgtgtgtgtggaaagagagagggaattagttgctagtaagaaagagatttggtgggtgggtgagggcttcctctttgcttgttcaccgcccctccccatttttttttaaagagtgaaagaggttcagggactaccgggagcaagaaaccaagaatctgaagcagagaaagactggctgaaagacgaacccacagagaagagagagcccggctcgggcagaaaagctggcaggagaggagagagaaagtcaacagattgagtttttcttttaggaggaaaccattggcttctggttagagttctaagaagggaaactggcgtgtgagtaggcagcagtttcagtctattccccctgctgtagctcttgggctctcacccctctttatgttaaaaaaaaaaaaaaagggcaggaaagcatccaagacactttaaaatgagggtttgcaggagaaatgacctggtggacgcatttcctaggaggggagagtcaggtgtgtgggtggctcccagtctacacaccccgacaatgcctaccttgggagaggggcagttcacaggtgggagagttgatagaggctttggtcttgggccctggacctcccaggagcttctcctagactttggagggcctcggggtgcagaaattgggcaatgtacctcctgcagtggcccagacttgttaacacacccagtctgcttgctgcttctttccttattactttttcttattcattaaaaaaaaaaaaaaaaaaaggagttgcttgggcctgtgtgtgcatgcatgccggtctacttggggaagaaggaagacactagagaggtggtgaggtaggagtggagaccactgccccaggcctcaggccagcaaaatcatctgctgcccagaaaacaaactggtcttgcaggtcctttctgcactcagagccattgtgtggtcttggggatgcacttgggttgacacctgtggaccctgccagttaggaatgtgcagagaaaaggctaggagcctggtctcatatgtgtggaagcagggagaactcccgtctctcctctccattcattgtcctctcctgattagaatcccagctttcagaactaggagtccttctgtgatcatccagctcacactccttatcagtctttgggatggcaccatgggccctttggtatccagtgtcttcctcactgttgggcttaaaagggctgcagggattcaactccacaacccctgggacccatagagaggagtcgggcccctcccatttcccaccctcccattccctcccctctctaaaggctcctggcctagatgggagagagacctgcaatcagcatcgggtgagggccaagcttggtcaggattcaggttccagccctgccacttaccagctctgggtaactttaggcaagttacctaacctctctgagactcagtgtctgcaactgtagaagaggctattgtgaggaataaacaaggtaatttaggtaaagcattagtctggctcacaggaagctcctttgtgtggttgctaaatgtcttccgtcagggactggggtagagactggaaagcccagcaggcttgggaggggagggtgcccgggaatgacctctggactccctggcttgtctagcttatattcctcctgcttcctcccctcccatagggacattcttttgaaggaatggcgcccccctccccttgccctagactaacgatttccatcct

SEQ ID NO: 915740 - DNA, 4001 bp, Homo sapiens
ccgcttcctgtggggatcagggcagctgctgccaggaggtttacaattaagattatggtcctggcagctggcagggtgagccgtgggacacagacgctgtcagtgagggacagcctgagtaggccccaggcctcacttctcctcccacactgtccactaaggcctcagcctggccctgtttttatctgcccctgggagccggccaccctgtcttggattccagcttaaaataatctagggcagccagtggcacactccagaagggtgagtgaactatcagattggtgactaagaaagtggccaagtgctttctgactatgggcacagaggcagccaaaatagaaaatgccattaggcagtggtgcagcactttacaatctgcacaccccaaccacctaccagcaacccaggcagggaagcaggtggagcgggtgttgagggcacatgtacaagaaacagtgcggggagcttcctaagtcttcctcgtcttccccaaagcaacctgtgagtaggtgtcactgtcccattttagagatcagaaaatcaaggcctgcagggatttcatgagatgcccaaaatttaaaaacaaaacaaaacaaagtataggacaaggaaacaaaccatttttatgtttttacaggacatggaacttcagagagatgatttggctaattatttttaatcttaagcttcaagtcacagactgaagtaagcaaaagacacaagaattgtatggcagttcaggcagtggcttcaaatctcgatgacattactcagtgctatgtgaccttagacaagtcacttaacttctctgaggcctggttttctcttctgtaatgtggaggtgatcatagtggcaagatgacatgacagatgagaggacagaatgggatggtgcagtgagtgagcgtcacactgtgcctggcgcatgaagccctccatcatattgctggtttctcttctgataggcagggactcaaaccaaggttcctctgcacctcggaccctgtgatttaccaccaagggtcggagccatcgtcctttgcccaagacaggcaatcagatctcctcggagttttcagatcccctctcctctccatggccttccacaacctcccaacccctgacctgtcacttcttctatttcagccctggtcttggaatcccagaaatggagggcgtgagtgctggaacagagattcaagttgcagctgcctcattttacaatgagaaaatgaggaccaatgagggaaatgacttataagtcacattggtggctgaggctgctcagaggacagacatcctggcttttcatccagaaagcttccatgaggccacccagcccaccaccagtcccagaatcatggtcagctcaagaaggacttcccagagcctccgaaacagaccaaggcttttctgttctcagtttcaccatggaatgtggtgattgatcctagtacttgtggatttagactttgtccaaaagattatcgagggcagagggaaggtaatcaccctaggaagcgatctccttatcacggtcccaagactgtggtgggtatgggggaggctgaggtcagggaggggtccttgatacagattccatgagccctcatgaccctgcctggagcccccaggagctctactcttccttgaagggctcactccctgccatccatcaacactcacttcctgcaccaaggtggccccgttgccctcacccatgagtaaatgtctaggggtgaggacaagagtgaagccacccttctcctgccctgcaccccttgggcaagagctgagagccctctcacatggaagtggtggtttggagggcaggaagagaagaagagagaagagtagaccctcttgttcgagtaagtgaagatgccaccctgccatgttgccacatcatacctctttccactggtgtctttccctttgggcccagaggtgccaaggttctcttacagtgtcctcctgacagtagcttctggatacactctagagaaagaagagagagaaacacatttcaaaaaggcaggagtccttggggaccacctcagtccacatgtggctcccactccccaaggtctcctttccccacttccattactgcaagcacagaagccagacggggcacccatgactggtgatatggtttgaatgtgtccccatcaaatctcaaattgaatcataattcccagtgtcggagatggggcctcagatctccatccaggcaggtgggaggtgattagatgatggagatagtttctcatgaatgggttagcactgtcccctcagtgctgttctcatgatagtgagtgagataccgtgagatctgcttgtttaaaagtgtgtagcaccttcccctctctctctctttctcctgtccctatctgtcactatgcgtgcttccccttccaccatgattgtaagtttcctgaggcctcttcagaagcagatgctgtcatgcttcctgtacagcctatagaactgtgagccaattaaatctttttttatatataaattacccagtctcaggtatttctttacagcagtgcaagaatggactaatacagctggaaaggcaggactaagcaccagccccacaaagcttcccaggatagcgtccccagagcctgtgaatgggggcatattttcaatcttcccaagtcagcccggagcctatatatccatgtgatggcattgaacatgctaatcaaaacatcacactgtgtttctttgcttccagctagaatattatcaacttggtgtgggaactccagtttcctcaggctgaaaaaaaggctttctgagtcattttgaaactaggaaaaagaattaatcattgcctaatgaatacaggctctttgggcagacccaacactttcaagatctgctatccatgaagagataagtaatagtaaggaaagtctccggtggtaaaaaaagaattcagttccagaatgccagtggggttagaagtccagcctctccaacccttcccttctgtcagtttgatgaagcatccccaggtcaccagagaaggatcaaattcaccatgtccaggccacatacctgccagcagagacaggccagtcccaagagattggctcagtcacatgcacagctgagaaataagagcaaaacttacagcctccagagcacaggggagaaagcgaagttccccaatctctcccctcccaggctcctcctgccctcagagactagctgcacagtggaaaccctgatcaagtttcaggtctctcgaatgataatgatgatcaacctgatgccccttacaaccccaggagaaagtgtcaccacttcaggaatgaggactgtgagctcagaggagttaaataacttgcccaaggttacaccactgaaatgagtctgagctgggactagaactttggctgtgggaagtcaagcccggtgctagtgccatctccacagtgggagggatgttggtttccgtagtgtagtggttatcacgttcgcctcacagtgggagggatgtaagcaggaaggtgatgagttcgaggtctaccccacagaccccagcatcagggcagctcaggcatgcaagggagtctctgaactcccattaactgatggaaaatagggattggctggaggatgggacctcattttatttagctatctgggcctcaaatgtccatccaggcagtgtcagcgcagggggacctcatgcatcatgaaccagactaaggctacaatcagaggaatttgttacatttataaacccataaacacacacacacaaacacacacacacacacacacatatgtgtatatataggtatgaccttgggcaagttatttatacatatataaatttttcatttttaactacaaaagtacatgtgcttccttaccagccatcctgtttaacagagagaaccactgcaaacgctctggagtgagaccctctagactttattctacctaatcaaatacgtgtatgcatgtgtgtg

SEQ ID NO: 915741 - DNA, 4001 bp, Homo sapiens
ggccgtgagggactcctggggggctctgaatgggcctgtctctccatcagacggccctgagggaaggaggagggaggtgggactcgttcagcctgggggactgcccctccttccctcttttcctccctgccctccatgcctgtggggctatcttggaagccacatgctccctgccatgccctagtgacaagtggccggactggagctgtaatcttatcagtctggacctggacctgggccccaggcatcctcctgccatgtcctagtgacaagtggccggactggagctgtaatcttatcagtccggacctggacctgggccccaggcgtcctcctccagggaggccctggtcctaggacttggggaaaagcattgggttctaaggcagtatccctgacctcctgggcctcagtttccctacatctgcccaccgggctgcagccttcctgggccccctgagctcctgcctgagagtcccctgcagatctggctctgacatcccctcattaaaggggccttcctcagccttacccctgagtggccccagcaggctctggccctcgctcccgctctctggatgttggataagtcgctgctgagtccctgcagggaggcgtctggctagagcagcccccaccccctccccacccacatcccaggtcctgagtggaacatcagccatgtggagccctcatggacctgctgtgcccagccccaggccagtcccaggcctgcctgggactgagccctgactgcacagagccaggtcctgaccgcacagagccacttcctgaccctgcccgacatatacccacactgtgcccacgctcctgtggggcacgagaaccaggcaggaacactggctgtcacccagacccgaggccctgcccaggggagctaggactccagggcagcccctccctgcccctgaccacctctggctcctgcctagggcctggcaccattctggctgtgaggcgtccagctgggctcgtgccagccacccttgcacccgaggcccctcccgatgcagccaggcctggacctcacttaccccattggtgcacagcctggtacgggttcttctccagggacgctcggcggatgacagcaaagtgggccccgaagtaggtaagagtcaccatggtggccacagagaggcccagcagctgtggatagggcagactcagagtgtggggcatgggactgctgcaggagcagggagctcggccccagcgggcagggttggggctctctccagcttcccggtcccgtgagagacaggctcagctgcagggattcccggtgtttccgtggagtggtctcaggaggccttcactgcagacgccccagcacactcacaggcacccccacatggtagacgcatacacgcacagcccagcttccccagacacccaggacctctgatcattgtgtctacggagtgggagtgagccccacccctgtgccagcaccctccggggcaggaaggggagaagatccctggagcccggcagccagtgcccctccaccccagctcgccccaggcctcagccccactcaggcctcctccaggctctgtgctgcccctcaggaggagagacggggttgctcatggtggtccctgcctgcctgcggctgtctgcaagggcaggacacatgtctgcaagggcaggacagggacagtagggctggtgtgtgtgtcaggggagggataatccctgtgctgaggccctgccacccctcacccctgctcacccccacccaccacccactcctgcccgacctgcctgttaccaagataaagaagcaggtgaccagcatctggcatttggcaaccctgactcgactccaaggccccatgacggttcctctcctctcctctcctcccctcccttcccctccctgtggtttccagctgggcaggggcctcagaccgcagctcactgcccaggaggtaggctgcatccgcccctctgtctgtctgtcaacatcgccctaggaccgagctgctgggtgccccggaagaagggcaggcaggaaggggaggggcagtgaggttggctccccccaccacctcaccctggtgcccccagcccagcccaagacaccagggcatttgctgacatctgaggcccttcccaggaagacatggcctcgttcttggtgtggccactgaggacggcgctgagagggggaaagtcatgggcaggacctggtgtgggatgtggaggagacggcgcccggggaggaggaggtgagctccccgtcctgggagtgagcaagtgtggactgggccttgggggcgtaatccttggaggaatttggatggggtctccttggaacatcattattgaggtgttcttaggaaacaccctttgaaatgtcctgtgacagcttaagttttgagaaggtcgttggttttaatgccttcgtgggcggcactcatggatattttgtcgcagagccttcttggggccacaggggtgggctggggcctcgctcacactcacgtggggcctccagggggaggctttgtaaacctcgaatttgcaattacaccgagccgtgtaattacgtatgggtgggggcagcgctgcggccccagtacaggcagggtttccgtgggcctctggggcagggtgggcctgaagagggtgaaaatgttccaggtgaatccatcattcagggaccactccgggccctcccaggagtgctaacaggcggctctgctcgcccctcggtgctggaattgctcctcctgcatttggtcaggacctcatcaagggggagggggccccaagacctgcaggcatggcaaccccagcgtggctgtgggaagagggcccagctgccgcccgctcaggaacgctgctggaggaactgctgaggccaccgcctccctccctctgcggagggagaaccaggagaaccaggagggacaaccaggacccccgtccagcccagcacccccaggcagcaccctctgcagctctggcccccaggaattcccaccctgagtctgtgggggcttgtggagacctcagatgcctggcacccacagtgtcacttcagctgggggcctaggtgtggctcagactggggcgcaggtatgaatgtaggggtggcaacaagagtgaaggtaccaggtctaggggcaggaggcccccgggctgtgcaagtgggcagcccgtcctctccagggaagatgagctgctcttggctatgtctggttcgcccctagaattgtctctctccaaccttgacctccctggagctggtgaggcgggcctggagcaccacccgcttctgggacacctcttcatcaggtctgaagaatttcggagcagggcgggcctgggttcttgacctgtcctgatggcctccttctcacaccagcgctgtgcccaggtggcctcacttgtcatctcaaagtggcgtcgaaccccctgacaggtggacgggaacccccggctggccctccagagaccaggtctgaccacagcccccctcactgtgccccaccagcgggggcagggagccggtggaacccccacgccctttgctgagccacaccctcccaccccaacattccctctgcaagaggaagtggcttgttgaggggaagccactgtgcaggctgctgcccaccccacaccctcctgcccaccccgcacacccctgcccaccccgcacaccgctgcccaccccacacatccctgcccaccccacacacccctacccaaccttacacacccctgcccaccccacacacccctgcccaccctcacacacccctgcccaccccacacgcccctgcccaacctcacacacccctgcccaccccacatgcccctgcccaccccacacacccctgcccaccccacacacccctgcccaccctcacaaacccctgcccaccccacacacccctgcccacctgctctagaggtggtgccggccgctgggagcctggaagacccctcgagcagcgggttca

SEQ ID NO: 915742 - DNA, 4001 bp, Homo sapiens
gcagctttgaggaggtagggaggcccgccaacacaaacagcctatgctgtgggcttcctggctgcctcagcccctgcggggccccagtgcccgtcccaagccctcaccctggggggtcccaagcaagctggcactccctcatgcacacagaggagcagggactgggggctacatacagagtctgggtgggaccaggcccctcccacccaaacctgagccctggaggctggagacaccactctgatacccccagcagccccaggggagggacagatagtccagaggtcccccagtctttcctcctgggaccaccgaggctaaccccacactccaggccttccctgtaatcctttcctgcactgttgggtatttatctgctgggagtcgggggtgaaggcaacagacttaggaccctgggtggggggcaccttcccacaccccccaggctccaggagcagccgcacctcaggtgccatcccaccacagccctggccctggcccctgcaacctagacccctatagaacagtctgggggggcacatcaggcctgggcagctgcatggcaggcagtgacattcccaaatatcaccagccccgacatatgagtggtgaggctagggtcagttcagtctcggccccatctacaggccccaccgctcacagcgccggtctcccaggaccgtagagaggacccggccccatctacaggccccactgctcacaacgccagtctcccaggaccgtagagaggacacggacggcgtgggtacggtgggcagtggccttggctgtgtgcaccgctgaggtgtcgggcacgtgtgctcgtggcgccgtgtgcacccaccccatcccacagcaccctgggggtgagcacacatctgtcccaggcatggacagggccagagagcacaggtgtgggggcgaggctggggacagacaccttcaacaccctctcccagtcaaggtcatgcccagcctcagcggcaggagggatgcagccctccgggcgggcagtttctgatcccacctgagctttacagacagggaaacgtgggctgggatcccagaccagagtgcaagttcagctgaatcccagccagggctcagcccgtgctccccctcccagccctcctggtcccgtggctggcctgtttccagggcaacacccagggtgggaggggtcagcagctaaaacttcaatcatgggtttcccctggtcctttgccctgaagtgatccctcctctagcaggaagcagccgggggagcccaccctctgctccctgtgccctgccctgaccacaggaggctccacaacgcccccttctataaaaccagcgcctcaccctcctggccccatcccagacccccccccccagaagccaggccgagtctgcgccaacactccacacccaggagagaggggcccccacccgcccctgctggcgggcacagtgccctgccccgccaccaggctccctcccacccccgcttgcctgaggagggccaggcccaggctccccagggtcctcaggtagagcccagtcgggactgaggacaggcctgggcccccaggggcctccgcacatatgtggtgggggctcgggggagatgcacagagcctgaggctggggcagtctccagatctcaggggctctgctgggaaatggagggataggaagcgcacacactcggaattccaagaatgtcagcttggcccaagccaggatttggagagcagctcactccccaccaccccttgctctgagtaaacaactcctgcaggcaggaacaggggcgggacaggccctggaccctcctccaagaagcctccaggcccccacccactccccagggcccaccctgctaacatccgggacccccctgcccccctcacctccacagccaccagcagcctcgcagctgaacctggctctgaccccaggccaccgttactcagggcccctgtcctgcccttctgcccagagcaggatgtgcgtccactcatcctggggggagggggtcagggaagggaagtggcctcggctcgtggctccgcacgtggctgggtggggtatggcaaatgccactggggaagctgcccagggccctggccagggtgggagcggaaaccccaagcgtgcagtggatctggctagcaccactccggacccagaaaacccttcgtcctcctcctctgcaactaaggcagacgcagcattgccctgagaaagcggcagctgatgcctggaacccaacacaggtcccaccccagccagaagccccaggccggcaaaccagcccagagccccccatgggtgccgctttgcggcccacccacccccacagcccacctcgcacctccaaggagccttctttgcctctcactgcacaccgaccccccatttcctcacccccaccccaggggcacagcaagaagggtgctggtgccagcccccccgcactccatccgagagacacgggctcctcgtccctcgtcgtccgtaggccctgagctccagggcaagccagagctgaggccttcagggggtcctgccagtgcagcctccgggagtctgcccagggatcccctgtgccggggtcttccaggttcagctcaaaaagcacctcttccacgactccctccccgacctccctcccgggtcccctctccccgtgctcagaggcgcgtctgagcgtcgggagctcgggacggcgagcagccagcagagccgggacccgggagggcgcaccccgaccccattcccgggaaagagcggaaagaacgcggacaggagcccggggcggggagctgccggcgggggctgtaattgcgcagctgaggccagggcggcgcccctaggggctgggccgcgtccagaatgggacccccgaactcagcgccgagagccccggacaccccgcgggcagaggccgaggcggaggaacccactactcggcgcggccaggaggggcggcaggaagacccgccccggcccccgcccgccctctccccgagcccccgcgccggaccccacttgttgctgcgtgtcggctctgggctcgaactcgcgcgccccgctcgcgtccggctccagccgctcccggtcggacacctccggccacgggaccctggccgcacgcccccacaacccccaggcgcagtacctgcgccgccgcctcccgctcgcgccgcccgctcccgccgcgcagctgtcagtcaagcggacacgagaaacgcgaaccgccgccgcagctttacggccctgctcagacgccgtagcgccgggatgcaccaagacggtgggcgggggtgtgcggtctgctgctgccgcggccgcgcgggcccgggagccccgggacgcacaggcccaggagccccgggacgcacgggaagcccctatcgcggcggaaactgcggccagcggtggcggggccggtggagggacggccggaacagcggagaacgagcggagccgattctcccgcaacagtggacgcgcccggggcggggcctgggggggttcttcgcgtgcggccgggccgggccgggcagtctgggacgcgccgccgccatgatcatccctgtacgctgcttcacttgtggcaagatcgtcggcaacaagtgggaggcttacctggggctgctgcaggccgagtacaccgaggggtgaggcgcgggccggggctaggggctgagtccgccgtggggcgcgggccggggctgggggctgagtccgccctggggtgcgcgccggggcgggaggcgcagcgctgcctgaggccagcgccccatgagcagcttcaggcccggcttctccagccccgctctgtgatctgctttcgggagaaccttatcccctgaagtctggggaagagaacggagttgggcttcaaaccagtggtgtcctggggattctaggtggcctggcgggtcgcaggcgtcttgtcacccgcagtaaagcccttggcctccgccctattcccatctctgcccccaggc

SEQ ID NO: 915743 - DNA, 4001 bp, Homo sapiens
tggctggcctgtttccagggcaacacccagggtgggaggggtcagcagctaaaacttcaatcatgggtttcccctggtcctttgccctgaagtgatccctcctctagcaggaagcagccgggggagcccaccctctgctccctgtgccctgccctgaccacaggaggctccacaacgcccccttctataaaaccagcgcctcaccctcctggccccatcccagacccccccccccagaagccaggccgagtctgcgccaacactccacacccaggagagaggggcccccacccgcccctgctggcgggcacagtgccctgccccgccaccaggctccctcccacccccgcttgcctgaggagggccaggcccaggctccccagggtcctcaggtagagcccagtcgggactgaggacaggcctgggcccccaggggcctccgcacatatgtggtgggggctcgggggagatgcacagagcctgaggctggggcagtctccagatctcaggggctctgctgggaaatggagggataggaagcgcacacactcggaattccaagaatgtcagcttggcccaagccaggatttggagagcagctcactccccaccaccccttgctctgagtaaacaactcctgcaggcaggaacaggggcgggacaggccctggaccctcctccaagaagcctccaggcccccacccactccccagggcccaccctgctaacatccgggacccccctgcccccctcacctccacagccaccagcagcctcgcagctgaacctggctctgaccccaggccaccgttactcagggcccctgtcctgcccttctgcccagagcaggatgtgcgtccactcatcctggggggagggggtcagggaagggaagtggcctcggctcgtggctccgcacgtggctgggtggggtatggcaaatgccactggggaagctgcccagggccctggccagggtgggagcggaaaccccaagcgtgcagtggatctggctagcaccactccggacccagaaaacccttcgtcctcctcctctgcaactaaggcagacgcagcattgccctgagaaagcggcagctgatgcctggaacccaacacaggtcccaccccagccagaagccccaggccggcaaaccagcccagagccccccatgggtgccgctttgcggcccacccacccccacagcccacctcgcacctccaaggagccttctttgcctctcactgcacaccgaccccccatttcctcacccccaccccaggggcacagcaagaagggtgctggtgccagcccccccgcactccatccgagagacacgggctcctcgtccctcgtcgtccgtaggccctgagctccagggcaagccagagctgaggccttcagggggtcctgccagtgcagcctccgggagtctgcccagggatcccctgtgccggggtcttccaggttcagctcaaaaagcacctcttccacgactccctccccgacctccctcccgggtcccctctccccgtgctcagaggcgcgtctgagcgtcgggagctcgggacggcgagcagccagcagagccgggacccgggagggcgcaccccgaccccattcccgggaaagagcggaaagaacgcggacaggagcccggggcggggagctgccggcgggggctgtaattgcgcagctgaggccagggcggcgcccctaggggctgggccgcgtccagaatgggacccccgaactcagcgccgagagccccggacaccccgcgggcagaggccgaggcggaggaacccactactcggcgcggccaggaggggcggcaggaagacccgccccggcccccgcccgccctctccccgagcccccgcgccggaccccacttgttgctgcgtgtcggctctgggctcgaactcgcgcgccccgctcgcgtccggctccagccgctcccggtcggacacctccggccacgggaccctggccgcacgcccccacaacccccaggcgcagtacctgcgccgccgcctcccgctcgcgccgcccgctcccgccgcgcagctgtcagtcaagcggacacgagaaacgcgaaccgccgccgcagctttacggccctgctcagacgccgtagcgccgggatgcaccaagacggtgggcgggggtgtgcggtctgctgctgccgcggccgcgcgggcccgggagccccgggacgcacaggcccaggagccccgggacgcacgggaagcccctatcgcggcggaaactgcggccagcggtggcggggccggtggagggacggccggaacagcggagaacgagcggagccgattctcccgcaacagtggacgcgcccggggcggggcctgggggggttcttcgcgtgcggccgggccgggccgggcagtctgggacgcgccgccgccatgatcatccctgtacgctgcttcacttgtggcaagatcgtcggcaacaagtgggaggcttacctggggctgctgcaggccgagtacaccgaggggtgaggcgcgggccggggctaggggctgagtccgccgtggggcgcgggccggggctgggggctgagtccgccctggggtgcgcgccggggcgggaggcgcagcgctgcctgaggccagcgccccatgagcagcttcaggcccggcttctccagccccgctctgtgatctgctttcgggagaaccttatcccctgaagtctggggaagagaacggagttgggcttcaaaccagtggtgtcctggggattctaggtggcctggcgggtcgcaggcgtcttgtcacccgcagtaaagcccttggcctccgccctattcccatctctgcccccaggcccaccccatgtcctgcaaacctcgctgcaggacgggcgggcgcggcggctgacatctgtaatcccagcagtttgggaggccgaggcgagaggcttgcttgagcccaggaggtcgagaccagcctggacaacctggggagaccctgatctccagaaatttattttattttatttttcttttttgagacggagtctcgctccgtcgcccaggttggagtgcagtggcgcgatctcggctcactgcaacccccgcctcctgggctccagcaattctcctgtctcagcctcccgagtagctgggactacaggcgtgtgccaccacgcccggctaatttttgtattttcagtagagatgggatttcgccatgttggccaggctggtctggaactcctgacctcaggtgatccacccgcctcgacctcccaaagtgctgaggttacaggcgtgagccaccgcgcctggctctatctttttaattcgccggacatggcggtgcacacctgtggtcccagctacttgggaggctgagacgagaaaatcgcttgagtctgggaggcaggtggaggttgcagtgagccaagatcacgccactgcactccagcctggaagagagagtgaaactccgtctcacgcacacacacacacagaaaaagaaatgcagggtagacttgctgaccaccctcatcaggctttgtaggggaggcgtctttctcctgtgcttgtcccttggtgctgctgtcaccacggtgcctgagtcttggtgcccccgctggagtctgaccctcgcccactgagtcttcgtcacatgtgaagccctgggcttgtgtgcgccagcctgccatcggcacttggtgcagcttgctggacaaacgaggaaagcgagtgggctgctagactgagtggctggcggcctgtccagaccctttccccggataggaacggcaggggcctcccatgtggcctcccctttcccaagcttctgtgtctctgcacattggagccatcggtgtgggagttttctggaggtcttgagggtgactggagctaggtcccagggaaatgaaagcttctaattggcttgggaagtgggagaggtggctccgtggagaagcagtctctctctgatggaaggaagcagag

SEQ ID NO: 915744 - DNA, 4001 bp, Homo sapiens
gcaggagggaaccatagagcctccaccccaaccctggctgagcgagagccccaaaagagacatccagagctctgcaggttggaaaagccctggggactgagctgcaaggagatctcagacacccacaaggccagacggaggtccaacccaaagaggggcctgcccacatgataaagcagcctgtctgcagcagcctgggtgccatgcccgtggagcagcctctctgagccccagcagcagggcagcagctcagtcctggcccagcccagacctcggggtctccacacagctcagcaggggcagctcaggacagacagcagagccaagcccacacaccctggccccccaggcccacgggctctgaggcagctttgaggaggtagggaggcccgccaacacaaacagcctatgctgtgggcttcctggctgcctcagcccctgcggggccccagtgcccgtcccaagccctcaccctggggggtcccaagcaagctggcactccctcatgcacacagaggagcagggactgggggctacatacagagtctgggtgggaccaggcccctcccacccaaacctgagccctggaggctggagacaccactctgatacccccagcagccccaggggagggacagatagtccagaggtcccccagtctttcctcctgggaccaccgaggctaaccccacactccaggccttccctgtaatcctttcctgcactgttgggtatttatctgctgggagtcgggggtgaaggcaacagacttaggaccctgggtggggggcaccttcccacaccccccaggctccaggagcagccgcacctcaggtgccatcccaccacagccctggccctggcccctgcaacctagacccctatagaacagtctgggggggcacatcaggcctgggcagctgcatggcaggcagtgacattcccaaatatcaccagccccgacatatgagtggtgaggctagggtcagttcagtctcggccccatctacaggccccaccgctcacagcgccggtctcccaggaccgtagagaggacccggccccatctacaggccccactgctcacaacgccagtctcccaggaccgtagagaggacacggacggcgtgggtacggtgggcagtggccttggctgtgtgcaccgctgaggtgtcgggcacgtgtgctcgtggcgccgtgtgcacccaccccatcccacagcaccctgggggtgagcacacatctgtcccaggcatggacagggccagagagcacaggtgtgggggcgaggctggggacagacaccttcaacaccctctcccagtcaaggtcatgcccagcctcagcggcaggagggatgcagccctccgggcgggcagtttctgatcccacctgagctttacagacagggaaacgtgggctgggatcccagaccagagtgcaagttcagctgaatcccagccagggctcagcccgtgctccccctcccagccctcctggtcccgtggctggcctgtttccagggcaacacccagggtgggaggggtcagcagctaaaacttcaatcatgggtttcccctggtcctttgccctgaagtgatccctcctctagcaggaagcagccgggggagcccaccctctgctccctgtgccctgccctgaccacaggaggctccacaacgcccccttctataaaaccagcgcctcaccctcctggccccatcccagacccccccccccagaagccaggccgagtctgcgccaacactccacacccaggagagaggggcccccacccgcccctgctggcgggcacagtgccctgccccgccaccaggctccctcccacccccgcttgcctgaggagggccaggcccaggctccccagggtcctcaggtagagcccagtcgggactgaggacaggcctgggcccccaggggcctccgcacatatgtggtgggggctcgggggagatgcacagagcctgaggctggggcagtctccagatctcaggggctctgctgggaaatggagggataggaagcgcacacactcggaattccaagaatgtcagcttggcccaagccaggatttggagagcagctcactccccaccaccccttgctctgagtaaacaactcctgcaggcaggaacaggggcgggacaggccctggaccctcctccaagaagcctccaggcccccacccactccccagggcccaccctgctaacatccgggacccccctgcccccctcacctccacagccaccagcagcctcgcagctgaacctggctctgaccccaggccaccgttactcagggcccctgtcctgcccttctgcccagagcaggatgtgcgtccactcatcctggggggagggggtcagggaagggaagtggcctcggctcgtggctccgcacgtggctgggtggggtatggcaaatgccactggggaagctgcccagggccctggccagggtgggagcggaaaccccaagcgtgcagtggatctggctagcaccactccggacccagaaaacccttcgtcctcctcctctgcaactaaggcagacgcagcattgccctgagaaagcggcagctgatgcctggaacccaacacaggtcccaccccagccagaagccccaggccggcaaaccagcccagagccccccatgggtgccgctttgcggcccacccacccccacagcccacctcgcacctccaaggagccttctttgcctctcactgcacaccgaccccccatttcctcacccccaccccaggggcacagcaagaagggtgctggtgccagcccccccgcactccatccgagagacacgggctcctcgtccctcgtcgtccgtaggccctgagctccagggcaagccagagctgaggccttcagggggtcctgccagtgcagcctccgggagtctgcccagggatcccctgtgccggggtcttccaggttcagctcaaaaagcacctcttccacgactccctccccgacctccctcccgggtcccctctccccgtgctcagaggcgcgtctgagcgtcgggagctcgggacggcgagcagccagcagagccgggacccgggagggcgcaccccgaccccattcccgggaaagagcggaaagaacgcggacaggagcccggggcggggagctgccggcgggggctgtaattgcgcagctgaggccagggcggcgcccctaggggctgggccgcgtccagaatgggacccccgaactcagcgccgagagccccggacaccccgcgggcagaggccgaggcggaggaacccactactcggcgcggccaggaggggcggcaggaagacccgccccggcccccgcccgccctctccccgagcccccgcgccggaccccacttgttgctgcgtgtcggctctgggctcgaactcgcgcgccccgctcgcgtccggctccagccgctcccggtcggacacctccggccacgggaccctggccgcacgcccccacaacccccaggcgcagtacctgcgccgccgcctcccgctcgcgccgcccgctcccgccgcgcagctgtcagtcaagcggacacgagaaacgcgaaccgccgccgcagctttacggccctgctcagacgccgtagcgccgggatgcaccaagacggtgggcgggggtgtgcggtctgctgctgccgcggccgcgcgggcccgggagccccgggacgcacaggcccaggagccccgggacgcacgggaagcccctatcgcggcggaaactgcggccagcggtggcggggccggtggagggacggccggaacagcggagaacgagcggagccgattctcccgcaacagtggacgcgcccggggcggggcctgggggggttcttcgcgtgcggccgggccgggccgggcagtctgggacgcgccgccgccatgatcatccctgtacgctgcttcacttgtggcaagatcgtcggcaacaagtgggaggcttac

SEQ ID NO: 915745 - DNA, 4001 bp, Homo sapiens
ccgggggagcccaccctctgctccctgtgccctgccctgaccacaggaggctccacaacgcccccttctataaaaccagcgcctcaccctcctggccccatcccagacccccccccccagaagccaggccgagtctgcgccaacactccacacccaggagagaggggcccccacccgcccctgctggcgggcacagtgccctgccccgccaccaggctccctcccacccccgcttgcctgaggagggccaggcccaggctccccagggtcctcaggtagagcccagtcgggactgaggacaggcctgggcccccaggggcctccgcacatatgtggtgggggctcgggggagatgcacagagcctgaggctggggcagtctccagatctcaggggctctgctgggaaatggagggataggaagcgcacacactcggaattccaagaatgtcagcttggcccaagccaggatttggagagcagctcactccccaccaccccttgctctgagtaaacaactcctgcaggcaggaacaggggcgggacaggccctggaccctcctccaagaagcctccaggcccccacccactccccagggcccaccctgctaacatccgggacccccctgcccccctcacctccacagccaccagcagcctcgcagctgaacctggctctgaccccaggccaccgttactcagggcccctgtcctgcccttctgcccagagcaggatgtgcgtccactcatcctggggggagggggtcagggaagggaagtggcctcggctcgtggctccgcacgtggctgggtggggtatggcaaatgccactggggaagctgcccagggccctggccagggtgggagcggaaaccccaagcgtgcagtggatctggctagcaccactccggacccagaaaacccttcgtcctcctcctctgcaactaaggcagacgcagcattgccctgagaaagcggcagctgatgcctggaacccaacacaggtcccaccccagccagaagccccaggccggcaaaccagcccagagccccccatgggtgccgctttgcggcccacccacccccacagcccacctcgcacctccaaggagccttctttgcctctcactgcacaccgaccccccatttcctcacccccaccccaggggcacagcaagaagggtgctggtgccagcccccccgcactccatccgagagacacgggctcctcgtccctcgtcgtccgtaggccctgagctccagggcaagccagagctgaggccttcagggggtcctgccagtgcagcctccgggagtctgcccagggatcccctgtgccggggtcttccaggttcagctcaaaaagcacctcttccacgactccctccccgacctccctcccgggtcccctctccccgtgctcagaggcgcgtctgagcgtcgggagctcgggacggcgagcagccagcagagccgggacccgggagggcgcaccccgaccccattcccgggaaagagcggaaagaacgcggacaggagcccggggcggggagctgccggcgggggctgtaattgcgcagctgaggccagggcggcgcccctaggggctgggccgcgtccagaatgggacccccgaactcagcgccgagagccccggacaccccgcgggcagaggccgaggcggaggaacccactactcggcgcggccaggaggggcggcaggaagacccgccccggcccccgcccgccctctccccgagcccccgcgccggaccccacttgttgctgcgtgtcggctctgggctcgaactcgcgcgccccgctcgcgtccggctccagccgctcccggtcggacacctccggccacgggaccctggccgcacgcccccacaacccccaggcgcagtacctgcgccgccgcctcccgctcgcgccgcccgctcccgccgcgcagctgtcagtcaagcggacacgagaaacgcgaaccgccgccgcagctttacggccctgctcagacgccgtagcgccgggatgcaccaagacggtgggcgggggtgtgcggtctgctgctgccgcggccgcgcgggcccgggagccccgggacgcacaggcccaggagccccgggacgcacgggaagcccctatcgcggcggaaactgcggccagcggtggcggggccggtggagggacggccggaacagcggagaacgagcggagccgattctcccgcaacagtggacgcgcccggggcggggcctgggggggttcttcgcgtgcggccgggccgggccgggcagtctgggacgcgccgccgccatgatcatccctgtacgctgcttcacttgtggcaagatcgtcggcaacaagtgggaggcttacctggggctgctgcaggccgagtacaccgaggggtgaggcgcgggccggggctaggggctgagtccgccgtggggcgcgggccggggctgggggctgagtccgccctggggtgcgcgccggggcgggaggcgcagcgctgcctgaggccagcgccccatgagcagcttcaggcccggcttctccagccccgctctgtgatctgctttcgggagaaccttatcccctgaagtctggggaagagaacggagttgggcttcaaaccagtggtgtcctggggattctaggtggcctggcgggtcgcaggcgtcttgtcacccgcagtaaagcccttggcctccgccctattcccatctctgcccccaggcccaccccatgtcctgcaaacctcgctgcaggacgggcgggcgcggcggctgacatctgtaatcccagcagtttgggaggccgaggcgagaggcttgcttgagcccaggaggtcgagaccagcctggacaacctggggagaccctgatctccagaaatttattttattttatttttcttttttgagacggagtctcgctccgtcgcccaggttggagtgcagtggcgcgatctcggctcactgcaacccccgcctcctgggctccagcaattctcctgtctcagcctcccgagtagctgggactacaggcgtgtgccaccacgcccggctaatttttgtattttcagtagagatgggatttcgccatgttggccaggctggtctggaactcctgacctcaggtgatccacccgcctcgacctcccaaagtgctgaggttacaggcgtgagccaccgcgcctggctctatctttttaattcgccggacatggcggtgcacacctgtggtcccagctacttgggaggctgagacgagaaaatcgcttgagtctgggaggcaggtggaggttgcagtgagccaagatcacgccactgcactccagcctggaagagagagtgaaactccgtctcacgcacacacacacacagaaaaagaaatgcagggtagacttgctgaccaccctcatcaggctttgtaggggaggcgtctttctcctgtgcttgtcccttggtgctgctgtcaccacggtgcctgagtcttggtgcccccgctggagtctgaccctcgcccactgagtcttcgtcacatgtgaagccctgggcttgtgtgcgccagcctgccatcggcacttggtgcagcttgctggacaaacgaggaaagcgagtgggctgctagactgagtggctggcggcctgtccagaccctttccccggataggaacggcaggggcctcccatgtggcctcccctttcccaagcttctgtgtctctgcacattggagccatcggtgtgggagttttctggaggtcttgagggtgactggagctaggtcccagggaaatgaaagcttctaattggcttgggaagtgggagaggtggctccgtggagaagcagtctctctctgatggaaggaagcagaggtgaggaaagaccccacagcggcagagcagggcttgctctggctggggtgggggtgaaccagctaagggcaggcccctggagagctaccctgccgtggccagtgctggatgaggtgg

SEQ ID NO: 915746 - DNA, 4001 bp, Homo sapiens
ggtggagtcccgcctccccctccaagccctcctctcacctctcttggctgctgggtgccagtggttgacactggagtgtgattggacagccaagcgggccaagtggacggagccctgatgaaggtcctcagcggcacaggcgtggtcgtctcaggcctcggagtgccccggcatggcctctgttcagctgctcaactgcaggtgggtggggtgggggagaggaccaacctcagaccggagtgtacatgtgtgaaacaggtgccgggcaggaccgacctgagcctgggttttcggagcccctgacaggctaggacccagggtagggacttttgactcgttacctcatttaatggtgccaaccctctgcaggcaggcttggagctactgagcgattttggtagtaagcagccacccagggcttgaacccagggctgaaatcaggcaggagggccacttataagctgcttgctgtgcggggtgagcagtcgtattccacaaagagcgtgcaccttcctgatccacggggaaaagatttgctcctatttgctggaagatccccgggagctcccaaggaatctgcagccaaggccctggcatctgagggtcaagctctcaggaaagtggggtgtcgaccatcaccttgagcagccctgttaggcagaggtaaatccccgcggctcctggagcgacctccagtggccttccacctgtaacactcagcacataccctgcctttccagctgggcagacaagtgctgcctcctgcacccatttagtgctggagtgactgggtgcctcagaacttgaatttccaggcaaaaaaagacggcccagccacacccttctgcactgtcctcagccatccatccaccgactcctctcctgctaccaaaactccttgcccgcccagagtgacctgtgtcttgtgcacccaataaggatggggtcaggggtactatcaggggctcttagtgccccccaccaggtcgaacacaggcaggacctcagttcctctgaggcgcgactctcctcagtgaagaagccaccccagtgaaaggggatacgcagcaccccccactgatgaccgttttaaagctggcaggaacggggcgggggaaataatttgcccaagtcacacagtatgttgcagacgaagctggagttcaaccagaaccctgcttcccagattcgcactcccgtcctctgcagcggaacgccgccgcggccagaagcagcctggtcagcggggcactccgacgggtagcggggatcgggctgcaagatagggactccggtagtccgtttctcggggttctcggcgaaagccggcaacgagtggaaggtagagttgactccttcatgtccgtaggctgaaggaagccgtctctttctccacatgaacgcagagcccggcctttctccactatatgtgccagcaagacctccccgccagagaacaaacgaactctcggtgccaagctggctctcggtgcccctcggcactgtccagtcgggctggacaggcctccgggcctcacaaggatgctgtgggtcccaagggcccggccgcgaggtacgggggtcggcgagcacagcggggccttcgagctcaggtattaaagctgcgctcggtgacctcccggaggctcggccggcccgcgcggcccgtcctccctcaccacaaacctaccggctcaaggctgctcggcagtctccatcttggtcggcgccgcacctccgtgcggcgcgctcagccctctgggaaaccgagtgctctgccggccgagcaccacggcttccgcgcctgcagaactacagctcccacaaggaactgggccgccgctcccgacgcctgtcgggacgtgtagtcctgtgcgcatgcgctcgcccctctactcctccacgccccggcccttgggtccggctcggaagcagccccggaaacgacggcatttgttggggaaacaagaccggaattgaccaagaacaggaagaggaggggccaggcctgcaattcccagaatgctcgagggctaaccgacagccaggctggcttcccgtggtctcagcgccacctgccggaagccgcgagaacagcggccgcctcaggcaggaagtgcgtcatctcgcacggaggacgaatgccgttcccggcacttccggtcctgaccggaagcggtaaccgtcactccttctgggctctgtcagtgcaccgaggcggggctccccaggatcccacggtcccgctcaggccagacgcagaggcagtcccagcccgcgatgaggacgtggggtcgtgaccgctgggccacggtgaagggggcagccctgctggacccgctagctgggccgacgctttcccacccctaggggtttgctgggccctggccgcaaacttgtggggcgccgtcctcggggccactgcccggccaccctcacacccttgggccctcagctctggtgcattggtccgggctccgggaggcactgagacgtccccctagggcgctgcagggaagcgagggccaggcccttccaggtccccggtcctcccgggcaggatggaggctgctgaacgctcctcaagcttccaagtcagccgtggctgggcgggcggcagcagggaaggtttgggctccgccatgcttgcgagccagcagcctggcctcgcctgtccgcagcagggggcaggtcagctgcccgccctgaaagggaggaccagggcccagattctccctgcgacaagccgcgtcttccttggccactgggccctagatggttggcaccttgtgccccttctcagctgggagagttcctgccccacacactcaaggattctgagttctccttggctgctagacctctggtccctctgaaaggctcgagagagaactcccccagggcctgctgtcctggcatccgctgggaaataggattcaaggacctgctgtggctcagcctagaaaaaaggaggggaagcaggacccactcctcggcccccggtctgctgtgcgcctttgggattccttatttcttaaactgctcttccctccccacagggaacacagcggaaagtagagagggggctccttggaccattatgttctcccaaccagtgcaggcttgcaagttgggagcagcaggggaggagggcctgctgagagactctgtaaccccctaaaatgcagggctggggacagtttccaaattggcctgcaaagaggctgctgggagccctagatatgaattcccaggcactcatttcctccagggaacagtgaaatgtgccagcacccccctccccacaactagggaaaagtagcctaacccagagcaagccccaccccacgatgtggggaaagataggagagtctagaccaagcccactggctggaggtgctcagacaaagggaaaaggacgggggagtgcaggggctccttagccccacagcctgtctgcccccaaccaccgctcgctggtgggctgggggggctccctagtaggatgaggtctttcttcccctccagaccctctgagatgtggctcaggcctgagccatcagctcctcaaaggaacatttacaggtaacagatgggcagggcagagaccctcaaatgctcgggagggggcagtgtgtccatcctttaccatccctcaggaggaagaggagtcctgcagcgcacccagcccctaccccaagcccatctcactgcattccctggctgcccgacccctcctgcccacctgcttacactgtgtgccccttgtgtgcccaaggggcagggtggaagtggctgcaggcaacacagggcctctcccaaaagagaatagagagaacgctcccaaaaagggcccttgctacctggagttgctccctggtttaaacccaaagtaaaattctaagcaaccccaaccaactgaatgggcacctcttggccaaatgcattctaaagtaaacctgaaaagctcgttgaggccatgatgactgtgggtggccgaa

SEQ ID NO: 915747 - DNA, 4001 bp, Homo sapiens
agggcgctaggggccgcttgaagcctccgttgtcactcatgctggtgtgggccacagaggatggagcccgtctggccgccccctccaggcagtcaaagatgtcacggctgcgctgggagaaggtggagctcatgcctctcagatggaatggctgcaccgtggctgggaggaggcctgacgggggtgagggcggctcatcaggacctgaatcctcctccccaggcagccccatcggggacagtgcttccacttcagcaccaccgggcaagctgaggtcagagtccgagtcactgagggagactgtgtcggaaggcagcgtgtcatactccgtcccgtgttcgccctccacgctgggggacggctcacctgttcctgcctcagccatgcgtccccagggccacgccacacctaaaccaaaacagcccagaaaatttgtttctcaggaggaacagtattgagaatgagttccccctgcagatccactgcccctggacaagtggagggtcaactgacagaactgtcccacacagggtggagtcccgcctccccctccaagccctcctctcacctctcttggctgctgggtgccagtggttgacactggagtgtgattggacagccaagcgggccaagtggacggagccctgatgaaggtcctcagcggcacaggcgtggtcgtctcaggcctcggagtgccccggcatggcctctgttcagctgctcaactgcaggtgggtggggtgggggagaggaccaacctcagaccggagtgtacatgtgtgaaacaggtgccgggcaggaccgacctgagcctgggttttcggagcccctgacaggctaggacccagggtagggacttttgactcgttacctcatttaatggtgccaaccctctgcaggcaggcttggagctactgagcgattttggtagtaagcagccacccagggcttgaacccagggctgaaatcaggcaggagggccacttataagctgcttgctgtgcggggtgagcagtcgtattccacaaagagcgtgcaccttcctgatccacggggaaaagatttgctcctatttgctggaagatccccgggagctcccaaggaatctgcagccaaggccctggcatctgagggtcaagctctcaggaaagtggggtgtcgaccatcaccttgagcagccctgttaggcagaggtaaatccccgcggctcctggagcgacctccagtggccttccacctgtaacactcagcacataccctgcctttccagctgggcagacaagtgctgcctcctgcacccatttagtgctggagtgactgggtgcctcagaacttgaatttccaggcaaaaaaagacggcccagccacacccttctgcactgtcctcagccatccatccaccgactcctctcctgctaccaaaactccttgcccgcccagagtgacctgtgtcttgtgcacccaataaggatggggtcaggggtactatcaggggctcttagtgccccccaccaggtcgaacacaggcaggacctcagttcctctgaggcgcgactctcctcagtgaagaagccaccccagtgaaaggggatacgcagcaccccccactgatgaccgttttaaagctggcaggaacggggcgggggaaataatttgcccaagtcacacagtatgttgcagacgaagctggagttcaaccagaaccctgcttcccagattcgcactcccgtcctctgcagcggaacgccgccgcggccagaagcagcctggtcagcggggcactccgacgggtagcggggatcgggctgcaagatagggactccggtagtccgtttctcggggttctcggcgaaagccggcaacgagtggaaggtagagttgactccttcatgtccgtaggctgaaggaagccgtctctttctccacatgaacgcagagcccggcctttctccactatatgtgccagcaagacctccccgccagagaacaaacgaactctcggtgccaagctggctctcggtgcccctcggcactgtccagtcgggctggacaggcctccgggcctcacaaggatgctgtgggtcccaagggcccggccgcgaggtacgggggtcggcgagcacagcggggccttcgagctcaggtattaaagctgcgctcggtgacctcccggaggctcggccggcccgcgcggcccgtcctccctcaccacaaacctaccggctcaaggctgctcggcagtctccatcttggtcggcgccgcacctccgtgcggcgcgctcagccctctgggaaaccgagtgctctgccggccgagcaccacggcttccgcgcctgcagaactacagctcccacaaggaactgggccgccgctcccgacgcctgtcgggacgtgtagtcctgtgcgcatgcgctcgcccctctactcctccacgccccggcccttgggtccggctcggaagcagccccggaaacgacggcatttgttggggaaacaagaccggaattgaccaagaacaggaagaggaggggccaggcctgcaattcccagaatgctcgagggctaaccgacagccaggctggcttcccgtggtctcagcgccacctgccggaagccgcgagaacagcggccgcctcaggcaggaagtgcgtcatctcgcacggaggacgaatgccgttcccggcacttccggtcctgaccggaagcggtaaccgtcactccttctgggctctgtcagtgcaccgaggcggggctccccaggatcccacggtcccgctcaggccagacgcagaggcagtcccagcccgcgatgaggacgtggggtcgtgaccgctgggccacggtgaagggggcagccctgctggacccgctagctgggccgacgctttcccacccctaggggtttgctgggccctggccgcaaacttgtggggcgccgtcctcggggccactgcccggccaccctcacacccttgggccctcagctctggtgcattggtccgggctccgggaggcactgagacgtccccctagggcgctgcagggaagcgagggccaggcccttccaggtccccggtcctcccgggcaggatggaggctgctgaacgctcctcaagcttccaagtcagccgtggctgggcgggcggcagcagggaaggtttgggctccgccatgcttgcgagccagcagcctggcctcgcctgtccgcagcagggggcaggtcagctgcccgccctgaaagggaggaccagggcccagattctccctgcgacaagccgcgtcttccttggccactgggccctagatggttggcaccttgtgccccttctcagctgggagagttcctgccccacacactcaaggattctgagttctccttggctgctagacctctggtccctctgaaaggctcgagagagaactcccccagggcctgctgtcctggcatccgctgggaaataggattcaaggacctgctgtggctcagcctagaaaaaaggaggggaagcaggacccactcctcggcccccggtctgctgtgcgcctttgggattccttatttcttaaactgctcttccctccccacagggaacacagcggaaagtagagagggggctccttggaccattatgttctcccaaccagtgcaggcttgcaagttgggagcagcaggggaggagggcctgctgagagactctgtaaccccctaaaatgcagggctggggacagtttccaaattggcctgcaaagaggctgctgggagccctagatatgaattcccaggcactcatttcctccagggaacagtgaaatgtgccagcacccccctccccacaactagggaaaagtagcctaacccagagcaagccccaccccacgatgtggggaaagataggagagtctagaccaagcccactggctggaggtgctcagacaaagggaaaaggacgggggagtgcaggggctccttagccccacagcctgtctgcccccaaccacc

SEQ ID NO: 915748 - DNA, 4001 bp, Homo sapiens
atcagaatgttaacagtttctctgataccaattaacagccagaaaatacagccctgaggctataacttgtttctcaatacccttctctttaatttcaattacatttttttcctaagagttataaacctgtcaagccacccaggaacttagagcaatcatttatctactccacttctctaaagcagaaattaatttatgatttactagtacttacagatttcatccacatttttaagaaatttctgcaaatctttctctttatcagcatccattgtgaaccggaatccctaagggatgcagcataatggtgaaattaataataataaagcactaaacagaacggtcaggcttattagccttctaaaactaagagccaagtgattatttttatgacagttttgtttatgtcaatgaataacagcagggtgatccctttcattccaactgctgttttaggccaagaggcactcatttacgtgcggcaatgcttccagaaagcttccagccctccttccagtgcagaaaacgctctgcaaatagttcttccaaagccaacatcaaccccggcgatttagggacctggcatggagatgagaagagagcagatgacaggttgccaaggatagagaaatacactaacacctgactttgatcatgacaggctggtctagtcagaagcttaaatgtggatgtgtgacaggtaacaaacttggggcaatttgcatctaaatgtccatacttgtttaaaatctgcctttggcttgtttctgaagagtgaagaaagggtacaaattgactgaagggattagaacataatgttaccatgctcaccagcgtctcttctgctctaggtacctcagatattattttacagttgtttttgtgcgagaaggccccgtggtgtacccagcagtactcagtggttcatccacagatcataaaaatcatcgggaagattgttaaatatacagcttcctcagccgtagcccgagatttcaagtcagtaaacccgggacattgcccagacacgaatatagattttaaacactttccaggtgattctcatttatggccaggtttcatagtagtgtaacacgcttctaacacgtaatctgccacgaacaaactacgagtgatttaatcgagtctcagtgtcctcatctccaccagttacaagctgtgtgattctggctaaattcacaacctctccgagcctcagagtcctcacccatactatgggaacagtaagagagaaactacgaggactattctggggactgatgtaaagcaccaggcacgcgacgagtcctcaccgtgaagcacccttacctatataaaacagggggtggggttgcggcttaactgaataatcgctagggtttcttccaggtcaaatcttttcaactcccacggaacagaggcctagtccagtgaattaatctgcccaacggtatgaaggttagaaggcaggcgcgcgggtgcatggacaggagacaacctctgtctcccagggcatggatctcagggtcctcactgcctggccagtgcccccctacgctagggtgagagggccagagccaggtgatggcgaagcggcgccgcgctcagtgcttcactcggtagggctgcggcagcggggacctgtgcccgagccccgcgcggagcctgccccagacgcgcgctgcccgccgggcgcaaagaggccaggccgcacgcactgttgcccagcaaccgctcccaggcgtccgcaagtcccgggccctccatgcaggtcccagaccgcagccgtcccagaccgcagccaagaccttcccatgctctggggcccaaagcagcgtcctctgctcggctctgaaggccagtgcaggaccagctcccaggggggattccggggtaccccgcggcaccgacctgattcgcccagctttggacaggaaatggcgcagtgacctgcctgggctggggcggggccaggagccaggggcccggggcgggaccaagggcggggccaggagccagggcccggggcgggaccaaggacggggtcaaaagccaggaggcgggacagggggcgggcatggacacgcgatcagattcgctaccgcagagctctagctccggagcgcgccaagttgaaggccaaagtcgaggttgggatgcccgatgcctggcgcggggagacggaggaagcaaagtgctggtaactaaagcagcgcctgctgctcgccttttttctactgaagaagggttgtctcactcccgttagcttaatatccttgcccaaaatgtaaagtctccagtgtacttgtgaatccggttttgttcattgataaatgtgtgagttagaagactcacacatttatccttaggaaagttatttgagtaacctttttaatcctcagttttctcacctgtgaaatggagaaatggcactttctcataaggtttatggttaaagtgctgtaaccgcccaataggttcaccttgctcactgcctaaacagagtcgatttatcaagacaggggaattgcaatagagaaagagtaattcacacaaagctggctgtgagggagaccggagttttattattactcaaatcagtctccctagctttcagggatcagagtttttaaggataatttggtgggtaggggtcagtgagtcgggagtgctgattggtaggctaggagatgaactcacagggagtcaaagctgtcctcttgtgctgagtcagttgccaggtgggggtcataagaccagatgagccagtttattcatctgggtggtgccagctgatccatcgagtgcagtgtctgtgaaatatcttaagcactgatcttaggttttacaatagttgatgttatccccaggagcaatttgaggtttagaatcttgcagcctctagctgcatgactcctaaaccataatttctaattttgtggctaatttgttagtcctgaaaaggcagtctagttcctgggcaagaagggggtttgtttgggaaagggctggtattgtctttgtttcaaagctacactataaactaagttccccccaaagttagtttggcctatgcctaggaatgaacaaagacagcttggagatgagaagcaagatggagtcggttaggtcagatccctttcaccatctcagttataattttgcaatggtggtttcagtgcctggtacctagtcagtaggaacaggtggcacgtgacatccggggaatcatagggtttagaacagaatgagctaataggcacattcattcatgccccaaatacatgcacacagccctaaagaaatttcagtctgtttttctaaacaaaatctcagagtattatgtgcagggttaccaatggaaaaaaagcaggtttaggggaaacttgagcttaagttcacggtcagaaacacccggaacttcttggcaaatgagtgctttatggaaacctgtttggcagggaacaaggagcccctagagatggaattcgccagaggggagagggatccaggcatggccagctagctctagtgttgattccaagtacagcctgttgactctcttgtggcctaggccccataggatgcatgcctgtgtcctgtagagaacagaagagctgtttggctgaagtctctatgatgcattggtacacataccatcctgcttgggtacccctctaatgcagtataacacaaaggggccacggatgttctgctcctcttggcagctgaatgggtacagcatcagcagagtgagtcttttggctcatcaactgcagcaggagacctggggatcccagcaggacatggtcacagtggctgtcccaagggaatgaggtgcctcaggagaagtagcagacagtgtaggtgcctggcaggagcaaggacgttgatgagcacaggctaggcacaccatagggatcctcagaaagatatagggtacttcacagtgaccttccagcctgtgggaattgatggagacaagaaccagtgatgttttg

SEQ ID NO: 915749 - DNA, 4001 bp, Homo sapiens
tttttaaactttaagcctaattacttagctcagcagtgacttggcagagatccaaaagattcttcagctcttccctgcttctctgaggcaagtttccagtaacccctgccttcccccattaatacatatgtatccaaagtgcaaaaagaaggaatttgttaaaaaaaaaaaaaaaatcagactctactttcccattgcaatgttaagtatatacataaaacatttctaccagctttcactttttagatgggctactttttcagctgagtggtaggacaccaaaatgggaaggagaagtcaatgtcatagagtataaatagctgtggccaaaaacaatattgcagaagagccaacaggagaaaggctccccaaaatgcagcaggagtgacttaattccacgtcttcatagagacctcagggaaaaccactatcaagaaacaaaagaagggtggaagcaaccagcactcacatatggtcttacagtgttttcttgggtttctgaaacacatacacatatatttaaagtctcagatagtatggcaatgaaaaggaaactgttctttatgtatgtcatatagaaaacgttacccaataggaacacggtcttttcttagatatgctgaaaaccactcatgaatacctaggcggatttttagttatacttaacttacttgagatagaatttgcaattacattacacggcaaatctaaatctaaacctcaccttaaacgttggaatgtgttcctatcatgattcattacacacaatccaaaggaccagtaatttcccaccacactagttaaaacgttttagatcagtgggctaaattgcatggggcacacaattcactttctaaatgtttgctagacacttcaagattgtcctcaagtgttcgaagtcagtaagtttaccaatattctgtagcggaacacacacacgcactcgttaggcatcagcagcatttacaaaacgcaggcaatcataaagttatataagaaaagcagtctcgcctctgaggaattagttcaggcatacaagaatccaggaaatcgcatatcctccatgcgaggctgggtcacaagaactaggtaaagaaacaaagcaaagtgcactgggaaacgagggcagtaacagctgaaaagatgcaggcaacgccaccagcggcatcttcaagcattccttctgaaggggagtgtttctatgttgtttctaatgagccactgctgacctgagtaacggtacaagctgaaaccaacacaaccagaaacgaaatccaccatgtggtagacgagactaggggagcagcacgaatggtccacaggctaggggtccagaagctgtcataccatgggactcgcgcacaccctggagctgccacctgctttctatttcctcggggagggccggtgacgcgtgaacccgagaggcaccaaaggcaggaatcctgaaatctgtgatttctaaaccccgagctaaaaaaaggtccgtagggcccgtctcccgcagctgggcgactcttccccacgcggcgcgcggcccgcgaggtggaagggtgagaacttctagggggccaaacgaggaccaggagacaagtggggagcgggaagtgcctgcctggtccgaatgcagggagtccgaggtcgcggtgccacctccctgtgagggtaggctgggggcggggccgcgcggagcccaacagccaggggccaagcagggtaatccccccggggcgagggcgggcacgggagaagagggacgccccggccgctacctgctgctggattttcccgtcctccgtgacgacccagtgcgtggtggcgaaggcccctcgtgccgccacactcagcaaggcggaaaggctgaggagccagcctgggccggagcaaggcggcagctcgtaccggccacgaacccctactgccgccgccatcttgcccccccggccgggccgctcacaccggaagcggaagctagtctccggcgcccgccatcttgaagaggtcggccctggaggaggagcaggaggaggagccgagagggcgtagctcgctgactaccaagtttcctccacctcggttttggcggccaggaagcgcgaccttcggctactctcccagcttggcttcagggatggagaccgctttttagttattgtttttctgtgggtgatacgatctcggagcgtgggaaccggagggagacaaaagcagtggcttaggtggcgcttaagcagaagtgaaaggactcaattttattgttttttaaatctttgttttttcgttttatttctggtagatagttggggaacaaaaggtgtgctttcgaaccacctatgggaagagaggtgttgcttttattcttaaagtctcacaatagtggaagcttcagaatggagacggttgttagtttagggcaccgctgtccagtagcactataatgcgagccacgtgtggaatgtaaaatatagagggaagtaaccctactagtacattttatttaactcaaagtacacaaaatattaattcaatgtggtctgtacaaatcattgagatagtttagtttttttttttttaactaagtcttggaaatcggcatgttacactgacagcttatctagtcatatttcaggggcttaatacccgcatgtggctaacgtactggtcagcacaggtctaagctagaggtctaggtctggagaccagaaacattggcatcacctgggagctttttagacctgcacattctcggctcttctccctctcccccgcaacctgctgaatcagactacattttaacaatagcctcaggtgactggtatacatattaaagtttgagaaccactttcttctagtgaaccaacaggcaggcaggcaggcgtcaagcttggctgccagcttcttgctagatatgtcattttaggtctttcaagattgccctctgtgtgtgttatttaaggttggtatgcttttggttttctccttgggaaaagaaggatgagaatattgtttaaccacttctctacacaagtgtatgcaggagagcagttgctaagtgtttaaacaccacgctatagaaatgtagaaacaaccacagcattggtgttttttttttcttcattccaggaacagcttttcttaaaggcctgaagactgaacattcatttcattaaaaatatatggcttatttgctttttgcctggtactctgatagtctctgggtatggaaatgtaaccattgggcagtgtgcaatatagtgagatattattggcaggttaacaattaaaatacaggataatgggggtgtatgaatgcatatgtacaggagagagcaaccaaccaggtgaaaaaaaggtttggagctcaggtgctggttcaggcagaataataagtgaaaaggtgaagttggccgggcgcggtggctcacgcctgtaatcccagcactttgggaggccgaggtggatggatcactgaggtcaggagttcaagactggcctggccaagatggtgaaaccccgcctctactaaaaatacaaaaatcagccgggcatggtggcgggcacctgtaattccagctacttgggaggctgaggcagagaattgcttgaacacgggaggcggggattgcagtgagccgagatcacaccactgcactccagcctaagtgacagagcgagaatccgtctcaagaaacgaaaaggtgaagtcagtggcatgttttaagagtttcttggagtttagacataggcaatagggagtgtttcagaattttaaaatagagaagtggcaaatgatggaatcccttttgtctcagcatcttatttttggggcatagaggtcaaccctatttcttgtgtataaagctgacatcatcatcatctaacatttcttgagtgtttaatacgtactgggtcctgtacatgcatagttcctattaatcgtcacaacttaccaagctctggctagttaagtaagttggccaagatcatattgctaagtggta

SEQ ID NO: 915750 - DNA, 4001 bp, Homo sapiens
gcagcaggagttttggacctctacagactgtaccttctccacccaccaactaactcccactcatccttcaaaactcgcccttcaggaacaggtcccacgctgacccctctcgaacttgttttgctggtctcagaattatgtgtctgccctgcctcctggactgggagcttttcgaggagcagtatcatgtggggattaagagcacacactcgagccctaccacctggttgacatcccagctctgctgctgcctgactgtatgatagtgggcaagttacttagcctcttcatgcttcagtttcttcatctataaactggggataacaatagtacatactttttagggttgttgtgaggattgatttactagtttgtatgtaaagtgattaatgcctggtacatagtgactgctatataaatgttggtgatccatataccttttatctcagtgtcctcagcaccagcctactgccacatagtaggctctcattaactgttccttaatcaatggaatgcagtctcttctgaatttcacattaaccccatgatattagcaggtcccctgatactactcctaccttataggtaagaagacaggctccacaggggtttagcaaggccaccccagccgcacagccacttcagttctggtctgtgccctcccgtgggcccttttgcagaggatacagggcatctccccttacctgccacgtctccctggagtcgccgggcctgggcacggttgttgtaggctgaagccctctcaggcagcaggcagatggcttggccaaacctctccagggctgtgctgaggtccccagcctctgctgccatcaccccctgcagctccagggccttggactgttccagctgtgcttgagggaaaacttcatctgggccagggaaggagccaggagaagccaggtgtgcagttggtagcaagaagaaaaagccacctcaggctttggaattctgagatctgagccagagctgactgggtatgggtcacagcaggggtcagttgcagtgtttggggtagggggagatgaggtcactaaggctgggagctagcattgcctgagttccaagagacctgggaaggggccttggttggttccccattgccaagagaatgaagcccagactcctcaatctgttaaagaagttgctcaagttctttgtgtatggcctcaacaggccatacgttgcagagcttggatttgaacccaggtcattctggctcctgtctgcattttactctactacaccgcctcttatgcaaaggccaccatgacattcccagatcatgaacatcacttctgacgtatccctctgtgtttcggcctgagttagtaaggtgtaggctttactcctctagaaacaaaggatcaaaaactccttcattagggattaatggaaaagccagtgaacgcactcactgcggaagagttagtttggagcttggcttgtgacagtgtttaacggttactggttgtgcttgctatattggaaccactcaactgagcaaccatgccctgccttatttcagtcttctgttctggtggtggtattctctgttatgacaaaaatgtgagagtttaacatcacctggcagttaagcttggatcatacagtcaattaagtggtaagttcagaggcatgagagctgatggatcgagagacaaaccccagcttactcctcttggcaggacatctcttaccaaacccccatcagtgcgctaaggagcagccaacctctctgattccaatctcaatcataatcatggaacaaggggccttataaaaccacctccctctctgctacctcgggaggccagcaggccagcctatgtgcagagctacactccagatcaaatgcccaccttcttctcgttcttccttttctgcttcctctccgaggtccaatccaacaatgtctccaaatggggtgtcagggttgaagatggcctgcagcactgcctgatcatttggagtccccatggtgctcaactccaaaatcccaaaaggtgactccagatgagagaagagggagggacgtggtgagggtggagcctccagcaggaagttgatctgaaaggatgaggaccaccccttcgtgaggagtgtctccctgtccatggctgtagcatttgctcaacctgtggcctggagggttgaccctggcttggcagactacttggttatttctcaactgcccctgcccccaggagaaacagtaaacaaatccagcttcagccttaaggtggagtgcagctagagaaggtgttctccagcttctccctgaaatgctttcagtttattatattcacagttgagaaaaccgataaaaatcaatacttaacctccttggatgaaacaggggagctatgtagaaggtaaaggccctgttcctttgtcctcttgaccctgcctcatatccacaattaattaggtcctgaacatacatcactgatgaataaaggaagaaaatagtcaagagagccagtgtggagtggacctgaaggtgggctacagggaataatttagtgatgccaccttaaagtaaaggactgtggaaggtactttgtgaccaggtcacaggccatgcccctcccgcttttctccaccctctccaaccaaagccaaaaggaagcttaaccatgtgcagcaataaacttgacatgtttattaattaaactatcacttaaataaaaaaaagtgcatagaaaataaacatgtttaaaaactccttttttttacaactatgtacactttttacttttacattcagtctttcgtagagagctttcagcattattattttttgaactattaaagtattttccttcatccctgtcacagggagttaacactgatggactttagacacattttccttttttttttttctctttttctctaaccagaagcttggaagaacacaaggaaaaaaaacagatctgttatacatgataaagttgtcaaaaaatgtcttatttctagaaaagaagcttgtcatctgttgagctcttgaaacaattattcaactacctgtatttactaaagagactgttaaaagttcaataaaagaaacaccacaattctattttcttggttgaaagacagaactagagtacctcggaacaagataccaggaaagcacagaacacaattttcccctaaatgcaggtggtaaccccaacattcataaccaaaaatagagaaacaaggaggacaggtactgactggcaacattcatgggcagaaaaaaatccaggtgacaccatgtctgcatttttctctgatccgaggaatggactgttctaccattcctttatggttagaggttccccccatttcgggaatcagaggaaagtgagcctgacatcttcctgccgctactagcaactgtaacacaatccttatctatagtgttaagagaattaaaagccatggactgaactaggctttgttacatggtgcattactatattagttcctatatatatcatatttatatttatttgaaaaccaaaacaaacaaaaagttgcaagtttccagagtgtgtgacttgactagtattcatgattcggcacaaaaccatctgctccataaccttgtattgctttaaaatgaaggaaatgaaacataaaattacacccagccctttgcaatgacccgcttttccttaaaaacaaaaacaacttgatttctattaaaaaaaaaaaatcccaaaccgaacttagaagttaacatctgacaaggttttgacctttagtattttcagatatttgattgaacgtcagtcctttagaaagatacattcattagaatattttttttatttttgtgtgtgtgttgtatttttttttccttttttttttattttttattttttttaaatcaagggagctacatggtgctcactgcattggccgggggtttgacggaggcgagcagggtggcgggctgggtcccggcaaaggagtctggttgaaaa

SEQ ID NO: 915751 - DNA, 4001 bp, Homo sapiens
tccttatctgtaaaatggtgataatccttgcagttttgtgaagatggcagatatctgtaaatgactgcccaacatgttataggcactcaataaataaaaattactgggccgggtgcagtggctcatgcctgtaatcccagcactttgcgaggccgaggcgggcgaatcacctgaggtcaggaatccagactagcctggctaacatggtgaaaccccgtttctactaaaaatacaaaaaattagccaggcgtggtggcacgcgcctgtatcccagctattccagaggctcaggcaggagaatcgcctgaacccgggaggaggaggttgcagtgagccgagatcgtgccattgcaccccagcttgggcaacaagagcgaagctcttctcaaaaaaagaaaaaggaaaagaaaaatgaggaaaagctatacgacccactgaatataagggatctaaactagcagctaaagaaatgaacgtgtttcacaaatattaaatgtcccttaaataaacaatggcctgaccttaagtatagtttttccctatagcatgcaaaattacctaaagctatcaacaatacccagaaggctgttagaaatgcaaactggggctgggtgcggtggctcacgcatgtaatcccagcaccttggaaggtagaggcgcgtggattacctgaggtcagtagttcaagaccagcctgaccaatattatgaaaccccgtctctactaaaaatacaaaaattagctgggcatggtggcgcatgcctgtaatcccagctactcaggaagctgaggcaggagaatcgcttgaactcgggaggcagaggttgcggtgagccgaaatcacgccactgcactccaacctgggcaacaagagcgaaactccgtctcaaaaaaaaaaaaaaaaaaaaaaattagctgggcgtggtggctggcgggcgcctgtaatcccggctactgggcaggctaagacaggagaattgcttgaacccgggacggggaggctgcagtgagcccagaccgcgccagtgcactccagcctgggagacagagcgagactccatctcaaaaaaaaataaaataaaataaaataaaataaaataaaataaaaaaataaagaaatgcaaactgataggccccacgtcagacccatccgaatctctggggatggggccgaggaggttgtgttttaacagactctccaggtgaagtctgagaagccctgctctatggcaacttaattacagccgcacagattgacaggttattccaattcatggcagaataaatggatgacagtaaaaaaaaaaaaaagtcagcgttttttcccccaatgttcacagatgttcatgttcctgtcttaatgctctctagccaccctttagccccgttcttaccagctagattgttatagcagtctgtctgggtggtatgcaatatgttttcttgttcaggcgtgagggccgggccctgaggtccgagattaggtaacggagagggcagactcggatccagaccccgcagctgaagcagagctcgatggtacctactcacagcatctcggtacttcccttcccggtagcgctggttcccttcctccttgtacagctgagcctcctgcagacgcttctccataactgtcgcccacggttcttgcggaactgggaagtgaaggagcaagtgaagctctggggttgggagcaaaataactgacagtagcagccaatttaaggaggcaggaaattacccttcttcctggagagtccccccacagggacctgcggtttgcttgtttctactgaaagccccacctctcctttctgcagtctttttctcaagaagtgcaggcaagtagtaaggaaagggatgtgggaataatgaagcccaacattaagtgacttcctaaagaggcgatgtgggggtggatgagactttccgaagaactcaagcaaggccctactcaggaattgttgcgggcgtgagaacgcctgggacactggcttccgcctttctattggacccgcccccccccgacctggaagtagaagggagtgggcgggactagtgctaaaactccagagggcttcaagcaattctaactcttcttccttattcaacatttatttgttgacgtcaataaataaactgggaagccgaggtgaaccaccagcgacactgaggtgtccacataagcgtcacagctgcaagcccacccggcgccgtgaccagttcctcgccctctgcagatgcccaaacctggaagtctcctgggcttcggtttaccagcaggagcaaggagaggaaagggtcagagatgcgtacagtttggtatcttgagggtcgcgcgcattgcgccacaccacccaatcagaagaggctccggaaaaataatcccgcagaaacgaccccgcctcctcagcggaccaacctgggaaaaaaaaaaaaaaaaaattcccctggcagcttcgccaattggaaaaatccggacgatcacggatgaccaatcggaacggcaaatgacgattcaagttgtccaataagagaaaaagggcgggttcaagggcctctgttgctgggtagaagttgaggcgttgaggaaaaaggagggcccggattacagtatttcttcgttctggggagcccttttgcttcctagccagaaaaacaattgctactaggcttacatgttgcaacacattctctaatgactttttttttgtcgttactgctgcaagcacagacagtagggaaaagaggctagcgacccctaaaacgccacagcaaatggaagtcagacggaagtaagggtggtgggaggggcatggcatcggggagctccgggcggctgcgcagaactccccggctggaagtactgaaagaccggcgcgcacacgcttccgtgctacgaggcacttgagctgcagccagccttgcccgtcttggactccactgcggctgcgcgataaaagcaccggcggcgattggcccgggggcgccagagggcgggaggaagcgggaggaactccgtcgtcctccgcgcgcgcctgcccgcggctggggaaccaagggcctggaggggaaacagctccctgctgcgttgttttgggctccgtgagccgaaagggggaggggagacgaaggagaagcaaacactgcgcagcgggaccgtgcgcggcctccgctcctgcgtgcgtgcgctcgctcgcgcgggctcagtgctggcgcgtgaggcggaggcgggcggcggcggcggcgcctgcgcggtcggactcggtcgacggttcgcaggggaggaggcggcgggaggcggaggaggcggcggcggcgatggaggtgaagcggctgaaagtgaccgagctgcggtcggagctgcagcggcggggcctggactcgcgcggcctcaaggtggatctggcgcagcggctgcaggaggcgctggacgccgagatgctcgaggacgaggccggcggcggcggggccgggcccggcggggcctgcaaggcggagcctcggcctgtggccgcgtcgggcggcggcccgggcggggacgaggaggaggacgaagaggaggaggaggaggacgaggaggcgctgcttgaggacgaggacgaggagccaccccctgctcaagccttgggtcaggccgcgcagccgccgccggagcccccggaggcggcagccatggaggccgcggccgagccagatgcttccgagaagccggcggaggccacggccgggtcaggcggggtaaatggtggcgaagagcagggcctcggcaagagggaggaagacgaacccgaggagcggagcggggacgagacgccgggatccgaggtgccgggtgacaaggccgccgaggaacagggtgaggagctggcagccgagcccggctccaacctgccggctgcgcccctgatctagcaccccgccctgcaccgcagggtccgagtccttgttctcgcttgcctcaaagtgccatttgatggaactcctttcattctcta

SEQ ID NO: 915752 - DNA, 4001 bp, Homo sapiens
ttttctttaggctaaaaagtcaacctggtttgaggccatgtgtaaaaaaggagagcaatggggtccctgccatgaaggccatactcgagacccctggctctccacagagcttccctttagggcgccatcatcacaaaccccatcagaaacccgggactgacatccatgaggaggcaaagcagagccccaggtgccccccatttctctggcctggtcccttggaaggacagacagacttcccaggtgttggggacgcccagcagacactctgcagctggggacaggatcctgtcattttgcctcatctgtacacaagacagcaccccctccttcacagggcagttgtttatgaccattctgtgggccaagaaacatatccttgggaccccaacatgtgtaaacaacaaatgaggtcctggttaggagccttaggcaagacccacctcctgatgttagaaagcaggcttgggacggcaccccggggcagggcatctccacatctgggtgtttgggcaatgggagggcaggggggctggaggctctgccaccatgattccctctgtggtcctaggctatggtgtgaccacatgtagaggacacctcctttctgagaaggcttggctgagagtcccagcacaggctagtgaacagagcccaggcctctggacctgctcatcagcatcacccggttagagtcaaggcaaaaagaccacaggaggatccaagagggacaaacccaaggccacaatagtcacacacaataagagcaggctttgtccagtggtcacaccctcccctaaaccccatttcacacacacactcccaggcgcatatggggttcatggcccctgagccacccacgtcttccgcccacctccctcacagtctcctgtggttggccctttcccagggccggcacgccctcctcccctccagctcaccgagcgatctcccttccttccttccagtacttcctcctggttgttctcctgaggaggaaaagaaggggtgactctccacatccttgcagcctcacctcatcatccctgcctgctgcctggccacacctggtcactcaaggcctccttcagtgccctggtctcagctgcctcagtaggtgagttacgtgatggatcagggtagagggacttccatagagtgctcactctgtgggccccggatggcaggcaggcaggcaggcagtccagatgagggcagtgatgacctgagccatgggaatgaagcactggggggtggggagacaggcagaagctggaaggaggagccctccagaagaggcagagggccggagtgtggagctgccggagccctggaggctgggggagaggcccttactcccatggtgggggacctccctgaggtcctgggcagctcctggagtaatgaagcctccctgatcacctgtctggagcaagaggggtttgcggggatatacctgtggggctccacgtggtgataggggagcagcaccatcaggaaggggaggccttgggactgtaaagggttgaggtcagtgagggtgggtgggtggagctgacgcaatggttgggcccatgggctaaaggcaggatgttgaaagcttaccgatctcttcggtggccccgtttcaggggcccaggtttcctgtgctgctttgaatgctgagatcccatgggccagggagtgcctcctgggaacaaaatccctgtctcggcaaagaaagaaacccagaaagaaggcaaaggtgtcctggcccccatcgtggccacaggatggagtgggtttaagggatggtcccacttcaggctgcatagtaagacctggagcctgttgaaattccctgtattcgcctcagtactgaaaccagcacttggatgtctcccttcatcaccgtggcaacagtcagactaacaaccaccatcacccattaattaggacatggaaacatcttctggtcgcagtctccccccaaacccttcaggaccagactgaatcctcaaggtctcagtggccatgccacacagggacacccaattgctggtttccatggcaacacggaggccaagtctctctgcatctgtgggttactatagcaacccaggcagagacaagtgcactgcggacaaaggccccatctggaggaaccaccgaggacacattcactgctgccctctctgcggccagctctgtgctagggctcaggctgtgtgctgggaggggcacacatcgtgccttctagggactgatggaagatctaggatttgcttgtctgtgtcctcagcctcttgtccccttgcttcacctgaaatgcacctgggtgttcccatccactcacaaggcttcatctcccacaactcttacattgagaacatccaaggctgcattgtggacccagccctcttctaaactctacctacctgctctctggaccctgcaccccggatgtcccacagcacctcacgttggggtatgtagttttggacttcctgtgagtctgaacattcactctatacattctgtctctgtgagtgacatcactcagccccttgaggcaccatcgtagctttctgcttttccctgtccaccttcctccaccaacccagacaatcatcaagcactgctcatgccatctactgagcatctctcaattctatgcacctcaccttccctagagccacttctgagctagggccttcctgtctgttgcccagatcttggcatcatcatgggcatctacacctaacttgctcctctcaaatccatcctgcaactgacaccagagtgagcttcctaagatcatgtcctcccagcctacttaaacccttcagaagacccccacttcctctggacagaatctaagctactttagtccgcccgatgatcctgccaactgtccagccttatctactaccaggccctggctttaactcctaatgacaacatcaccttctgtctgtcccttccctccctccagccccactacttcccctccatgtccatcctcagccatgctcttgtaaaaattacacccagattttcaatgagaacttggaacaataattaggaatcttcagaatccaatttcaagtatcagaaggaaaagtgatacccagatgcaaagctggacattgctgaccccaccccaaatggacgctggagacccagacccctcatctgctaagcagacagactgtaagtggtcatggaagaagggtgcaaaagtgaacacattctgttaacactcatggcctccagaaaacagaagaatcacggacatcagctgagaagcgcatctcatccttcccctcccataacactgttgggaaaatcaggctcagagaaaggaaaggtcaaagccaaggctcccaatatggagtcttccattctctctgcttggacacatgccccaaagctgcacagccagcctcaagggagtcagtgcaaggggcacacgcacagacatcctgcatgccggcacctgccaggtggggaagtggacgtgtgcatgcacctgcaactggagacctcatcctccatctcccagaaactctctttcaggtgtctttagtcttgctacaggtggaatgagaccctccagtcagagtaaaaggacatctcaaagccaatgctcaggccagcactttctcaagcacaacatcctccctggtttccttcctgccaaagctctcaggtttggtcacagggttaaaccaaggaaagtggaccaggaaaaaaggtgaacttatcaactgtagatgaagccagcttcctccagggaggtccattcttaccttaaggctggaccatggggcccgtgctactgagacttgtgccatgaccccctggaggacaaccggggaaagatggtcaaacagaacctcagggctggataaactgcatctctcaagggtcatagctccctggggcaggcagcccttttgaggctaagctgctggatggtgattatgaaacctcctcatgcacactctgagcatcagggt

SEQ ID NO: 915753 - DNA, 4001 bp, Homo sapiens
cttggcctggcccaacctccagtttgccagatcctaaccacgtcataatctccacagccgtaagtgctgcccctcccaccctcctcggtccatggccaccaccctgccatctggacccccgcacacaggtacttccacagcaccggagtccactcagcccacaagcaccgcccaggcacctctgccgcgtggctagaaaaggttgatgacgctccatggggctgcactgtcttctagaaggtcctcagcccacatgtgccaagaaaggccaggatcctccagaaactacctgtgccccagcctggacgtctgtctggcgcagcagctcttctcagtcagcacagccccagtccctggttccatgatggaaacagctccctaatccatgtgagactgaagtgtgactacatgtgtctgcaggagagcctgtgggtgacctgtatgtgcgcacgtgtgagggtgttgctggtggttgtggggagagacacaaaataacctggaaacccctgaatcccccacaggagctgagattagaggtaacaattctcaagagaaaccctgagttcccaggccacgtgcctgttttcagaaggatctgcttttaagaagccttgggcggtttcagctggtttccatttgggacgctgtctggacagactcagagaagagccctgtcagaactattttctatcagtgactggtatgaggctctaacagagagcaagctgtgttacaaggcgggacctgaggatctcatcctgccgtccgctagcacgtgcacctgggtcgacaataacacagtgggccttaggagtccagcacccattttccacagagacagccccgtagcccatggcaaccaaggagccaatgggtggccaagaatctggcgctgccatggcgatgagctcccttccctggtaatagaatggagtagagtggatagggaaagacctgcacctgtgaggggccccccagagaccacctccccgcccccttcccaggcaaatgggaaagcccagccatccttgagatagaccacagtgcctggcagcagagggtggggggcttccctgagtgtgcctggattcttgagtgcctttctgcatgtgagggcagttctatgtactgtgagctggtgtgtgtctaggtatagacctgctagcaagtagattattcagtgtctgaaagagactgagtagcacttgtgagtgagaagcaggtgtcagttattctccagatacaggaggtggacgtgcacagatatgcaggcatgtgtctttgtgagcccaagaattcttgtgtgtagaatatacgggtgcatgtccacatgaccactggtgtgctcttggttcagaataactgtcttcacggatccatgctttgagagtgtgaaccgaccagcaggagcgtctttggcccaaggcagggacgtcctgtgggtgcatgcgtgcagatgtatgagcgtgtgcgcgcaccctgcacaggcgtgtgactggggttctgggcctaggagggggctcagagcagtgtggactccttccccaggcggccacatggtgctgcctgacccaacaaggcccacacaggccccttccagcaaccctggcagataagggggtggagcggggcaggcgggagcagtccgcaggggccctcaaagttgagggaggaaggaccagcgactccaacccgcgccccagtgctgggataggtggggagggcagcggtgccctgcgccccggccgcgtatccccagccagctcacgtcccgagtcgggagtggtgggcgccccggcccggcgcccgcgtacctgtagggaatccagtcggaatgcggcttggaagtcatgtctctcgggggcggggcggtggctgcggctctggaggccggggcccggaggggccggcgcgggggccctgctcagctcccgggccgccccgggccgcatcctcccgggccggggcgctgggccccgccgaggcccgcgctgcacgccagggccccggctgctggctctgcgagcggctgcctgcgcggcgcggcgaggcgagatgggcgaagctccgggagtgcgcgggtcgtgcgcgcgcgtggaggcggggaggccgaccgcaccgtcccgcgcccctctggcgccaaggcgggagtactgcgtggcagcggcggcctgccccttctccctcgccccgccccgccccgccccgcagagaccccaccccccggccggctcagggcctgcggagcgcccttgccccctcccccgaaatcgtcgcgatccacgctccatgcgcgtgaccgcgccggctcccaccttcggctaacggcggcgctgcagccgggccagtccccaggcctcccagcctcagtttcgtcttctgtgaaacggggatcattcgaacacctccctgtgtacctgccctacctatctgcgctatgggatgggaaaccgatgcgcggatttggcggggcagggaccgggccggaggcgcggatggagaaggaatccagtcgtgcaggaagaggcgggggaacctccgggccgaagcgtggaggttggccttccctcacccccacctccgagttcccacacccccgcctggggaaccctctgtctttgggttaaggaggtgtttcctcagcagtggctccctcccatctaagctatagcgtcaagggaaggggaacatttacggtctattgcattcccagcccttgcaaatttctagtatgtaatctccacagtagccttgagagacaaacatcatatccctataacccagagaataggaatgctgagatgcccaaggccgtaaagctaggaagtggtggagctgaaactgttctgtgatctgtgtcctccaaagcccttcctaaggggcgcagttgaccggaggcaaaaacccctacaaagatcatctgaaagtctctgcgcgctgaggaggtcctggctgtgactaggaccagcttgaatgcaaggcatggcacactgagaaggtgcgggacccacagcagggcgggcggaagcaaggagcagcaggctgaggggtcaccaaggcctgcgtgtggagcaggtgatccgggagaggtctgcggaggggcacggtccccacacgccccgtgggcgtcctcgtgtgcatcctggattctgccgcgccaaccgcgccagaagagtgttgtgcggggatcttctgatgataaataggcggtcaggactgccccgcagagagtgtgagaacagccaagggggctgagggagggggctcatcctgctgccctggggctacagccagacccccaccccagggctctcccagcccttcagccttgccttctcttgcccattaattataaaacacaataacccacaatatttggattatttgctgggcgtcaggagctgtgttaggtgctacgtacatattataattcgtttaatcctcatagccaccctagaaggtaggcaccattagcatacccatttcacagcagaggaactgagtcacagagaaggcaaggatcttgcccaaagtcacacagctggtcaatgatgaagctagcattcacacacaaaaggtctgggtctacagcacttaccctcagcctccttttggccaatcacagttcatgtagtgcacacacacacacccctacacacatgcacacacacacgcacacctacacacacctacacacatgcatgcacacacacatggcctctctctccaggcttctggagctcaggacaggtcagatccatctctgtcgggcacaacattgatgctctctgaacactatgacctctgattatttatcaacctccaagagctgtcactgtcactggggacagagagcagacaaaataaaacacctgggagtggggtgcagaaggcagaaagcagggctgttttgttgcctgctgggatgcttggcctggactctgctggccttccaggaagggcagcagagattggtccctaccctggagaccgcagcagag

SEQ ID NO: 915754 - DNA, 4001 bp, Homo sapiens
ttttacttaaagaacagtgtgatagtaaagtatttcttaaaccacctatttgtgctaggtagagttggaaacaaattaacaggtaacttatccaggtcatctacacaagaactaaaaaaatttggatcatggaatactttgtggatcatctttggacatggtataatatagtgatgtcaaaggcaggatctgaaattacattgcccaagttcaaatcccagctctgtcaacctgtgtgagaccttggtcaagttatgaagcctcactgtgcatcaacttcctcagatataaaatggaaatatcagtatctagcacctcacacacaggtattattcagatatatcacttggcagagagagtctggtacacggtaaatgttgaaaaactaaccgttgctattattttattgagttagctgcttgatgtcaccaaagtaaatgtggggccaaagaagactcctaggtttctggcttggcttactggatgaacagtgatagtgccattcacagtgaaaaggaagaatggaagtaaaccctgtttagggaacactgtgattccagacttcaaaagtagggctgggcacattggctcacgcctgtaatcccagcactttgggaggccaagatgggaagatcgcttgaggccaggaattggagaccagcctaggcaacatggtgaaaacccatctctacaaaaaactaaaaaatttgccaagtaggccgggcgcggtggctcaggcctgtaatcccggcactttgggaggccgaggcgggcgggtcacgaggtcaggagatcgagaccatcctgactaacatggtgaaacctcgtctctactaaaaaatacaaaaaattagccgggcgtggtggcgggtgcctgtagtcccggctacacgggaggctgaggcaggagaatggggtgaacccaggaggtggagcttgcagtgagccaagatcgtgccactgcactccagcctgggtgacagagtgagactctgtctcaaaaaaaaaaaaaaaagaaaaaagaaattagccaagtatggtggtgcacacctgtagactcaactacttgggaggctagccaggggtatggtttgagcccgggaggttgaggctgcagtgagccaagatcacaccaccgcactgcagcctgggtgacagagcaagaccttgtctcaaaaaaaaaaaaaaagtggaatttgaagttacagtgaaccccttgtgtgtcatacaagaaccttgtctatttttccaaacccatcttctgtctcttcctcactggtaccttatggtctagtcattcatgccacacctatttcatccatcccctcctttgagtaggtcctctgtagggcttctctgatttagttactaattctctgtggtcccacagttctccgaacatatctataaagcattgaaactttctcattctctagacggtgagctccttcatctctgaacccccctcccccaccctaaagatcagcagaataccaggcacagagcatatgtccaatagatgatggttaaagaagtaataaaacaattaaacttgcgttgtggagatttcatatactgaggagtgtaatgtggtggaactttcccgactctccaaatcccctcggacttgcagagaaaaacggaggtgagagaccctaccaatcaacttgacaagaacgactgactacctataaccctaactttcgccaggatcaaaagacgaaagcccgcaaccacccccgggtccctcactagccaccgcttacggttggctgtagtaacgtggcagaggcagcagcggaaccccccacgcggcagcgattcgacatccgaatccaccgccgccatagcgactctcctgtaccgacaaaaacacaagcacctctgccaccaccggaacccacttcgccaaagctcaacgcgctcggaagcaacttccgccgatccgataggaagtgacataaagtcgttcaattgcgcggacacactcctccggaaaccaagctccttcgactctgggttccgtttctagccgctgtccagtccccgcccgtttcaggaaaagcggcgcgttacgatgcttatctgcatgcggtaagccgattggtgtgctttaagctgttcagacgttgattggcccaaagcatcgtgaatattcatgacagcagccacaaaggccggcgccgggtggcatcttgcggcagctccttcaccccgcagtagacacccgtgcgtctgtaccctcgacccttatttacccgacgaataaaggcggaggatcggcggcttccaattctttgccccacggagcccagggctgtccctggacttccaaccttttcagggctgttactccctccctccgccccctgtcctcccgcaaaacgggtgttctgcgacggcttctagccctggttggggagctctgccaccaccgggcaccttccggactccacgaggtcctggagccaggcccattccttccgcagtagtgggctgcgtggtgtacgccggaggcgccagagctactggcgcacctcagagcagtgcgacaagacaaaaccgagtgccagtaactgagtttagacactggagggggcgaatgctgtcaaccccctcctggtataattgtcagttcatcccaacgccgccgaggtgtaggctcaggacagggagggactacggggagctggggatgccctagggacagggaccataacgaggtggagagaactatcagatgggctcagcagcttgtgctgtggttatcagcccacagctttgaatggcgcaaagagcagtggacctaaggcagacaccaaggtctttgaccttgaacaagtcacaactgttgaggccgtttcccatctctaaaggaagtgcccaaggagcacacagcaggctgaacttcttgttctctatcctaaggtgttccttctaatgggcccagctcaggcatctaatctcagtgtcccaaacctttaaggcaggaaacagtgctacagtggatcgggatatcatcgagactggccttgaggatcctgaagcagcaggctgtacacatacacccagaggtgctagggtggttcagtggtagaattctcgtctgccaaatacaccacacagctaggtgaggggatcctcctataaccccaccaccacccccaagggggtatacatgttaccctggctgctagcaacttccagaattccttaaacaaaagggagaggggagtaagaggtgggaaacagaggaagaaacacccccattcccctttcctatggaggccaccagtcatccagaaagctcatctcaactcctttgaatgaatctgggccaagatggttcttgagctccagcaccactgggagctggggagcagtttgggtcccacaagaagcctagctggagcaagccgcctgggtccaggctgcctatctcataaagctgttcccagggcaagaaccatctgtacctcctttgttgtcctttgtcctttattttccctctcaaagacacccccaacacacacacaacacacacccatggcaaagaacagctgagccaggagaagctgaagaaaacagctttttatttgttactataagaaccaattacagaatccgaggttaaaaaaacggacaaaagatctttatttctgagaactggcgtacaaaaggcagagggggaggggagggaaggaaagagcgagcgtggcctggggttgatgccagcttaggggcctcaaactccaattaggaaagtccggacaccggacagaaagagaaacccccaattaggaaaaaaaaaaaaaaaaaaaaaaaaaaagacatggcagtgcacgcccccctcccccaaccaggtaccaccacctgttatctgtttactcttcccctccccatcccctttcacaaagggaggcaaaatttttaaaaaattaaaaaaccctccccccaaaactgtccaagacatctgtgggtcctaccccccaaaacaggct

SEQ ID NO: 915755 - DNA, 4001 bp, Homo sapiens
aaagcattcctttaacatatggttttaaaatgataaataattaagcacatatttctttggttaccatttgcccctaattcagaatgaaaaattcagaatagatgaaataggaattcaattccaaatagtaatgcttcatattttatctaaagttttcaaggactgagaaagaaagctaacttctaatgcagcctaaagaaaaagtgagacagaatgaaccagatcctttagctaaagatatcacagcagtcacatccttggaaataggatacagtggtcatacagctggactattagagaataaatgtgattttttttttgctgcttattagctgtatgatcttatacaagttacctgatacctttataacctctaaaatagggaaagactgataagagcatgaaatgaacgaatgcacaaaaacacttgccacggggtttgcacatgctagatgttcaatgaatattagccatcttcattatttacctgtttaagcctcaggatcttcatactttcaaaaatgaagatctaatccaataattatttcccaaacattcctgattaaaagaatcaccatagacatttagtaaattgtgccttctcgggactctctcctgaagattctgaccaattagtctgggataaggccaggaatttgcatttttaatttgtacaccatatgaatcctgttgtgaataataattttatttttcagagacattagtgtatatcatttgtttttttaatcatccagatattcattcattcactcatttattcaattcacaaaatacataatgcactattgccatttttaaaggcaccatactatgttctgggaaatgcaataatgaatcaagtactctgttcattgcagtttagaaacctagtagaagtcattaaacaaataattacacaaatatctaaagtgtgctataaaggaaaaatacaagatacattgagagttcttaacagggcaccatttctgtccttgatgggggctgcaatgagtgttcaggtgagaagtttataccctgcctgaagaagtgattgttaaggttcctccctactctgacatcgtatatctagcatatcttacctgccaagaggagaagaatgatgctgggctgagtaagttaggatttgtggggtgctgacctcccatgtactcatctgtgcaaatgtcacacttttctgcatcccgccagtcccaatatggaatagtgaagttttcatctcctgtcagcttctggatttcttgttcccaccgcaacaagaagagtctatgccaaggcagaaaagctggtgcttcatgggcaaaatcaatgtctctccagatttcagatcccccaagcagtgcatccattgacacataataatgcatccagacaaagaggtcataaatattgatgtcgttaaacatgggtgttgatccatttttcatttggccataggtccctatggggatgacatagtctgagctgatggtatgctttgctaaagtgaggtaggcaaaaaatttgtccttctctggggcactcaaatcgaagatgtttcttctcaccaagagtcgtctctctgtgcagtttggtccccaaaagccaaacttgcagtttccacagttgaatcccatgaagttgccagagcactggcaggtcctattataaaagacggaaggccacgactcccggtcatccacccctgtgaagggaaattgaggcccaagtggtgcattggacagaaggatattctgacaggaacctctgcctgaaagctggccacagggactcctgtccccgctccacggtggacagcattccttctccatcaggttcttagaggagacacaggctctagggaaatggccagcggaggtctggaaactccacagcaggcagtacaaaacagccaggagcattcttcctctagtcctcacaaggtctgcaggaactggctaattggagtcacagatttctctttccagctactactacagtgattatcacatgtcttggctgagacctatataataccactcccacctccagcatcaaacacttttagtctttatcttaagctttcatcctctgaaaagcacatgactgacttttctttcgaattggctcgtatcccaccagtgggataggcctatgttaaagtgaaaaactctattcaccattaatagtttaattcttatggttagaatattaacaataaggttagtaataataatgcctgacctaagcaaacccagttaatagactacaaaactaatgatgatttgaccttgcaaatgagaggtagtgtcaggaatagagcttctcttattaagaaagtttaggaagtattaaagattatgggtttaaggtagttatttctcagagaccataaagaggctacaatgtttgaagaactcaatatgcagagagagattgtcttcagagcccagacagaattccttatatgttattgaatttcagtttgtttattttatacaacgtatcagaaaaaaaaatctttctgatacttttctctgataatcctgatgcattttctgacaactcctaaggatagctcactttgataactgggcgatttgcttcattgtggggatatctcacgttaaagagctctctctctctctctccctctctctctctttctctctctctctccctctctctctctctctctccctctctctccctctctctccctctccctctctctcccctctatcctctctctctctcctctgtctctctcctctctctctctcccctctatcctctctctctctcctctgtctctctcctctctcctttctctctctctcctttctcctctctcctttctctctctctccaatgctgtagccatattgtttttcctatcaattctagaaattaggaatttttttgaaaatgtttttgcaatgtgttttgtgcaaagacattctcaattagtgagtgaatgaaaaaggagaaatatatttcttcagcaaatatttttgatcatctcaattatttcaaaagttccttctctgtgtatagtgagctagggaaactgaaattcatggctaaaaatacaacttaactatgttagttttcaaatgagtagtatagataattaagtcaaacttttaatggaagagatgtatttgtgggctgatattagaaagaattgcataattttgataataatatgcaagtgttatcaagggagtgccttgattaatatctcaaagagtgggcataagttggacagacaactgagaatatatacaactcctgagacaggggaaatgtgtagaggtgggaactgtgtttcatctatcaagttggagcattaaactgaggcctccacacatcatagaaaattaaacctgggaccaatctatggaggggcttaaagactttgtgttttgaactaaagtgagctcttttgtgagctgaagagtgacaaaaagagtagtcaaatcaaagttgcccctctgaagcttccttctttgtcctcttccatacttaaagtttgggggtccactgaaattaatgaaaaagtaaaagaaagtgaaagctttgaggagatcattagtatttgggtccttagctgaagcattctaggaaaagccatcactatttcgatgatgccggaatgtcagactgctctgcttttttctctttttctggagtttgtctcattatttaagaaaaaaaaaagtcacggctcatccaaacaacttttttgagacagaacaggctttgcaggtacatggagcagtgtgtgggtgaagaggaagagaagtttccatggaaatgctgcctctggctggaatcaggaagtcatcacatgatctccacaaggaggcttaatcttttctctctctctttctttcagagccacaaagagattaacacaagacttcttgtccctggggagccttgggtctgcattacttgtaaccacatgtggcatttcataattcttttctatgttctcg

SEQ ID NO: 915756 - DNA, 4001 bp, Homo sapiens
tgtcccagcagcctggagaataacaaattcaagggtctactttgattaacagattacaaccaagttagtagagaataaacaaggtttgcccagagataagggaggggagacataaagttattgcctgtaatcccagcactttgggagaccgaggtgggtggatcacctgaggtcaggagttcgagaccagcctggccaacatggcagaaccccatctcttctaaaaatataaaaattagcccggtgtggtggcgcatgtctatggtcccagctactcaggaggctaaggtgggagaatcgcttgaacctgggaggcggaagttacagagattgcgccactgcactctagcctggcgacacagcgagactccgtctcagaaaaataaatacataaataaagttatcacctgaaaaaaaaatgtgagaagggaaaaaaataaaaaggactttcatttacttggccctcactgattaagtttggccaactctcctgttcaggtgctgtaattcaaagatgaaaagaagctgcgcccagtccggacgccaggccttgtgtccccacctaagaaatctgcacggcagggattaaccaggggagaagggcctggccgctgggccttggcttcctcttaggcagagttccagcccctgagacttgagccgaccggcctgagacgactccggccgccgccaccctatgctggcaaacaggcctctccccagcaggctccaggggcagccacctgcgctctccctgccctcccctaccccactctcctagaggaaggatgaagaacagctccccctccttactctcaggcacccacagatttctgagctgccgtcaccactgacgagaacccaggtcccctggagggatcgcttctccttctgattccatcctccccatcaatgaacacgcaggaacacccacgctcccgctcctcctactccagggggagaccgaacccgagagcgacatccggagctggaagccgctgcaacgggggcgccggcctccctgccccgcagtctcccgccctttcccagacaccggaggatcccagaccagcccagtattccagacggagagggtgcccgagtcctccgcagggccccgcctccctaggcgctcggcgctggagacctaggggagcgcgcgagagaaacgctgagctccacccggctggggcggaggctgagcactatacccgggactcgaaccccgcgccctcgtcccccagctttaggcatcccacggcgagccctggcccaacgcccccgcgccgcgtcttcccccgcacccccgcccggagccgagtcccgggttgccagcgcgcccatcccgcccccaacaggtctcgggcagcggggagcgcgctgcctgtcccgcaggcgctgggaggcgagccggagcgaagccgagggccggccgcgcgcgcgggaggggtcgccgagggctgcgagcccggccacttacgcgcgggctctggggaaccccatggagaggagcacgtccagcgccgatccatgcttgatggtgccggggcgctgttggcggttcctccggggggtgactttgctgtacagctcctctctcgcagccatgccgagcggactggggtggccgtactgagccatggctcagcggccagccatcgccagggaaggagcccgagccggatggttcgggaaggaggagggagtcgggctgggccaggggagggggctcggggacccagagccaggcaggaggcggcggcagcggaggcggcgctccgagcttccccagtgtcgggactctgacgcttcctggtgaggccacaggagccagaacgccggcaagcggccgctgcgggaccagcctcagccactcgggcccccggctgcccccagctctgcgcctgcagtagccctgtctcctccgcccccttccctctcctcgcctagcagtccgggaatttgcaatgagtaatttttgaatggatcaaaaaggaaaaggagccttgtgggctggccctgacttgcctgtacccgggccccgcccctctcttaaagcggccgcgctgtccgaggctgctccgtgcgggcaagagctgtagtcgcgctacttggagacggaggatcccaaccttatgggctgcttgtgtgcttcacctcccgagagtcacccccggcgccccagccctctccttggctggcatacccgcccagctgggcctcaagacaggagatcaacccatctcaagtttcatgtgattctagatgcggttattaatggaaattgggtgaactggtggatgatactaatggaccagaaggccaagccgtaaggcctaggtaaaaggttttgcttctcaaagatcctgcaaaacccaaagggttgttaggaccatcggaagttgagttcccaatcagccggccaagtggctgcactaaagacctactgcgctctacaaggttatggtcagtgactgaatagtgccttcccggtggggcagaggggttggggagaaggacctcaggttctcagaggtggcaggacctgggaggggacaagaaaagagggacagggcagaaagaagagggaagggaaaaagaaaggaggaaggaggaggagaagaaggaagggctaggagggtagaggaagaaggaacagagaaaacatacttcctaattataagaggtgttcaaaagggaacgggcttatttcattagggagtggatatcctgtcaataaaaggattcaaagacggaccgaatcaccactgcacaataataagtgaattgtatcataggctggacaaaactactcccactgcaaagatggtggaagccacaaccatattgatgccccatgccccacctggtgaatttggctgggggatgctaaccctctttcgtttggaaacaaagtcattgtcttcagtcagggacaagggtcccacttgctataatgaaagaggcaatgagtacaccctaactgatagtcttttttgggtaataataataataaaacctaacatttattgggctcttgtatgtgccagtcattgtgctaatcgtaatgaatgaactcactgaagttttatactgaccctaggagtgtgtttaatcattatcccagttttacagatgagaaaactcagctcagagaggttggggaagatcatagagctggtaagtgcgtagctacagcactcgtatccactgcggtgccttagacaagttacttctctctacagcctaatttcctcattggtatggaccgtggtaacctaaccttgcacacactgggttttccagaaatgtcagtccgggcctgtccctggttggaatatgggggagggatggtgaccagcacccatggagtggctttttgaggttgctttataaggcctgtgaaggttttaccaggggaaatgatacagtgtaactccctgagcccggaattggtttcctaaagaatagccagtggtgtttggaagcagggagataagacagctggagcttaagcaacaatgtgtattaattctgcctcctgctgtacaaaggatgagggaaaattaatgcttcctgggtagtagctgcttccagagcaaaggggatatcctggagaccttgcagaatgctcttccaggacatggagcaaaaagacaagactgggctggcaacaccatacctagtattagcctccttggatgtgttcggtaaaacatgctggattttatccagtattctgaattgtttccaaatgcctgggctgaaagtcaaatgatctggatcttagtcaagagataataatgtatgtgaaagcgctttgtaaaccataaagcgctacataaatgataactcaaatttattgagtacttactatatgctggtgttgttctttgcttcttacatatgtgactcaaacaattccttgacaagactatgaactaggaactactttacaaatgaaggtgctgagccagaggtcaagtatcttgtccaaggtc

SEQ ID NO: 915757 - DNA, 4001 bp, Homo sapiens
taacttgtcatcagtttaaaataacaggttataagatattatttacaaaccttgtagtaacctcaaatctaaaaacatacaatggatacataacagttatgtgacccaaaatgtcagtagtgatgaggttgagaaactgaagctctccaaacccagtccacaagtggggaggggtcctttaacactgtggaccatttgaactttctctgccttacccccacccccaacatataatataaacacatcccatgcccccctcctatccctcagcctatgttctatttctgttcaaccaataagctgcttctggtgccttccacccagggtcaatggcccttcatttatctttaccccaaactagaagcatctgcacttgtaagagtttctctatcatctgtgactctttggcaagaacaaagcccagggctgaccggagaagatctggaatagacattttccaggtcttggaaagataaagacacttgaactttatctgtttaggatgagttctgccagaactttcccaaagcctgaggaagttgaaacccaacctaaaacacacagttctttcctactgcctactaggaaatcacctgactcagaggaacagaaaatgaaagtagaaaggccattaagagagcctgcaggctggaggcctgtggacctggtttcatattccagtcccattgctccttactgaaagactctggacaagcaagttatttcctctgtgcctcaatttcctcatttgtaaaatgcgggtatatattacttatctcacagaactgctgtgcgaattagatgaaataaccatgtaaaccgtttggcatgtaatggttccaatgcaataaattctggctcccatctctcttccacttggctggaaagaccctctgcctcattttgctgccaacctccagatttagtatctaggccaagcctgctctgggcatcccagtctgaggccattttcttctcagaggctgagggtagcaggcaccctcttcctagagcctgcccctccaccctgcagactggaaggggcacttctgaaagacttggggtgccagactcacttcaccaggatcaccttcctccctaatccatctccaaacaccctgggttttcccaccttctggaggaaactgccccctccccatccttccagatcttatttcaaattgtgtccctgataggaacaaaattcaacaagggccggatttgtgttcatctctgcccgcccccccccccctcctagaacagggccagcacatgtaggcattcaacacttgtagaactcacgaacgcaagccacctactccaggaggccttccaggtccacctccgcatcttttcctccagagaatactcagggaactttgtcccaaattctaatcagcattccgtgtttctcaggactctagtaatacaggcatcaaattatgggatgggctatgggcttattccaaggcaaggacttcatcctggtcatctgtgttcataacccaccaccagcagtagcagaatgcctggcaccaagatgccaaggacttttcctgcactggagatgcacccagttgttatcacaagtttcaggcaggaaaagcgaaattgaaaccagttttgggggagccggctcatcttcaccacgcgaacggctcaagcagaggcctccaaacccccaaaaccccagctctggccactcttgcaggccagtcctcctctgagtagagggcggggaggacagggattcagccagccctggtgcccagacaaataaataaatgtgctcggagagccgcggaggggatggagggaggagggaatgcgggaggcgaggggagccaagagaaaggggtcatcctatacgcggttaccttcaccactcgcatgctcgccatcatgtcgggaccgagtgtgtggcacccgtggcctccagcaggaccgagctccgacccgcgacacagcgcgccccgccccgccccggggaccccacccccggcagccccgcccacccctcctccagccgtcgctgcgtgggcctccccgcacccgctccggcgaggccaggaggccgtcgaaggacgacccgccggacaaccgcccgatccccgcgcggaaggctcggacccgggactcacggtctttgtgcggagacgggggcgggcctcggggcgcacggctttgctgatccctgcctcccgcggggtgcgccgtgcaccggcggcgagcgctcaggggcgctggggggcgctcatacgggttccagtcttcgctccgccggcggccgcaccgggagctctccggtctttgtcagccccctgcacgccgccccaaatacacactcgccctgaataaataagggatgctcgctgtacagacgcagctccgtgacagttctcagcggcctccactatcggactgccgccttgagcccctgccccagcaagctgccggagccgccgagcctgccgccttccctccatgggcccagcgctccatctccgaaactgcgtgggggatggcgtagacctgtgccctccgagcaccgctccccggcagtcggggatcctttgtgctgcccggcgttcggcgcgggctgcaacgtttctccccgtggcttggggcagagcaccgcaaggaggcgctgttggaccctttctcttttgctttgggggttcggtctaccatcattcagtcctttactaggtttagtatttactaagtgcctactgtatgctggtttgggaaacagttggtgggggaagccccaagaaggactcaggagcctcctttccaagagagagtctgcttcccctcccttactttactactggtccattacaagctgtgggcctaatgtgtgcccccatgcacagctggagtccccaaccctctgtgcaaggacagagtacttgcagcccctgagcaccaagcagcatctggggaagatgagacttgttgggagggccgatcccctccttctcacccttccctacccccgtttagtccagacgagaaaggaaatcagtatattttgagcaccagtttgtgatctcagtacctcacagtttttttgtttcttgtttttctgacagagtttcactgtcgccctgactggagttcagtggcgatatcggctcactgcaacctccgcctcccggttcaagctgttctcgtgcctcagcctcctgagtagctgagatttacaggcgcgcgccaccacgaccggctcatttttgtatttttagtagagtcagggtctcgagctcctggtttcaagtaatccacccgcctcggcctcccaaagtgttggaattacaggcgtgagccaccgtaatgtttttatccaagtattttgaaaccaaatgacttctctgctcagattttgcagaacgattaattgtttcattcaattcaatgaactttaacagcattttctatatgcccgaaatgaataggacactccgtaatcccttaacaggggtagagatgagggaacaaagacattcgaacctgcctgtgatcaatagtctcagtcaacaagcgcctactactgagtggcaggcattgccaataggaaacaccaggatgagaaaggggagtccctgctcctgaggagttagttcccagactactgggacagagggagagaatgcagcccctgatttttaatgataatgctatagagaatcacctggtactctgggagtatgaggagggtcactttatccctcttcagggaggggcagaggtttcccggaagagagaaaaatccaagtgtattgtgaaacatgatgagtcagcgagaagtaagagcgtgggatgaagatgttctaacaagagggaacagcatgagcaaacggggcagtgtctatggaaactggagcaaaagcctctgtccacgtatcgtagctctccttttcttttcttacaggaacgctgcatcccgaggtgaattaacagtcatggatatagctgggtcctaagtccccacacag

SEQ ID NO: 915758 - DNA, 4001 bp, Homo sapiens
aaaggccattaagagagcctgcaggctggaggcctgtggacctggtttcatattccagtcccattgctccttactgaaagactctggacaagcaagttatttcctctgtgcctcaatttcctcatttgtaaaatgcgggtatatattacttatctcacagaactgctgtgcgaattagatgaaataaccatgtaaaccgtttggcatgtaatggttccaatgcaataaattctggctcccatctctcttccacttggctggaaagaccctctgcctcattttgctgccaacctccagatttagtatctaggccaagcctgctctgggcatcccagtctgaggccattttcttctcagaggctgagggtagcaggcaccctcttcctagagcctgcccctccaccctgcagactggaaggggcacttctgaaagacttggggtgccagactcacttcaccaggatcaccttcctccctaatccatctccaaacaccctgggttttcccaccttctggaggaaactgccccctccccatccttccagatcttatttcaaattgtgtccctgataggaacaaaattcaacaagggccggatttgtgttcatctctgcccgcccccccccccctcctagaacagggccagcacatgtaggcattcaacacttgtagaactcacgaacgcaagccacctactccaggaggccttccaggtccacctccgcatcttttcctccagagaatactcagggaactttgtcccaaattctaatcagcattccgtgtttctcaggactctagtaatacaggcatcaaattatgggatgggctatgggcttattccaaggcaaggacttcatcctggtcatctgtgttcataacccaccaccagcagtagcagaatgcctggcaccaagatgccaaggacttttcctgcactggagatgcacccagttgttatcacaagtttcaggcaggaaaagcgaaattgaaaccagttttgggggagccggctcatcttcaccacgcgaacggctcaagcagaggcctccaaacccccaaaaccccagctctggccactcttgcaggccagtcctcctctgagtagagggcggggaggacagggattcagccagccctggtgcccagacaaataaataaatgtgctcggagagccgcggaggggatggagggaggagggaatgcgggaggcgaggggagccaagagaaaggggtcatcctatacgcggttaccttcaccactcgcatgctcgccatcatgtcgggaccgagtgtgtggcacccgtggcctccagcaggaccgagctccgacccgcgacacagcgcgccccgccccgccccggggaccccacccccggcagccccgcccacccctcctccagccgtcgctgcgtgggcctccccgcacccgctccggcgaggccaggaggccgtcgaaggacgacccgccggacaaccgcccgatccccgcgcggaaggctcggacccgggactcacggtctttgtgcggagacgggggcgggcctcggggcgcacggctttgctgatccctgcctcccgcggggtgcgccgtgcaccggcggcgagcgctcaggggcgctggggggcgctcatacgggttccagtcttcgctccgccggcggccgcaccgggagctctccggtctttgtcagccccctgcacgccgccccaaatacacactcgccctgaataaataagggatgctcgctgtacagacgcagctccgtgacagttctcagcggcctccactatcggactgccgccttgagcccctgccccagcaagctgccggagccgccgagcctgccgccttccctccatgggcccagcgctccatctccgaaactgcgtgggggatggcgtagacctgtgccctccgagcaccgctccccggcagtcggggatcctttgtgctgcccggcgttcggcgcgggctgcaacgtttctccccgtggcttggggcagagcaccgcaaggaggcgctgttggaccctttctcttttgctttgggggttcggtctaccatcattcagtcctttactaggtttagtatttactaagtgcctactgtatgctggtttgggaaacagttggtgggggaagccccaagaaggactcaggagcctcctttccaagagagagtctgcttcccctcccttactttactactggtccattacaagctgtgggcctaatgtgtgcccccatgcacagctggagtccccaaccctctgtgcaaggacagagtacttgcagcccctgagcaccaagcagcatctggggaagatgagacttgttgggagggccgatcccctccttctcacccttccctacccccgtttagtccagacgagaaaggaaatcagtatattttgagcaccagtttgtgatctcagtacctcacagtttttttgtttcttgtttttctgacagagtttcactgtcgccctgactggagttcagtggcgatatcggctcactgcaacctccgcctcccggttcaagctgttctcgtgcctcagcctcctgagtagctgagatttacaggcgcgcgccaccacgaccggctcatttttgtatttttagtagagtcagggtctcgagctcctggtttcaagtaatccacccgcctcggcctcccaaagtgttggaattacaggcgtgagccaccgtaatgtttttatccaagtattttgaaaccaaatgacttctctgctcagattttgcagaacgattaattgtttcattcaattcaatgaactttaacagcattttctatatgcccgaaatgaataggacactccgtaatcccttaacaggggtagagatgagggaacaaagacattcgaacctgcctgtgatcaatagtctcagtcaacaagcgcctactactgagtggcaggcattgccaataggaaacaccaggatgagaaaggggagtccctgctcctgaggagttagttcccagactactgggacagagggagagaatgcagcccctgatttttaatgataatgctatagagaatcacctggtactctgggagtatgaggagggtcactttatccctcttcagggaggggcagaggtttcccggaagagagaaaaatccaagtgtattgtgaaacatgatgagtcagcgagaagtaagagcgtgggatgaagatgttctaacaagagggaacagcatgagcaaacggggcagtgtctatggaaactggagcaaaagcctctgtccacgtatcgtagctctccttttcttttcttacaggaacgctgcatcccgaggtgaattaacagtcatggatatagctgggtcctaagtccccacacagtggggcagcccactggtgtgcctttcatgtcctttcacaatgcagacctttgtgtgtcagaacaagccccagggagacctgggttctagttccacatctgcccccatgtgcagttatggccttgggtggtcggcggaaactcctatctgcttgccaggaccattgtgaggctaagctgagggaagtggaggaacttagaatattgtaagtcgccgggcgcagtggctcacgcgtgtaatcccagcactttgggaggccgaggcaggcggatcacctgagatcaggagttcgagaccagcctgaccaatatggtgaaacctcgtctctactaaaaatacaaaaattagccgggcatggtggtgggtgcctgtaatctcagctagtcaggaggctgaggcaggagaatcgcttgaacccaggaggcagaggttgcagtgagccaagatcacgccattgcactccagcctgggggacagagcaagactccgctcaaagaaaaaaagaaaagaaaattctaagtccgaggcctggcatggtggctcatgcctataatcccagcactctgggaggccaaggcaggcggattacctgaggtcaggagttcgagaccagcctggctaaca

SEQ ID NO: 915759 - DNA, 4001 bp, Homo sapiens
gtcaaatctgtgcacaaactttttttcattaaaaaagggctaaaactgtgtagtcacttatagaaaaattttacaggaaaaaggaggactgatcacttgatgagaacctttgtggagatgccagtttagatttgttcaatggacttaccaaagtaagagtacccagataatcacccactctaaaggtccgataaaatgaaacctaaatattttgtttaatattcaataatgtcattcgggatttataatctcctattttcagcgccgggcgcagtaggtcatgcctgtaatcccagcactttgggaggccaaggcagacagatcacttgaagtcaggagtttgagaccagcctggccaatgtggtgaaaccccgtctccactaaaagcgattacaggcgcataccaccacaccttagccaggctgtaatcccactacttgggaggctgaggcaggagaatcacttttaaactgggagatggaggttgccgtgagctgagatcgtgccactgcactccagagcagagcctgggtgacagagccagactctgtctcaaaaaaaaaaaaaaaaaaatacacacacacacacacacacatatatacatacatatatgtatgtattttttttcctattttcaactgccatacagagatacaacactatcctgttgtcagacactttgggatggtacagctaccaaccttagaagcttttggatttgattcttttaaaatatatcctccttgaaaacaagtttcactctgatacacttgctgcaaagatctatatctataatagctgtcctacaaaattctgtcacttcctcctaatacaagcttttgtttatgaatagtaccactaatcctttaagaccactgtcagctctcatgaacacacaagtgtgttaacatcagacttggtattgtttttcaacagaaatatctggaacactttgtaaaactgggatcgtcaaaatcaagctctatcaaatcatactcccataaggtctgtgtcctggcaaataatacatatatcaatataaaatagaaattaaaatatcaatttaaaatagaaattaagaaacaattttcgttgtcgtatgtttcacctaacactatcaggccatgctaatgtggcaacaaattccatcaacacatctatctgcagcctagaaggatctcaagtcaaaaagcagacagcagtccttcttggatcccattttatcgcaggtgggcttccacgtgagaccaaaacagtaaatgacagcgagactaaacacatgcttgctgtcagggcataaaactgatcctaaaaggaaggctcatcaaatataaggtcatgaggcatggtcactcaattttagaagtgtcttctaaacccaaggaaacatgaagcagagtgccccaagagttatctgtggtgaactcatcacctgccttaagaattatcaacaccctgacgtatgcattgaactggtttgcttacgactcacgattaatcttatcttcttggcatctgcctatttgttatctactctttatattttatccttccatgctccataagggattcgcgggaaggagggagatccacccgcccggggcacgttctagagaaagttaagtcaaaagataatgcaatgatagcgctccggcctcttccaggaggggcttggcaaagatggggacagaaatgtacaaagagacatcagaagctggggcactgtaaggggttccaaatcagacagggtcgaagttcaagaaggagaaggtccctggttagcaaagcataggagaaggaatttggagaagataagagtgaacaggcttgaagtggcattggaccagcagaaaatatcacaacgcaaagtcaacgaccccgtcccctgaagctattgcctgtcttaccagagcctgaagtgccagcagcgacgacacgacagaatctcagcggccgaagggttcccacttccgactcagcacagcaaccggaagttacgtcatcaacaagcgccggggcatgtggaagttcatctccgcgccggaagcacggtgtgcaggctcaccggggggaacggcgcgcaaatagtcctacagcgcatgcgctagcttgttaggggcgggctggaggcgggcaggaagtggcaagaagtggccttggcatcggattgtgggggctggagttggcccacctggcagtgcgctttggagtatagaatatgaggctgggttttggaaatcagcgtaccgagggcagataaaactctgtgatccctggctctgctcgcaacctctgttgggggtctgctctcttattttcccaccagtcctagacctttttgaagcagcttctgttactctctattattcaaagggataacactaacagcaataacaactacaagtttgttattgttgtgctgtctttggagcaatctttggagtgtgctatctttgattggatttcagttttcttatctgtaaagtggagacagtatacatcctacaaggttgttttgagatacacatagatggccaggcacagtggctcacgccttgtagtcccagcactttgggaggctgagacgggcgggtcacgagggcaagagatcgggatacacataaataatagaagcagcataattttcaagagttaaaagcgctgtgcaagtgaaaattcacagattgagagaaaatagttgcaactcatatatctgataaaggattcatctctagaatatgtaaagaactacaagaacgaaaaacccccaaacagttcagttcaaaaaagggcaaaggacttgaatagacatttctccaaagaagatacattccaagagaatgactatccacttggtatctgtgggggatttgtttcaggacccccttgggtaccaaaatccaaggatgctcaagttccttacataaaatgatgcagtatttgcatataacctatgcacatcctcctgtgtcatcctagagatgactaagtcatctctagatcacttataatacctaatacaacataaatctaaatagtgttgtattgtttagggaataatgacaaaaagtctgtacatgttcaatacagatgaaatttgttttggaatatttccaattcatggttggttgaagccacagatgcagagcccacagatatggaaggccaactgtacaaatggtggataagcatatgaaagagtgctcaacaccactagtctttagggaaatgaaaaaaaaaatcatgagataccacttaatacctactaggatggctactataaaaaaaaaggaaagtaattgttggcagatgtggagaaattgaaaccgtatgcgttgctgatggcaatgttaaatagtccagactttttggaaaaacagtttgatgattcctcaaaaagttaaacatagtataaccacatgatcaagcaattccgctttgatatagatgttcaaaataactgaaagcaggaactcagatacttgtatacatatatttacagtagcactattcataataaccaaaaggtagaaataacccagaatgttcattaacagatgaatgcataaacaaaatatggtatatagctacagatgacttattcagccttgaaaaagaatgaagttctgatacacgctgaaacattgatgaaccttgaaaacgttatgctaactgaaacgagccagacagaaaggactaaatagtgtatgattcagtttatatgtggtacacagaataggcacattccttgagagagaaagtataatagaggtcaccagggattggagggagaggcgaatgggagttattgtctaatgggtaccaagtttctgtttaggaggatgaaaaatttctgaaatgggtagtgatgatggctacacattgtggatatatttaatgccattgaatggtacacttaaaaatagttaaaatggggttgggtgcagtggctcatgcctgtaattccagcactatgggaagccgaggtggacagatcactt

SEQ ID NO: 915760 - DNA, 4001 bp, Homo sapiens
gaaccagagtaggaggcgaggtgcttcagtagctaggacctgtagaccctgctcaatctgccgcagggcttgcagggcacgggggtttgccatggctgcctgaaggtgcatcagcagtggcagctgtggttgtatctcatcctgtaactgtggagctggattcatgccatctggcctcagagatcttggataagccggggatggcagccagggaggctcagggattccaggaatggctgccgtgggggaaaaagataagggagcaaatggaaccctgttggcagaatctcccagccccgagacaagatcaggcaagtttgtgctatgtccagtagagcttttccctgcaccatcttggtctccaccttgtccagtactgttctctgtggggtatctcaggaaagctgggcaggaggaccttcccttgattgctactgactcctcggggagaggctggcctgacccaggctcctgagatgagggtgacgatgggggaactctgtttactgatggtggtggttcctggctttggctgagggcagatgcagtcccctgtagataagttcctagggactgggggttctcgtgtaattgctggagatagtcatagagccttataatacccagaaagtttggaaacctatttctaatgtcaggtgcatcctgatccccatcctgccttccttgcctgctacctgagcctccatgtgtggaagtccaggggttggggagagggtcacaattctccatccttgaaggttggctggtggtggtggtggcattatcagtagtggcagtggcaaagggattgccgccaaactgctcctggactgcgttaagcattgggtccataatatctgtgtacatagtgcaaagcacattgtagccaccaggaatgctctccaagttactgagcacccggtcctggctacgtatcatctcctgcatcatggcagggttacgtaaaaactccagtgtctgccgcataatttccgggttgttaagaatatgcccaatctcagggttgtgctggatcagctgctgcatatgggggttgtcaagaaccagctggcgtactaggcctgtgttggacagcagacccgggatgaaggggtcatcaatgagctgagtcacaaactcaggcacagacacatgctgccgcatcagggagcttggctggtcagggaagccacgataggccaagcccagcctactgaggcctgtgaggagacctaagctaaaggcagggggcccatctgctgggtaaatggagcttggctgagggagtgatccaggacttgggccctgggtagggacagaggcagctgggcactcattgcccatggcacggtgctgcctcttgatgaccaggtggacagtgaggccatctcgcactccacactgtgccagtgagtcaggatccttgaggattttgccagcaaagattagaacaagctgatcggggtgggccttaaagcgctgagatatctcttccttcagctgctggatagtgcatgtgtctgtaactgagaaatcctccttgtctttgggcgtcttcactgtcaccttgatgaggtggggatcctggactggtgctgggctgccctgtggcagggcttctccacctttggccatggtggcagcaggaggcccagatctgtggggacacagctaggggcatggggattggagaccaagatcatcctttcaggcaatggcaaaagtaggaagggtgagtatgaaaagggtcttgaatatcaggatagggaaatctgcagggtctacatgaaaggggccatgaggtttctggggcaggatgctttaggaagattgcgggattgagatatgttggaatcaggggagggaaatgcagggccctgggaaagaggtctgtagttgatgaatacagggacaaaggtagaaggaagggcccagctggggtgtacataccagtcagctgtggtcccgtccttctctttatgcagggctccaaacctccctcatcttgctacacagccacccctgaggccttctgggccagaacccgcactatcaggtcccttctgtgacctcagtgctgacgtcacagcctcacacagagaagattcttgagacttctctaaggagctcgggatccctgggaactcttgctctcccatcttttaccacttctacttcctccacctcaagtgccttcctgtggagacttctgtggaggctcagactgggattggaatgttataaaacatctctcagtcctctctgtctccattcagacccacattcagctacttcctggtccagggtcttcttcctggtatcctatgtcccagttttctgtcttattcaacattaaccatgaattctttacgtattttcaaagtattgattcgctgatggataggatttggggtataagggaggagtcaagcatgagataactttttttttactttaaaagaaattgttatccccaaaggaactcaaaggattgaatatttactaagacaaagattgggaataagcactttgtctaaattagcaggttgttaaacagttttacatacatttgagatgtctattttacatacaaatggagatgtagtattgtagtttaatattataagtccagagtttattagcattcaaagggtacttaacatcatggactggtttagattagctagttagtgcatacaggcaaaatgatagagattttaaaatctgagttttgtggctgtataacatttagaaatctggaagatcagaagaatttggcaaaggaaacggagaaaaaataaaagagtaaggtagaaaaaaagagagagaaaagagaaaggccaaaggaagaagagtttcaaaaaggagagagtaaccaatcatgtgaaatgatgctgctaggtcaggaggatgaggattgagaattggccactggatttgaaaaaataaagaattggagaccatgatgagactagctttggaaggatagtagaggcaggaagcctaatcagagtgtgtttaaaagcaaatggtttgggaaaaagtagatccagttagggcattttaaatgcaagaaaggggatgacggctatgtggggatgtggggttaaaggctttttagatttttttcttaagaatagtgtaatgatgtttatattctgatagaaacaatccagtgagtagaaaaaattgatgcatgagaaagggaaaactattaagttcttgaatagataagttagagagattgggagcaagtgcctatgtggagagcttgatttaggaatatgaagtttattcatgatagcagaatgaatgggaggcagagtgtattgggacagttgtaagctagttggttgatttcatggtagacacaggtagaagtcccttctgattattactgtctttcttgttgaaataagcacaactttaagatttagaataagaaatggatattgaagatctgagaagagaaaacaagatatgaattgatcatctgaaagaataagtgttaggttttgaaaggaaggcaaggcttaaagaaagacacacacacagcaaatgcagggtttatgtctagcataaaacctagagaagtgtgggaccagcctaatgccagagcccaccactgcttacaggctggggtaatttataggtatgggagggaggggtctgggcagtatggcttgctgcctggcaggatattgataagatgtgctcatgatgaggcagtttggtccttgtttctgtaggatgtcatcgtggtgttcaatggacctttgcgcagcaagatatgatagggatgttgctttagttggacctttgtctgccttgtggtcaggtggttaggcaggatgtttctcacagcctgaacccccgtgaaatgtttcactttgaccaaggtctgcaaaatagtgggaagtttacaaaatggtgcagtttggactaacaataaggtagtgaattaactaggatagtggatttccaggtatgatctccaaact

SEQ ID NO: 915761 - DNA, 4001 bp, Homo sapiens
acaaatctcaggagcttgcagagggtgggaagggtccccatccggggattgtagcctctgcaggactgttccaggcttgtggcagcactcaggtcccttgggctcagctgtatctgaaacattccaggaacagggcactgtgtcaggatagctgcagctgggggcaggaagccaacccaggccccataggtagggtgcaacccaaggcagaagaacaggagcctctgtggccagcagctggagggcctgctcaatctgcaatattgcttggaatgctttagggttgcctaagcactaagcagatcagaaatctgtgtctgctgcaggaatgtgggcagctgctgcctccactgttcactcagctggggcatacttgtgaacaacataatctgagctgccaggtaggggttgttcataagcaactgcatcatgcctcctgtgatctgggagctgctctgctcatctgacagctggagatcaccctttaatgtctgtctggagctacttagagaaacagtggcatccttgtattcttcttgaagctgctgggtaagctctatgctaggtaaggctggtatccaagctggctgccgagtggcacagatatggctctggcccttggtggaaatcatagcagtgttggctttggaagtgtggttgaccttgttaagggtgtcattggctgaggtgtttgaagagaaaccaccagagctattatagatgactcgggttgcaggatgctgtgtgagctggtcttgttgttcctgtgatggtggtggaggtgggggtgaagactggacttgttctagcacttgtcctgccaggagagctgtgaaagggtttcctccaaaaggatcttgcatgctgttcagcatttgatcattgatatcagcatagttctgacccagggcattattcccacctggcattgtctctaagcccagatatggctgtgggttcagtggatactcaaggttttgtgaaggttgttggatctgcattatctcttggatcatagcaaggttcctggccagctccagagtctgcaataggatctcagaattatcaagaagaaggcgggaaacttctgggttctgctgcatcaattgttgcgtgtctagatgttctgaaatgaactgccacatgaactccatgttggacagaagccgctggatgctaggattctccagcatctgtgctttgcactctgggtggctcacttccaagttttgggtatgcactttgggtgcatcagaccccacaaagtgggccagttccactggagcttgattcataccagttggttggtgcactctgctgctgtttcctttggtgtttctgtcccggtggcagggatcattcgttggcaggtcccggaaggaatgggctagagatctggagccctgcttggacttgatgaccaagtagatggtgtggccatccatgatgcccctctggctcagtgtgtcatggtctttgagaaggcaacccatgaagaccagcactagttggtccatctggcattggaagtgagccaatagcatctccttgaactgccttaccgagatgtcatcagctaccataaagtctttctggttgcctgcagtcttcactatcactcgagtggcacttgaagagatatttttgtctgccagcagacctgatggacatccactctgggacatcctggatgttcgagagatggcatgccacatgggctttagtgggtgggcagatggggagcaggtggaagctggggcagaaagggtgagggcagacaaatgtttctgctggcctttgtctcaggtattgtgctctcaggccacaggatagtttccttgttgccctaaaagggatgagtgaccagactggggccagatattttgtgatgttgtgccctcaccccagttctccagatgtggcccagctgaggcctggcatagctactgattcataattcacccatggtggacaaagtggtgatgacttctcctagggctacccctcctcctaccccacccaccaggggcatgaatcctcagaaaagggatattgtgatgtcaactctatcctcgcagtcaccctgggccagctggggaaggaggacatatttaggggtccagggctctacaataaaataaaataattttccagaaaacagggacaaagttctctggatggaactagtaagaaaacaaaaaagtaaataaaaaccatatttttaaatgtgggatgtgtgtttccgtgtgatactgtgtgtatgttccttatagggatgttagacttgtatgaaaagttgggtctactgaagccatagataaagccacattcctataagaatgcagtctctcccataggaaggagcgcattaatttttttaatgatctggaaatttgggtcttatatagagtctagattttgggattctatatttaattgtgctcccatgtggtggggaaaattttcctctgtcctaggaagcaggagtagggctaaccaggaaggctcttcataggcacatgccaaactaaatgtgaattagctcttttttataatatgccttttattcacatatcacttggtctcttctacatgtcaatataacagaagttttagaatgatttgtttcaatgtcctaacccactcttgtgtgcccacctttatgtcaaagcattaagggggaatgtcgtctgtaaatcaagaggtgggagaggaggtggttagtagtaaaattcttaaggggacaaatacaggcaactaaaaagctggattcttggtcccatgtaaatttggagaattgtgtttggtttttatttagatgcagatggaaataattatttatatgagtgagagtgtacatgtcttatcgaatgtatatatgaaattgtatgcatattctgtgttactaggaagccttcagggtctggattttatatattccatccacctgcctggagagggaggagcaccacacagatagctaaggaacaagcaaaaagctcgagcccatatgttcccagtgtgttgaagacaagcaaagggatgataggccgttggccaggagaccttctgctatcaaaccaatgattctttattgagaatatctagacccccagcaccatccatgtcagatcctcatcatgctataaggccagttgctaacttactacagcaagactcaggcctattctcttgcaattgcactcaaaagtgagatcgatccaggacaatgaaaaattgattaccagaccaagatcttgccccttttctccccagggacctcacaggaaggtggagataagaaagggaactttcatatcctactctaatgaccagctgccctgcagcttctgcactggaatcaggtgttcccaacctgagattgacaattctagatcacagaactcttgagttccgggagctggatttatgaaaaaaggaatatgagatgccaaagcatcagaaagagagggtaccattttcttagctaatattttactttttccctatcaaatccacctagaccattattaaagggaaccttaatgtactgattgagatattaattacataaagaactcactagatataatcagtcttccaatcattaggaccaatggccactttgggatgtggtcctcctggaggtaaggaagagggcacacttctaccaatgctctgcctagccctggggtctcagggtctggaagcctcgttaggtttgacaggttttggtggagcatgagccccagagggcctcctggtgggtggtcttggtagcctggtcttcattgtcaggaaggtgaggtcataatttatcaggtaaccatcactgaagacatacggcttgtggtctgaggggcagtagttgatgccctgcagcttttccagcatcttgtccaacaggatgctgaggcggcgctcctgcccggtggtggtgtcaaaagcatagaagatctcctcttggtgggtgttcagtgagtgtaaggcatagagcaccc

SEQ ID NO: 915762 - DNA, 4001 bp, Homo sapiens
tttctctacatctttgtatcaatcctgaatgctaaaggtgagattcacttgcacctgaagcagcaggaaaaatttggagcttcaagaataaatgaagatataacttagagaagctgcacccagtgtcacaaatgattctgtggaggagctctttcagattaaatcagtaactttttattttgtattttcattttttttttgaaataagcaagaaaagtctaattgagaactgagtcagatatacatgtagaaatattactccctactcccaggcatgggaatggccaactccttacttcagggaggggaggagagagatatcaagagtgggacaattctcttaagacacctaccccacctttcatcaaatatccccgaccttagatttagtgcaggagtcctgaaaaacatttccacagggaagtttgggtcccaggcttatgggtatccccctaccacctttggcaggacaaaaatgagtaaagcaaagcttcttgcttcagaaatattcagtctaatacagtgtgtaccccacaacgtaatcatctcttcatttcagaagccttaattgcataaagttcctcgggaaagggatgatatttgtttgtttgtttttttaaggataaggccagtattggctcaaacttatatttattcttcccaaagagttcctcccaggttcataatcttgatgtaggagagtgctgcaccaagttgcttctttcttcccaacctgtcctactttgcgggaggaaggaagaaaagaaaacaaacaaacaaaaaaaaaaaaacaaggaagctgcactagagccactgccctcagacatcaacttctatttcttctccactgctgcagtctgaagagttactgctttcttccttttctctatctttcttcctgttctcttctggttccatggagacatgacagtttacccaaatagtctgtgatgaatctgttcctgcagcctggagcccttgcccctccccaaacccttcttgcagaccctttgctgatgaggactgtggatctgcttgtttcaacctggggtccgggcctcctgtcatggccatattcttacccttagcataggtcgattctttgtatgcagcataattttcaggtgacaaagtcttgagccagagatccaatttcaccttgtattgcttctgcagctcctcagcctggctcttaaaatgatccttctggctctgcgggatgcgctgccagcgtctgccaatctctaccatgcgctccctcactgacaaatgttgcatctctttacttgaccaggaatcttggtgaaacttgtggtatccattcatggggggtttctgaggctctccatgaaattttaccttcttgaaaaatcgatccgtttttggaagagacctcacttcttcaatatttttctgaaacttcttttgcactttgttttgagtcctcttggagacactagatttcttggccttctggactaaatcagggtgttcttccctgaatcgagcaagtttttcctcaaattcttgcttttccttccggaaatcctgaatatatttctgtttcatctgctctgggagttccctgtatttctttgacaggattttggtcagttcctggcttctcatcccagggtacatttgggagtactggggccaactctccttgaagaagcgattgtaagcagtaaggggcctctttggaaagtctggaccgttcctgtatttttggcttttgttcatctttttaacacatttcttagcttccaggactaattctttcaaagtgccgaattttctcaagttgcaagaaatctctaaccatttgagtctgcacatttcaccagaaaagtttttaaaagctacttttccccagtccatgtgtgactgagttgagctaaacgtgctgttgtcatcagatgggcgattattctccatgcattccagtaacctcaagatgtctttgttggaccaatggccttggcttctaggcaaagccatttagatgtctttggcttacttataagatcccggttatgtagacaccagagcaagaacacagagttctttacttttaagactcagtggatgatttatttctggaagtattgcagtatgtgtgattctgtatttctgaggagaaagaaagttactctccttcatttggattaatgaagcaaattacatcctatttgtcatatgtcccttgtataattcatttgacccttaactataaataaacattgcctgtttctgaattaaatttatgtttgcctttcatatgctacatgcacaatattcagtatctccacaccccaccccagcctgctttctgccagatctcacatgaacctatcttaaattgagttgcataacacaaacaccagaccactcatcacttaagaagcttaatataacagaaatgccctgaagacagagtcagaagttaaagtggaaggagaaatgcctaaacaggaaggactgttcattctacagtgccctgagtatggccattttctaagcacagcccaaatagccatagctaaaggtgcagatgagaagttaaagatacaatcggacaagcccaagagctcctccagacatgcatccaactgttacctttttataagggaatgtgaacctgtgataaaagactgaattatagattctccaggaccagtgcatgggaattaatgctttcttgctttcttttatttcttttttttttttttaattgagacggagtttcactcttgtcgcccgggttagagtgcagtggggcaatctgggctcactgcaacctctgtttttcagcttcaagtgattctcctgcctcagcctcccaagcagctgagattacaggcatgtgccaccacgactggctaatttttctgtattttttagtagagatggggtttcaccatgttggccaggctggtctcgaattcccaacctcaggtgatccgcctgcctcggcttcccagagcgctaggattacaggcgtgagccaccactcctgggccgggaatgaatgctttctaagaaccatactgcttctccttttaaatatcaaggatttaatgacaattataaaacatttcaactttatttggttaattgttcatcatatttaagcctcagtgaaagtttggcttcctccagaaactccctccagaatacctgccattttccattacaaaacttgaaaatgtggcagatctgatgactactcctttttttttttttttttttagcaattctgtcttgcctgaagtaattcttctggcacgtgatttctggattcactcttgaaattctcataactctttcactagtctttttaggatgatcttctattctaagactaagcctcacataaataaaattgtgtacgaatacatacaacattaaataaaaccgaatcttaaatggagggtgaataaggagtgtaacagtgggccttcagggggaaaatatgcattagaagggaaagagaacagagttaagatactggtggaagttgaaattctgagaatgagttctgaatatctgagaataatatttttgagaactatttttaattctcagtagagtatagaaggatgtagcctttgaatgacattaaaaattcactagaagtgtaaagaataatagtcataatatcacgtaagtcacaaatgtctcaaaacatagattaaaatgttctgaaatattggaatataattaaagtccatatttgagacagaagagaaaataaataatagcttatatattatattaaatttattatgtgaaaaagacttttgggaagttgttccataataaatgaagatataaataactataattaaaatttacaaaaaaaaagcattaaaataaactgtgaaaaacttaaaagaatgtaaaatttaaagttattaaatttttcatctcaaaaatcataaaaaagtcatttcatcaatgtcctatgaaaattaaaataaaacaaacttagtaatgta

SEQ ID NO: 915763 - DNA, 4001 bp, Homo sapiens
ctactatttaaagcaccaaatgaacagccacttaggctccgctttactaagtgcggatgagagactcccagctccctcacaacctaagaaagacaaggataagattatacaaaagaatctggataaataccacatcaccagatagctacataataaaccaaataaaaacatgaacaagtaaaagggtaactgctgagtaagagagaggtatgggtttaaatacaactggggcaggtgaaatttgatacctttcccaagagtagagataggatttcaaaagtcatttacaaagaagggagagatttggcaaagggcacgttaactgaaaaaagctctgagctgggcaccttaacacggaacaaaggggtcccaagaggaagataagaattagaatcagtacctgtatgcgacactggtcatactcccgcttggtgggaggctcctggctgggagaagagggaacaggacctggctctggtgccactgggggtggctgagagcccacactgccaccatactaaagggcaaagtaaaacagtcaatcaggtactcacccatcctcaggtgaaacagatcatataagcccatgctttccctctgaagctggaaaagatttactaacctgcccactccattacccgtggcgtcttctcagtcacctaccttcttggctctctctgctttgtccctctcgatcttttctctaactctttgtctgaaatgtagacaagaagaaattaggtcagacatcaacaaagcaaatcttgatttctttctcatctgctatccatcatttcccctgcccagacctggctgctaactcctcggccttttccctccgcctctcctcagcagcccggcgcatctcatcttcctgtagccgctgtcgtgctgctgacaactcttgcccttgtctcctgcgctgccgttcccgttccaatgcctcccgttcctctctttcttcacgctcccgctgcttctgggccaccagctccaacatcctgtgttgccgagggaaaacagttcaagagaaatggacagagtgggaaggtgtaaagtttacaataaacaaaattaggcgacatatatcccaaagtagattaaaggaaaagaaaatgccaagaaagaggaaatgtggaaaggtcaaggttctttgaccagacgtgtactggggagagatggaagacgaccctcagacacgtgagattgttgttactgtacctcttagtttgttcctgtctttcctcttcactcaaagcgggtttgccttctccggcagcagaaccagatcctacaaacaaacaatcggtattattatcccttcagattctcctcggaccctcctgaataatcacaccgtggaccctcagtcaggaccttcaaggccgccttgctctgaggaagtgggctcccgtcccaggatatgtccaaggggagtctctaaaggctcgtccacatcggggtcgtcttcgtgctccatcagcctggcagggaaagtgggcggggaggttagctttgaggctgcccctcccgccagcccccaattctccgccacccgggacgagcgcttaccagtccatcgcagcctcgatgccctggttccctgtgagggccagagccttctccctgggggcagaaacaccatgaatagcgcccacgagccatggtgacggtcaggctggggcaaaggccgagacaggtccgcgaccccccacacccgcaggccggggttggggaactcccttacgcgcgtcccctggggaagcccatctcgatgagactctcaagagccgtcagctccgccatggcgccgacaccgcggcttccgcggggacctggtgtgtgacgagaaggagggcgggaagggtcagcgcgaggcaacccgccctcgacacccgccgacgggcgctcgctctctcacccggctctatagcagccgggaacaccgacgagaagaaagccgaggggaagcggaagtgccggatctgtttgggtcacgtgggggcggatgtcgacgggtgccgctgagaaccataaaacttctggccctgctgccaggactttccgtgggtgggaacagggaggcaacccaccaagccaaggcgccaggctgctgtggggaagaaagctggtgcggctctgaaacccgtgggcggaatgaagccagttcccggaacttcatcctgcctcaccctccttagaaattagaaggaatatggtcccttagcgcaatgctttgggaagttctttggcaatgtttgccaggagcagaagaaatgtcttgctctttggcccactcattctccttagggaattgagccatcctctgcctgactgccaaagggatttttgcaaaacacaatcatgtagtcctgtcttcacctccctgcttaaaaatccgtgacacttccaccatctaggacaacttacttttttttttattttttatttttgagatggagtttcactcttgttgcccagactggagtgcaatagtgcagtggcgcgatctctgctcactgcagcctccgcttcccgggtcaagcatttctcctgcctcagcctcccggatagctgagataacaggcgcccaccaccatgcccagctttttttttttttttttttttttttaagagggagtctcgctctgtcgcccaggctggagtgcagtggcgcggtctcggctcactgcaacctccgcctcctgggtgcatgcgattctcctgccacagcctcctgagtagctgggattacagtcccacgccaccatgcccggctaatttttgtatatttagtagagacagggtttcatcatgttggtcaggctggtcttgaactcctgacctcatatgatccacctgcctcggcctcccaaagtgctgggattacaagcgtgagccaacgagcctagccatttttgtatttttagtagagatgaggtttctccatattggtcaggctgttctcgaactcctgaccttaggtgattcacccacctcggcctcccaaagtgctgggattacaggcgtgagccaccacacccagctatttttgtttttgagacaggatctggctctgtcgcccaggctggagtgcagtggtgcaatcttgacatactgcaacctcagcctcctgggctcaagcgatcctcccacttcagcctcccaagtagctgggactacaggcacatgccaccacacccggctaatttttctttttcttttctctctctctctccttttttttttttttttttttttttttttagacaaaatctcactctgtaacccaggctggagtgcagtggcacaatctcagctcactgcaacctctgcctgccccgggtttaagcgattctcctgcccgagtagctgggattataggtggctgccaccgcgcctggctaatttttgtagttttagtagtgacggggtttcaccatcttcaccaggctggtcttgaactcctgacctcatgatccacccaccttggcctcccagagtgctgggattacaggtgtgagccaccgcgcccggcctaatttttctattttttgtagagacggggtttcgccatattggccaggctggtctccaacccctgagctcaagtgatccacctgcctcgccctcccaaagtgctaagattaaaggcgtgagctacatactcggccatctgggacaacttaaatgctagtggtctgacttccttctgcgcccaccttggctttttttgcggggaggggggttagaaccccctctcaagtggagatcacaatagcacctactttggtgcctggcaaggcagagtatgtaaatgctggtagttattgtgcagtttcatcacccaccacttgagggtaagctgtgcatattgcaaaccagacttcaccctcctcttggcctgtgcaccaaccagtctccgcctaggatgtcctgtctcttcacttagtaaactaactcccaggagtttttcaggattcaggatttgccttctaaga

SEQ ID NO: 915764 - DNA, 4001 bp, Homo sapiens
agatatgatgacatgagtctgtcacattcctgaccttgagctgggttgcaggatgttgtgaaggccagagaagaataagacccagctgctgcccaaagacaagtgcacagaggttcagctgccatattctgaatgttgccttgggcttgccaagtcaggtccttcagagggtgggtaagatggccctactaacagcaattaaaatgcaggactagaaatagttaatcctattttacagtccccagcaaataaccagtttcagagccgggctgattaccaatctcggtttcagggatagtcaaaagctagcatcaatatgaagttagaacaataggttcctgtcctagctcttctgctggctcccgggatgacttggggccaatcactgttacacgtgggcctcagttttctcctttataaaatggggaccaagatccttggcttgtccgagtcagctgaagggccagaatgagagcggggaggtgtgagagtgctctgtgaactggaaagagccacttcactgtcgggggtggggatggtaattatttttgttaatgccctgctgactcctgcccctagaccacagggttaggaggcagcaagagacctcttccttggactggactcttacccggctttgtaaggtctcacggtgaggcctccaagatcaagcttctctaaaggtgtcccgttcttcaaagctgccagtggctatcatggcccgatccccttggttttccatagaaaatgggtgggagacgaaacacctaatggtcatactatgtgtcctgtgggtgagcaaaggcagagagtttagaaagggccacctgccccaagacacacaagcccacccaatccatgccttggagggggatggggaacagggcccagggactggttaagtgcacacactggaaaggggaaaagcagggcggaaaatgaacctaggtacactccccacccccaccccacctgcttaatatcacaaattggttctcatccagacttctgcttttgtaacactcagtactctatataagcaccccctagcacagtcatcagactttggtgagtgggagagttgtgagggggtcacgatgggacagagactctccgggaattggctaggtcccaggtcgggctgtgaggaggttggaagggctgggagccggccctgcagaggccagattgagcagctcaaagcccactagaaaaagcccccaagccctgggaaaggcggtgcaggaacactgcctggagctgcctggtaagggagaggtcattgtggtcatcgctgatggtccccatccaaggcagggctcggcatcgtggtggaaaggagggagtgaaaaggtggaggctcaaacgacagccaactgaacgggagagggaaagaacaaaagggactaagaaaaagagagaagagaaataaagaaccaaggacagaaaggattagcacaggccggacccggaggctcatgcctaaaattctaggactttgtgaggccgaggcgggcggattgcttgagctcagcagttcgaggccagcctggccaacatggcgaaaccccatctctacaaaacacaaaaattagccaggcgtggtggcgggcgcctgtaatcccagctactcggcaggcggatcgcttgaacctgggaggtggaggctgcagtgagccgagatcgcgccactgcactccagcctgggagacagagcgaaagcctgtctcaaacaaacaaacaaaaacaaaaaataaaaccgagagaaagaaaagagtacaaacttgggtgggagagaaggtaaatggaagagcgggcagcgcacgcagaacaagcgtggggggcgcaaagggcgcagggctggggccaggctcaccgagccgcagggagaacacggcagtgcgtgcggctgtgtctgtcggctggcggagggcgcgtcggacgagccgggcgagcgtggacagtcaatcccaaggcgcgcgcagctgggcttcgcagtggggctccgcgcaggcggcggcgcggcttaagcctcgggggcggggcccggggtggggcctgcggggcggggccgggcctgccagctcctacttgggtgcggagaccctggagcagccgcctttccgcggggaccgccccgcctagggttctctccatgactttctccactcccgtttccgtgcgtcccatcaccgcgtttactccttcgttccccgagatggtcactcccttgccactccccgcctctgcctcacactctctcgggccgccaacctctgtgaggatggcaagactgaccgccagaaacaagtcttgtccagtcacacacctcttgccttcccagccaggacggtttctaacagcgtccagcggggccgtgtcttaagtgcacttcctcttttatgggcccagcccccctacgctgggcaaactacccaccctcctgcgagcgagcgcgcggctggctcctgcagggcgggactggggcctcgcgaccggcctcgctgtcgattggttacagccgccgcgttgtcgggggaaggaaccaatcagaactgcagcaacaggtggcccggcaaccgacaacagccgttgggctcggctggggttcgcgccttctcccccggtggagcggcctggcgtttagggaccaggacactaaaggccccggcggggcgggagcacccagcgtgacctcacgctcctacacacagacaagcaaacgggccggcccccgcacgtgacaaggcagagccgggcccaggccagctgcctgtccagccctgggatgagaaaaggcgtcaggagatggaccgggcctggttcgcctttaattggctgacccgtcctgtgggggtaactgacgcgtgaacagccaacaattgggccctctggccgggacaaacacgtgcgtttggggagtagaagaaggctggtattaacctccattttacaatgaggaaacggagtcccaaagacgttcagtcatcttcctgatattcacacacttacaccctggtcaggccggcgccatatgtgttttcaccagcagaagggactgccagggaacagctgaggggaccagagctgggatgggcctggataattatagcggaaagaaaaacacgccgagcgcatggtcctggcagaagcagcgtggaaacagaagtcaaggcagattatttctgccatgaggagatcttgccatgtaggaaaaaagaaagaaagagaggaaagaaagacagagagagagagaggaaagacagaaagacaagaaagaaagagaaagaaagaaaagaaaaaaaaaaagaaaagataaagtttttttgtggcactgtgagtctccctccgccaggttctctagcttttgcgctgagctctgtctggctgtgcattccggagaggctcggcaaatttgctgtgagattgctgagcaacagcagaacagatgcaaaggcctgcagaccaaaaattgtccccctggctgtccaaacagggaagaatctggattccagaaactatatacttattatccttggcaaaagagactgttaaaagtgtggacgctgaaaaagggaagtggagatcaacaggacgcagcatgaagtccttaagaagtcctctttgaaaaagaagatgtgtttagggtttaaactatttttattatttatttatttaacttattttttgagacagggtctctttttgttgcccaggctggaatgcaggtggctgggtctcagctcactgcagtcttgacctcctgggacaagcagtcctacttctgcctccctagtagctgggaccacagggatgagccactaagcctggctaatttatttattctttgtagtgacaggtctccctatgttgtccaggctgctcttgaactcctggcctcaagcagtcctctgacctcggactctcacagtactggaattacaggtgtgagccactgtgcctggcctcaagaaattctcttaaattctttcagggtgggg

SEQ ID NO: 915765 - DNA, 4001 bp, Homo sapiens
ggtggtgccatacttaagctgcatgaatttggcctataaaaacaggtcacgttcctatcccttgaattttgcaatcctcctcctgaccctctccctcccctccttaccaggggtaggcagagctgatagtggtacctgcactgtatacatgaggaaaccgaggctcaggcatctgttctccccaatatcaaactgcctcctttttttttttgagacagggtctcactctgttacctgggctggagtgcagtggtgcaatccaggctcactgcagccttgacctcttggactcaagtgaccctcccaccttcagcctcccgagtagctgggactacaggtgtgcatcaccatacccagctaattttttattttttgtagagatgggggtctctctatgttgcctattctggtcttgaactcttggcctcagcgtgatcacttgacaagaggggcagttcttagccactcatggaaaatggaatggatggacacagactcaggtcaaaagcccaccttggggctctagaactttcagtagtcaagctgcgggaggagggaaagccacagtggtgggcacaggtaggaggtgccttgaggccagcactccccaatcttcttcccaattcactccagactctcctagacccctagcagccggcagccttttgccactggccagtggaggaagaagtcaaaagtggaaccctcattactgtagctctgctggggctcctgagggatgggatgttctagtcagcatggtccattaatgtttgctggttgcttcttgcaccagataccgtgctgagggctttacagacactgactgatttgatcccttcataaggctacaagtagttgctattattattctcatttcgtaaaccagggacctgaggcttccagggcttttgctagtcatacagctgaagtgctggagctgagattggtgcccacgtttgtctgacatctgaagctgcgcctgtttcactgcccagagagtctcagacttcagggagagccaaggatcccttgagctgcttgtttacagagcagattctcagctctcagccccagagatcctgatttaggtctggggtggggcctaggaatctgcattaggaaaactccctgtggtagctctgaagcaggggaagaggaccccattttgagacatcctacccaacaccagttgcctccccaactccaacccaccctcccggcaaagccttcacagcagcccactgaagaagccgtctgggcagagaccatgggctctgtaaagctcccagcaaatgacctggaccacgcctcaggtcagaagtgcccctgtcatccctactcaggaagagggccccagggtcctcatggaaagagagggatttatgctctggaggaatcgcagagattctggggcaggcaaagaagaaagccacttcctgtctatggggatttgcaaaatcccaccagaggcagccagcaaggcaaagggggtgtgagtcttgagtgagtgacacgggtgttgggttcaagccccagccctgccacagtaccctcatcaaggccacagctcccttttcataaggtggcggctggactgaatctctatcaggtctgacaagctgcagctagtgagccctgactgctcggggctgctctctgaaagcctccaatgaaagggagaacaaggagaagggagagggagaggggaagggatgagggaggagaaaggggtcttacctgtgagtcctgccacggcaggggcagcacaggggctccctagggctccatcccaggaggtggcagcagggattggatggcccctccttgtcattcactgttgtctctgctgcttctggcttggcactggtcttatacacacgggctgacctgaaaccttatcctagagaagttggttgacagcctgatcacttgacaagaggctggctggtgagggcagtgaggtgagaggggaggtgagtgagttccagatctggttcagtcctcttgacttggggtgctttaatatagctcctttaagctgtggacgcttccttggtgacaagggtgtatgggggggtggacctgctgccacttttgagtccaaaggtcaaggcctcccacgataggctgggcacagctctcccaggtctcttaataataatgtcatttctttgtgcctactatgtgctaaatattttacatacattactactattttccacaatcctatgagataggtactattaggattctattttttttactttttttttttgtaatttaaaattttttagtagagacgaggtcttgctgtgttccccaggctggtcttgaactcctgggcttaagtgatcctcctgcctcagtctggcaaagtgctgggattataggtgtgagccactgcacccgacctaattttttttttttaaattacagatttattgatatagaattcacataccgtacaattcatctgtttcaagtgcacaattcaaatggtttttagtatattctgagtggcacaaccatcaacacaatctattttagaacattttcatcaccctctcaccctggaaaaactccatacacattggtagtcacctcccttcccccgctccccagcctcaggcaaccactaatcaatctactttctgtctctataaatttgcctgttctgaacacttcctagaaatggaatcatccaatatgtgcttgtttgtgactggcttctttcacttagtatagtaatgctttcaaaattcatccatgttggagcctgtatcagtatttcgtttctttttagtgctggggatcctaaaatcttaccacttattttactgaggaggaaatggaatctcagggaagtcatgtagccagcacgtggcggggcctgactccagcctgtaaactgtaaggcattttgggcttatctactgtgaccaccattctctccaacatgacacttggaggctttagcatggacactgctggagccaagggagctgggacctggtggaagggtgccccacagaagctactggaggctccatctgtgggcactcagagtaagggctgggcacagctgaatcgggccccaggtgatgggggaaggggagaagaagaagagaagggaggggaggagtgagaagcagaagggagggaaggaaagggagttaactgggtagggcagaggaggagtaggcagaagtcttttctggactggggcacagagccagcgtcacagggcaggtggtcagaagcatggatgttcaagtgcaaagcttgggctgtacctgtcctcttccttggaccaggccctgaccttaatgtcagcagaataagcagctgcattagtgttaagagggaagtggctgtcagggctgctgagattaggaaggctcaggaagtaggttctgagctccatctgtaattgctagtctagaggtgatgcagtaaattgcagggagtctgtgggggaagaatagagtagaagcccaaaccaggaggcagcaggctctggagaaacctagtgggagggagggccaggctctctttagcttgggagcttgagggcagggccaggtctgcctgctttggctccatgtcctgaggccagcccatgctagaagtccgaaggctgcctgctctgggttgggatgcaaccagcctagggatcagaaacacctattcacaggtctctgtggagggagggctcaaagggaagagaggcagccactggctcgttctggtggtgggaacacctatctcatgccttaatccatgccacacgcctggtcaagtcatttatctcggagttggcactgggagatagattcaacttccggggataagatattgataaataacacactgttttgaagtggaggtgggaggtctccaccctcagggtccttttgtgttatcagaggctgctctcagcctggggtaggagtgtgtcctcctgaccccgatcaggttgtctgcgggagctggagtgg

SEQ ID NO: 915766 - DNA, 4001 bp, Homo sapiens
ttcatatatttgctgcactgacttgtttctgattggtttccttaatttatacagccaacaaatacttattaataataagctaccccagcctggccaatatgacgaaacctcgtcgctactaaaaatacaaaaaaaattagccgggcttggtggtgggcgcctgtagtcccagctactcaggatgctaaggcaggagaatcgcttgaacccaggaggcggagatggcagtgagcagagatcgcgccactgcacttcaacctgggtgacagagcgagactccgtctcaaaacaaacagtaataataataataagctacctatgtgccagactctatgctatgcactgatggggaaaaaaaaatcctctactattctactctcacccttgaaaaaaccattgtctctcttcttttccttcattccagtgccaccaaaaatatgctctatgtttgaatcttaacttgaacaattcttcccatcggacaatccatcatcctctgcacattaaaacttgaatggttcttttaatttcacatgctctgaagaggagacagaaagggtagcattatgatacttctcttcctacaagatctgcacctgtcgcagtagataaattcattcaagtcacttacataaacaatttcaatcttaggacttcaaaacctcccacgggtatgtaaactgccccaacaaagaaagaggcaagtataacaaaaatggcataaactatggtttctgcattaggaagtcttaagaagcattaagaattatttaaggccgggtgcggtggttcatacctgtaattccaccactttgggaggctcaggcgagtggatcacttgaggtcaagagttcgagaccagactggccaacatggtgaaaacccatctctactaaaatacaaaaattagccaggcatggtggcacgcgcctgtagtcccagctacttgggaggctgaggcacgagaatcggcttgaacccgggaggtggaggttgcagtgagcctagatcgcaccactgcactccagcctgggggacagagcaagactctgtcaaaaaaaaaaacacaaaaaacaaaaaaccaccttaactaggaaactggtgaaaactagtcttcttaactagaaaattggcggggattccctcagattgtacaccggaaactcaggctagtcaggtctcagaaatataggtcagatttctaggtcggcccgcctactccccagccttccaacattaagatctctccagggccttcaagctctgtcttcatctctaaatctactcaggtctttcattcactgcacagttacttagtacctatggtgttgtcaaacatagtggctagaggaagggaatacaaaagcacaatgtctgcagtcaaaggggctcacagcaagattacggtttgtaaatacataattactccacaatgtgataatcgatatctttcaaaacagaagggttgattcaatcttacagggagtgactgagttgggtcttacaaaggatgagctttgcaattcaagaaaaaagaaaaaaaaggcagaccatttcagcagagagaaagagagaaaggcgtggttaggcgtgtgctgggagctgtttgaggtcagtgaagctgggggtatgaggagggctcgcaccaggtggaggttgggaaacctcagagttgcgggagaaatcagaatccaggtcccctcagcctccctggggccgcgccccatagccggtttcagaccagccgccccggctccaagccccactacaagccgggaaacgcaaaacggaggcaacctggccaaaggcagaggcaccccccgcaagaccctgaggacccaaactggcccagcggactgcccgcaccttgccaagcagccgtctcaggccctcgcagtcgaactccatctccaggccggtcccgagctaggtcccaggactccagcccccggaccttcttccggacttgctgcaggacggaagccgctgaggaccaaacttcccggcggtccaaggccccgccccttcccagactggaaattccacccgcattcaacgccccgggctcagccgcggctgcgcccggaatccggggcctctccttcgtgaccccggagtgggcaagtgacgagggcacggccagaaacgcattggcgtcaaggaaaccacgacccatcttcctggaaggaaacttggggacacttatgaagagaagactaggaaggaccggagtagaagcactaaaggaggtagaggcaacacgcggtgttcttgaagagtttccagacagatgtattaaattccacagtgtatcaggaaagagcaagaccgaaaattgcagttgaatttaggaaggaggcggtaatggaacttcagaagcaaaatttcagggagtagaaaggaaaaacaaagtcaggaggagccttgccggagaagcggagataggacagccccagcatgagggtggcttagcacggggagagtggttgctttttttattttttttaggggtgccataacaatgttggtggtcaaagagaggagaaatccaggtgaacaaatagttggaaaacaagagaggagggagatgggtggataaggtcatctggagaaggtgggtgaagaagagatgcaggatacagtaattttctggcgttgtttgatctccttggcccatggctgacttacctgccctgtatccctggcctgagccactgaagcgaaaagtcccaggagctggatattgtaattgtcaagaggttggacatataggagagagattgtatttataggaagatctgaagggagtgctgccctgactcaggagaagaagctgaaaagctggaaggaacattcattcagaaagtttttgttgagcatctactacttgccagctatttttccaggtctcaggatacagccgtgaacaaaatacactcagatagctgatgtcttaagggtgtcattcctttattagcagagagagagcaaaacaataaatgtaataagtaaattattcagcatgtcagaaggttgattacgtgttgtggagaataaattctgaaaagggtagggagattggggtaggtctcactgaggggtgagggagtaagtgttacgaatccgagtgcagacaaagcagtagcctaaggcatgtgcccagggaggctcaacacagcaaggaggccagtgtggctggagtagaatgaagtaagatgggagtggagacaaggaggctaagtcagggaaataagacgggggaacaagtggtttagagaagtgagtcttctagtgtgagccccagatctgcagcctcaggtgctgggagttgttagaaatgcagatgctaagacctcaaccccagctttattcaatcacaggctctggggttggggaccagcaattctcttttaacaattcttccagatgattctgatgggtgatgaagtccaagaaccactgtgggactttgtagacaattgtaaggactctggcctgtccctgccctccagccagagaccatcaggaacacacctgtgcttaaacaagttgagttcattattaatagttcttgcagtgaggaagcaggtgttgtggaggaccattgggacagcttggtgagggtgagagaacctattatagaatttgggcgatttgcgggagggctcaagaaagccaggcttcaccctggattgggtgctgtcagaaagcagggacatttctgtgactaggtatctgaataagtattgtctataagatggacagactagagtgaggataaagctatacctagtaaagaagcagcagtcactcataatagcagagaaggacgtttggtatttcatggcttgcacagtgaccttgctctcttgtctctgcttagacacaattttgaaatggccttgttgttgtgtcccttttttatagtctgactgaccttgtctcatgttggtgttctgtgagattatgtcccacagaagaataactgggccaagctgtga

SEQ ID NO: 915767 - DNA, 4001 bp, Homo sapiens
tcaaactaccttggaggggggcctttgggccctcatgaatgagactagtgtcttcataaaagagcccatggtcgggcacagtggcttacgcctgtaatcccagcactttgggaggccgaggtggatgtatcaattgaggtcaggagttcgagaccagactggccaacatggtgaaaccccatctctactaaaaatacaagaaaattagccgggcatggtggtgggtgcctgtaatcccagctactcggaaggctgaggcaggagaatcgcttgaacctaggaggcagaggttgcagtgagctgagatggtgccactgcactccagcctgggcgacagagcaagactccatctcaaaaaaaaaaaaaaaaaaagaaagattaagataataaagtaaaatatttcttagaaaaccaaattcttactattaggtgaacagaataactaaaactgttaatgatttagaatcaaccatatacatatgataggccgaataaaggtcctttaaagatgtccatatctaacccttggaacctgtgaatatgtcaccttacttggcaaagggattttttagatgtgattagtgactctgatcacttggctagccttaaaaaaattaaggagtctgagatgaagaaattatcctgtattactggggtgggtctaatctaatcacattggtccttaaaagcagagaatctttcccagctgtggtcagagggcgatttgactatagaagaatggttagagacatgcaacactgctggctctgaagatggagaaaggagaccaagagcccaggaatgtgggtgacctctagaaactgaaaaaggcaaggaaacattatctcccagagcctccagaaacaaaggcagttgacacctggattttagccaagtcaaacctctagtttactttctaagctatagaaatttgtggtggacttcttgcctacagaattataacacagtaaacgtgtgttttttaaagccactaagtttgtggtagtttgttacagcagcaatagaaaactaatacaagatacattgtattaatttaagctttctcagaaattgcaggtcataaagtatagctgaaaatcagaggataaaagagaaaaagagaaattacaattttgcagctctttaggaccaaaaattagtagttcaaataatgcagcatttaaactagaggatatgattcttaccataggtgtccatggaatatttgaaatgtgggaaaaatacatttacattccttagttcttccacagttaggtccctgaacttgtactgaaaagagaaaaataagcatggagtaagaataaagctgtaagcaaaagaacaattgcagttaactttttttttttgagacggagtctcactctgttgcccaggctggaatgcagtggcgggatctcagctcactgcaacctccgtctcctgggtttaagtgattctcttgcctcagcctcctgagttgctgggattacaggcgcacgccaccacgcctggctaattttttgtatttttagtagaggcagggttttgccatgttggtcaggctggtctcgaactcctgacctcgtgatctgcctgcctcggcctcccaaagtgctgtggttacaggcgtgagccaccacgcccggcctgcagttaatatttaactgacaatttacggtgtggtaggccctgagctctgcaaacaagaatggtatttgatttaatctttttaacaacaaccctaccaggtaggtagggctttacaactgctctataggagcaggagaagaaaatgaaagctagagaatcaaagtaacttgctgagtcatatagcaagttaaatagtgaagcccgagctcaaatccaggaccagagtctttaatctctaaatcaaactgcctccaaatacctccagacagcttaaatgatgaggcagaatggatcacccctctcaccactatgcaggatccaaccgtctttttggcacggctcattcacttgagatacctcgactttcccctcccaccttcctggcactgcatcctgggtttcaaatggaaaacaaaagcatgcaagttttgtagtcaggtgtgtgaactgcctcttcatttatccagatgtcttctcagagatactgacttggttgtcttgtgggcaaaatcatttaaattctttaagcttattttctcatctgcaaaaataaataatacttacctcttacactagtggttaggtttaaatgaaagaaaataagtatattaagagtttaccattctgaaaatggatttgagacaacaattccttttacaatggtatcaaaaagaataaaatatttaggaataaatttaacaaggtacaatacttagactctgaaaactacagaacattgttgaaaaaaataaaatagaccaaagtaaatggaaagcatcccttgttcacggacttgaagactgtattgttaagatggcaattttcctcaacagattcaacataatccctatcaaaatcccagctggctttttttttttttttttttttttggcaaagatttacagtctctaaaattcatttggaaattcgagggacctagaatagccaaaacgatcaggaaaaagaacaaaacagctggtggattcatactataatcaaaagacaggttatcatcaaaaggagaaaataacaagtgttggagaggatgtaaagaaatcagaactctcacacatacaccactgccagtggcaaaatgatgcagctgctttgggaaacagcctggtagttcttcaaaagactaaatacagagtcagggttactacatgactgagcaattaattccacttctaggtatacacccaagaaaaatgaaaacgggtacctacacaaaaacttgtatgcaattgttcatagcagcattattcataatagccaaaaagtgaaaacaattcaaatgtccattaactaatgaatgaataaaatgtggcatatccataaaatgaaatattcaaccacaaaaaggaataaaatgctaatatatgctacaacatggatgaaccttaaaaacactatgctaagtgaaagaaactagacacaggaagtgcctgcctctggtcttggacaaagactgtgcttcccagaaaaaaaaaaaaaagaaaaattaaaaataaaagaaatgagacacaaaggctatatattttatgattccatgtatatgcaatatctccaactggcaaatacatagaaacacaaagtagactagtggaaacctaggattgtgggagtttgggagaaaatggaagaggattgctagtggatcctgtttcctctctcagagccttaagttgttcacctgcaaaaaagatacagctcgccaggcgcggtggctcacgcctgtaatcccagcactttgggaggctaaggtgggtggatcacctgaggtcaggagttcaagactagcctgaccaacatggtgaaaccccatctctaataaaaatacaaaattagccgggcatggtggcaggcgactataatcccagctacttgcgaggctgaggcaggagaatcgcttaaacccaggaggcggaggttgcagtgggccgagatggtgccattgcactccagcctgggcaacaagagctagactcagtctcaaaaaaaaaaaaaaaaaagatatagctctactgcctacaaacttcaacaggtgtgtatgaaggtcttacaattaacatatgtaaaagtgagataataaacaaaatatgtatacaatagtaagtacaggcaggaaactacaaattgacacaaagaacatctaagttagagaaaggcctctggagaagctgaatctacatttcagcctagagtctagaacagtatagaaaattagtagttaagccaggcatggtggctcacgcctgtaatcccagcacattgggaggccaaggcaggcaaatcacttgaggtcaggagttcgagaacagacaggccaacatggtgaaatcccgtctcaa

SEQ ID NO: 915768 - DNA, 4001 bp, Homo sapiens
aagtatctgtctcaaaaaaaaaaaagtaagcaagcaaaagcaaacatagcccgcttgcatacacacacacacacacacacacacacacacacacacgggcacgtccacacacgtgctctggggacaaggatgtgaatgtaatccatgcatgctggtgggacagcatgggtagccgatttcctggagggcttagatggggtttcttttttatgatttcagttattctaatcctgcctgtgcaacgggagatgttttaaattttcaaatttttgtttaaatggagttttctcttgttgttttgtttgtttgtttgttttaaagatgagggagctcaaattcacctaatttgtccactggtctccaggtcccatcagggagggcactgtggaccggtgatggggaggctgaaccacatacctccagggctcagatctgggggagagctctggggcacctgcccagccatgcctgtctgtgagaaacaccccctcagcaccagtcacagcgactgggccaggcatgggtgcctggactttgctgaccgatcagaaacccctaactctacagccccaaccctgaaggccacagtggctctgggaggcctccaaggaggccacgaggagggtgccacgtgaggcccaggcaagctgggagggagctcagcccgtgtgaatctgttgctggaaaccaaatgtgccctgaggcaaagttcctgtttccttccccaaatccgagtttcacccccttcactctcaggcttccgggtagaaaaaaacctctcccttgttccctcgccccacaaacaccccggcagatggacacctcctggcccgccggcctctgtacccctccgaaatgggagtaccgcagcatcccacaggagcagccgcgcccacctgatgagcacaggtgtgtagagcagggcggcgatgggagtcacgttgatgcccatcagcattttgctgtcgatgtcgggcagccccatgttgccatacttcacctcgcggtaggtctcgtcgtagtgcaggatcagctgcatctgcaggaggcctggggacaggacagagagcggcgtgcagggagcagcctagctttgggcgccaccgagcagaagacggcatgcaggcctcgcagggagctccaatcaccgaaggcattcccgctgacagcgcccctcaggacagcggggttcccgggctgcgccacgccttctgccagcccgcggccacttggccagctaagcccagacccccacccgccttgctccgccggcctccaattctgacggtggcaggtctgtccgggagcccggacccccgtcccccacccacaccgaggctctggctgggacccggggacgctgcgctacttgaccccccaaccccacccccgccgcggggggccgtggctgcagctgcgagggcagcggaggggaagtgagagcgggcgggaggcggcggcccgcggtttctgtttcccgggccgggctgggagcgggcggggcggccccgggtccccgagcggcacctacccaggtagacgccgtaggtgagcatgcccccggcgctggcagccagcacgttcttgagcacgcccaggcgcttgcggcggtagtagcggcgctcctcctcctcctcgttgtagttggggtacgcgcccaccagctcgtccagctgcgagccacgcacgccgctcgcacccgcgatcgcgccccgaacccgtgtcccccggtgcccgccgccccccggcccgccccgcccccgccggggggaccctggcccacaggggacgcccgcgcctcgcactccgggtccccgctcaccggggcctcgggcccgtccgggaccccgagcaggtcctcgtcgccctgcggccccgcagcccccgccatcgggtagagcggcggctccgcctccatggcccgaactactgcggactcgcggcggtcgccccggagtccctgcgaccgcccggccacttcctcccggcggccgggacctgcccccgccccgccctgtcccgccctgcgggccgcctcctccaggacacgtgtgtgtgtatgtgtgtgtgcgcgcgcgcgcgcgcgtgtgtgcaggggcctgcctgtgtgtgccctctggggtgtgagttcgaatccccactcagccacctcctggccctgtgactttaggaattaactccatttctttgtgcctcggtttcctccgtttcctcgacggtaaaacagaaatacatggcactacccccggggccatggcggaactattgagttaatgcaaagccttggaaaagtgccagggttgcctggctcccttaagctcccctcagggttgcctgggtcgtccccagccccacctccaagcctgctgttacagctcatcaaagagcactgcagggacagtagcgtcaccacctggaccccacctcccaccaccggacgctacagccagagcccacctcccatgtccccatcctgctccagtttgggctgtgcaaatgggagcttgagtgggtcctgggaggtggagattgtgatccccactgaactacatgggggaccctgccacaaccatgtagtggggcccagagccacctgcccccatcctgctgggcactggatcccgggctgcagcgggagcctgtggtggggccgacactccaaagcactggctaccaccgacctggctggagccacggggccacttttgaaaatatccagattctctcccctgggttccttctggtttgaatgctcttcctgctgcgcctcccaggtggcttccttcccactcagctctcagaacaagagaccatccctgcagagaatgcagtcccttcacttcccttctggttttccatgccctccctgtgcacccccctccacccactgctctttaggtacatcctctcccaaatgcagaggatggcattgggcacctactgagtgatcaatacttgtgactggatgggtgcatgagtgactggatgacaaacacctcccaccccgcaaggattgctgggaaggtggggggaggcgtgaatctgcagtggcttcaggcttccaggaggtagaactttctccaggtgacgatgcccaagtgcagatgtggggaacagacaggtggattcatgcaggtgggtggctggaagtgggagacaggaaaggagccgaagagagggcagggcccgaggcgcaggggcagggaggaggtgggagagtatggctatggcgggggccgttctcagatggcagacaccagcatcattacacagtatgatgagaaagtgcaattctcctgactcagccttgtgagtagctggaattacaggcgtgtgcccctacacccagctgatttttgtatttttagtagagatggggtttcaccatattggcccaggctggtctcgaactcctgacctcaagtgatgtacccgccttagcccccaaagtgctgggagtgggccccccgagcttctcaatttccctgagggaccccaaacttctggggcctggtgcaatctcttcctccccttgttcctctgggcctgggggttgtggcggttgctatggttgcccatcctgggctcttccatcacctgtgctgtaccaccaattccctgcactcaatgtctcctactcaaaacacctggagagggtcgggcgctgtggctcacgcctgcaatcccagcactttggctggccaaggaggatcacttgagctcaggagttcaagaccagcctcaacaaagtgagacaaacccccccccccaacccatctctacaaaaaatacaaaaactagcctggtgtgatggtggacacctgtagccccagctactcaggaggctgaggtgggagaattgcttgagcccaggaggatgaggctgcagtgagctgagattgtgccactgcattccagcgtgggtgacagagtgagacctctcaaacaaacaaacaaacaaaaaacaaaaaaaacaaaaaacagccctggaggcactaaac

SEQ ID NO: 915769 - DNA, 4001 bp, Homo sapiens
gtgggctggggagctggatggtgccctgggcttcctggagaagctgctgctccgggcagacctccttacttgcgggagcccagtgccagggcaatgatgaagcccagcaccagcaggaacatggcgacagagagcagcaccgtgatgaccaccatgccccctgtgcgggccatacccagcccaatggattccatgttccttcctgtcaaaagagaggggagaccactgtgggcgggagagacccccagcctgcctgaggctcacggcctcacactcatccagccaacagactgcccaaccaaccagccagccagccagccagccagccagccaaccaaccaaccaaccaaccagctgatggatccaaacacccatcacatagacatttatgaagcatctcctatgtcagccgctgaggaaaagttaagaggacacagtccctgcccacgaggaacctttagctgagtgtgcagtagccatgccgaaggttccgtgctaggatagaggtaagcaggggccccgagggcgcacggggaggcacaggcaacccagactggggatgaggcaggaatggtcagggaagcgtttgtggccgctgagatgggaaagggaggcgggagtgttacttacgagggagtgtggacattgggatctctctgctggactcagtggctgtccccttcttcactaggtaggaaatgcttttgtggtttgggagagagtagagaaccctcagtgagtattgggacttacaggaagaggggctccagcctgggccacctaccctcacagctgtgtctcccctatgtgcactcctccaagaggcccagctttcacccccttttgctgtgccctcaccctctcctcatgcccaccagatctcccccacactagcttctctctcttcctgcacccccttccctaggtgcctcaggctggacccagtacctactagaatttggttcctggcacgaggtttgtcacctggtatgcactgagccgagtgactgtgaagccagcaccactgtccaccacactcaccagttccctgcgcccacggcacggaggcaccacaaagctggacgtcaccactgggcagaagtggcgggaggggaagactgggtcaagtttctggaggccccaaggagaaggggcagcttttagagtgtgggtaccccaggagacgggtggacaggaaggcatgaatggggaaaagggtgcagagggtgtcgcaggaaggggtctttggggactagagggatgccttgggagaaggtagcagacctttgctgtcattggctctccggaccatcagtgtggcattgcctcctgtgaggtgacaggggggcaaggcaaccagcaggctctccgttagcgccggggacagcagaccagagaggcttgagatgttgaagtctgatgggaggcaggagggagctccgatggggactgacccctcctggccaacagatctggcccggtcccattggagccatctccctttccactctgtgaaccctgggcagaacagccaggcctgtgccagtatgaccaccaggtggcaggcttgggctgcagaagctgcaccctccaccaagcggtccccagagccagaacctggatgccaggagtcgggcagcgcccaacctcacccctccccgcagcatcggatccttgcccacacctctctgcctcctaggtctggaggaggatcaggagtgtaccctgagcccagtgtctgatacccagtcactgccatcaccagccctgactcccaactgtccagacctctctttgagagccctggaaggtacagtgctccctgtccaggcccccagcccccttcccacccctgccagagatggaagagacctgcagcccctggggacagcagagccagcagaatcaggatcaagggcaaggtccggatgggcagcaggggtgccatgctgggctgggaggtggaataggtgctggcaggctggggttcctgaggcaagtgaggccctgcccctggggtggctgattttgtcctgggggtgggaggggctggaggggaatccagtccaacctgccccttgggccctatagcctcaaaggggtggggagagcagacaggtttttcaggatggggagctggccctcaggccaggaggggggatgccctggctgggtcttgatggtgtaactaaggtggggaaagaaatcaccccttcttctgggactcccgtgcataaggcagtgttcctgtgtgcacgggcatctggagactggccagtccttggaggactgctcccccgatgtggtgggggtctttcccccacccctcagaagggtgatgagtttggaagttgccctgatatgtaggaagagaatactccaaggggctactgaaagggccttgagtgggtaagaatgggagagaaacattctggtggggaggggcagcagactgagggtttcaattcttggagtgcactgaggcttaggtactgctgctctgggagaggcaggggctgtgggggccagggagcacatgcggtttcagattcctctggagggtggggacgaaggtggccatggaagacttctggagagaccagagagacagacattgaccctggccagcaggggttgggggtgggcacagtcagccttgggcagcaaccatttgttgaactgagaatggagaaaagagacctcgtaagataacatgaaaaagagacagaacttccctgactgcctcctccagccctgggctacatcagaaagaagcagaggagttctgagcagagggaggggagaggagtcaggacgtcttccgggccctgggtaggggttctgtgtgctccattgtagccctacagccaccctgggtggtagctggtactggcttccttttgtagtagaactgaggccaggcacagtggctcatgcctgtaatcccagcactttgggaggccaaggtgggaggatcactcgaggccaggagttcaagaccagcctaggcaacacagagagtttgatctctattaaaatagaaaagagatcagccgggcgtggtggctcatgcctgtaatcccagcactttgggaggccgaggtgggcggatcacctgaggtcaggagttcgagatcagcctggccaatatggcgaaacaccatctctaccaaaaatacaaaaactaacgcggtggtgtgtgcctgtaatcccagctactcgggaggctgagacaggagaaacactggaacccaggaggtggaggttgcagtgagccgagattgtgcccctgcactccagcctgggcaactaagtgaaactctgtctcagaaaattgagagagagagagagagagaaaagtggaaactgagactcagacacatagagttacttgtggaaagtggaatactttgtcgggagaggctgtagaacttccagaagcctgagagctgtacagagactgttgctgtatatctgtttgctccacgaactattctatcttcctcagtcccagggaagcttagggtcctggtaggaatgtgagggaggttgtgtccttaccgccaaggtgggaagggtaggctcaaagtttggggtgagtggagaatgacagtaaaggaagaactcatgggcctaagcagagagtaggagggtcttacgccagtgcatctccaaatttaatatgcgtatgaattaccagggatcttgttaagatgcagcttctcatgcagtcatgcagtgggtctggggtgaagcctgaaattctgcatttttttttttttttgagacagagtctcgctgtgtcacccaggctggagtgcagtggcgtgatctcggctcactgcaacctctgcctcccaggttcaaacgattctcctgcctcagcctcctgagtaactgggattataggcatgtgccaccattcccagctaatttttgcatttttagtagagatgaggtttcaccatgttggccaggctggtctcaaactcctgaccaca

SEQ ID NO: 915770 - DNA, 4001 bp, Homo sapiens
ctgactttaataacagcagcctttttttcaattgcagtcttgcttgggaaccacaggatagacaaaagaggagcaacttggttgactaggctgtggggctttgaccccacttatttaatcccctcagtggcagctccaataaatcctgaccagatccagagattggggaccactttacatttctaaattaatgttttacaataatcctcgtagttatgacctttcatagaacagggctgaggtttgtaacatgctggagttcaaccaggatctgtgactcaaagcacactccttttactactagtaagtcagcctcctaagcttgtttaaccagaggttaaataatggccacagaaagcattgtggcatatgttaagtgctagatgcccctccaatctcgctccaaggacaggagtcctgagtgtccactataggcatccattacttcaagacttcccaggatagttcagatttcaagaatgtcccacggttatccctggaagtacactccaacctgacaccacatgacctgttttgaaaatgtggttggccgggcgcagtggctcacgcctctaatcccagcactttgggaggctgagacgggtgaactgcctgaggtcaggagttcgagatcagcctggccacatggtgaaacccgcctctactaaaactactaatatcagccgggcgtggttgcggacgcctgtaatcccagctacatgggaggctgagtaaggagaacagcttgaacccaggaggcagaggttgcagtgagccaagattgcgccactgcactcctgcctgggtgacaagagcaagactccatctcaaaaaaaagaaaaaatgtggccgcggcagggcgaggtggttcacgcctgtaatcccagccctttgggaggccgaggcgggcggatcacctgggtctggagttcgagaccagtctagccaacatggtgaaccctgtctcaactaaaaacacaaaagttagctgggcttggtggcgcgcacttgtgatcccggctactcgggaagctgaggcaggagaattgctggaacccaggggcggaggttgcagtgagccgagatcgtgccactgcactccagcctgggtgacattgactccgtctcaaaaaaaaaaaaaaaaaaaaaatgtggtcagatacctatcgggatcagcctcttctggtggggtgggacaggcagcagctccaggccgcgcccccagcaccgaccacgcgtctctaagcattggtaggtgtcgactgcagggctcattctgggtggaggaacatgattttattggttctttcagttcaccacatccgactcgcgtctcggccctggcccgccttgcggaccttaaagcagtcagtccagggtttgggggaaacgtgctcacccgacggcagctcacaggaccccggagagtcctggcatggtatctcggtccggactctccgctgggcccacgaaggagaaaggctgcctcggattcctgcgcccaagccaaggtccggcgcccacggaggcaagtccggtctcacggtgacctcccgccggcgccgccttcgccgccaaccatccagttcttcctccaggccacgttctcctgcgtggtcgctgcctcctgcagagtggccagcaatagctgctgggtcctggccgcctcctccctgctccttgggtcctgcagtggcatctcctgagggcaggaaggggagttcgcaggagctccagtccggggctctccacccgcccacccttcctcgggactaccagttgcttctacctttagcatttcctgcttccgccgctctcccggggtcacgataacgaggagcgcgtagcccacgccagcccctgcgcccagcattgcgactgagatcagcattttccgcaaggaatccatggccgcctgcacagccagcggagcgcccacgggagctccccgcagccgcaagctgttgccgcgcggtctcactaccccttggcgcaggctagagcgccctatagcagaaaccatagataagcggccggctagagaggacctgctcgaggaaacgtttggaatccggagcgcttggatctcaggtttagctgagggggttgaggtgtccaagaagtgctggcaccaagggctgagcgcggggaccctgtgtcctcaattccggggtgggattgctagggggagagtgcgtgtcttcatggttgccgtgggttttatgattgcccatttttctgtcttccgacgtttcccgatcagtagaggcccgagctgtgctctgtggtttcctgcagtcacccgcgcgttttcaacacagcgcatggagggcatctacacacatacacatccctctccatcccctcaactctggaacaaacactcaaagtcaagtatactggttggagaaatgggtaatagttacttatctttaacatttattttacaaacaacctattccttttctcgtcatggtacacacttggtattgtttgggtttttttttggttttgttgttgttgttagtgtgtgggcgtggttttgtttgtttttggagacaaggtctcgctctgtcgcccagggctggagtgcagtggcgcgatcatggctcactgaagcctcgacttccagggcccaagcgatcctcctgcctcaacctcccggatagctgggattacaggcgtgcaccaccacgcccggctggtattgctttttgttttgcttcgttttcttttttgctttttgagacagagtctcactctgttgcccagctggagtgcagtggcgtgatctcggctcactgcaagctctgcctcccgggttcacgccattctcctgcctcagcctcccgagtagctgggactacaggcgcccgccaccacggccggctaattttttgtatttttagtagagaaagagtttcactatgtaggtcaggctggtctcgaactcctgacctcgtgatccgcccaatccgcccacctcggcctcccaaagtgctgggattacaggtgtgagccaccgcgcccggctgttttgctttgttttcaaccactaaaaggctggattcgtgtaacatactgaattctgctttacagaagaaaacacctcttagctgtgtgactgattataggcaagttcttgtgccccggtttctgcatcagaaaatgaagcttataacaacagtacttgtctcacagttttaggataattaaattagttatatgtaaagcaattaaaacagctcctgccaaagagtaaacaccatataaatattcattaaataacatacaaacataccaggttgggaaaaatcagtaagcataggagtcaggaaattccaagttggttatcacaactcttggcccacagggctttaatccaggtgcccttgtctcctacccttgttgccatcccagtgtctccagggagtaagtagaaataaagatcctatctcacctcttgggcattttcccctcccctgaaagcgtataatcgcttagcacagtcggtgcttaaggggccaggctccaaagaagattaaaggaacagtttgtggggtgcactgggcagcagtactctcctctgagttcaatcatcttgcactctaagaatcaccaccatggcccttgtgccagggagaagcaaggaggatgggctttggactagaaatagcccaggctcctcccagcatccagaaagtcccaggctgcccaaccctctctgggacagaggaaaaattggcaaggttgaaggtcaccagcacattcaggttagtacttcctcagcctgtgtctggcagctggcttaccctccagtttggcccaacctccctgctgtccctattcaggatttctctcaaaagtcccatctgccgtctattgtggtggaatccagtgaggtgaatgaagagagtggggatctccatttgccccatgaggagctgctgctgctcactgatggtgaggaagaggatgctgaggccttcttccaagaccaa

SEQ ID NO: 915771 - DNA, 4001 bp, Homo sapiens
agggcacaaagtccagcctgggccttgcctagcgcatggcgcctgccctgcctgcacacagggatattaataagtaatgactgttgcgatgaggaagagtagggcagaggaaacgtggaggtctgaggccctttggagcctgtgggacctggggaagaggaacagggcaaacccaggatctgcatcagacaccagggaccctggagatgattctcacaaaaaagagagagcaggtaccccacagagtgaaggcagaagacctgatgttatttcaggccaggggcaggaaactgaaattcaaccctgagtcttgggttgggggatggaaggctgagctccttcaaactgggttgcctgaaatctacactcacaaaatgtccttagtggctgaaatttcttccgacatgtctctttgcaacaggatgtaacagtgaatgctctctcaagctccccttggtattcgccagcccctaaattcctgctgaacttccagctatcacccacccctgggagcaggaccagaaatgcccaagaccttgttttcaggagccttctgccagtttgagctgtccctttgtgcccctacaaaagcttggcctcaacacgcagcactcagacatgggtaattaccagggtagggtctgcctcccacctacaccaccagcaaagggcacagactgggtatggctgagaggatgctcaaaacatgcttattaaatgaataactgaccccgggcccttggccccaagcccctgtggcccctacactggctagctccttgggctcctatgggcctctttatgggaaggaaggagttaagcaccctgacctgccctacctgagctcagctctcaaaccaggaagaggtttggcttggtctaaagacactgcccctggggtctttgggagagccttgggtcacacagttatcaatagttaagttatcaatagttacctgcccctcaggcagggcctgtggggagctccagataccacccaccccccccaagcggcttcatccccagactcagaggcatcctaagacttggtggggaagtaggctggatctctttgatggccctctctggtctcagggcctcagcagattctgcacagctttgtgaatcattctcgaaatgccctgtgtgaaacctggccacttccagagatggtccttgagaatcccagaccaccagtgaggcccctcactgggacacaccagggtggacccggctctgcctgaaggatctggccggccagagcccagctccgacgccctcagtacctcctcccttcctccccaccgcacccgggtcagcaccagctcctcagctacttctcagaccctaagaaacgcccttaggcaggcagggctgaaatgcttctaactcatgttctgaggtcaaaaggcagagagagagacgtctagtttcccttctcccaaccctcacctctcagatactgccccagactgtctccacatgcctcaacagccctgagctgggggcactaggaaggagaggggcttgcccacaaagggggcacctcagaaaagcggccaagactggaaggaattcaaaccccagagacgtccctgcccctggaaggcagagggagaaaggctggcagaagatcgactcgtttagcagtccttgagccgggagtccccgcattccctccctcactttactggggatccctgctgccagccagacgaccctcgggtgtcccagcccaaccagagccatcaggtggggccggaaaagggaggggcagtgccggggtgtccaccccctacccaccgcgcccaggactccggagtcccagaagcctggggcgccctgcagctctgaccttatgccggaattctcgggccacttttcggtccatggctgggccaggtccagctgcgtcgttgcacgacccgttccttcgggtgcccggctgccaggagctggaaagagccgcgaccgcgaccgggccagccgccctcggagctgggggcggggcctgagcgcggaggggcggggccaggcctctgtggggcggggccgctgcgaggctggagtcgaaggtgctgagtcgtcgcctcccactgaagcctgggagcaaatgggccccagtgtgcctatgggcctgaggtggcagtagctgggcttcaagctggtatttctctggaagtggtacctgaacacatgcgtttgaggaagaagatcgtggagacgtagggaggaggtttgggacttttttgtggggaccggaatagagagatacggaaactatttacacgggcggggggcggggcaatctagtccgttttctctggatattctttttttttcccccccgagacggagtctcgctctgtcgcccaggctacagtgcagtggcatgatcttggctcactgcaagctccgcctcccgggttcacgccattctcctgcctcagcctcccgagtagctgggactacaggcgcccgccaccacgcccggctaattttttttttttgtatttttagtagagacggggtttcaccgtgttcgccaggaaggtctcgatctcctgacctcgtgatctgcccacctcggcctcccaaagtgctgggattacaggcgcgggccaccgcgcccggccttctctggatactcttgtcgaggttcatggccctcctggactgtcagcccttgctacgccctcacctccagcgtaccttcagtcctggcttcctcctgcacttttccaccagggagaaatcaatccttgttctgtgaattccttggggacagggctgggttttactgtgggccgcaggggtctgaatcagtgtgtgtgagagtgcccccctcaactgatttcccctcccaccttccctaacacctccacccccaacaaaacaagacaaaacaaaacccaaacccaacacactcacatatccatcgaagcctggcagagcctggcagtgacattttgatctatggctgaccttcacccagggcccagaccctctggttcatttaattcaatttggtcagcatttgcttaactcctaggtctagtgcttggtgcaaagacaatgatgaaccaggcctggaaaggaatgaaaggaaagattcatcaaagacaatgatgaaccaggcctggaaagagatgaaaggaaagaggggctaggagaggggtgataaaaatgtgtaaatcagaggctaagtatggggcttgtgcctgaacttaacccagggaggcacctgagccctttgtgccctgtcaagggcaggggcaaggagatggacagcagcttacatcaggtaaccacttacaattgtaactctggggcacctaaacacccctctgcgtccctctccccaatagctgaagttttacaagcacactatttttgttgcctagtttaagatgtaaatccctcttggagaagaaccttaaaatatgatctgttttctcaccttagcattaactattaagtcagcgataaaatggaaagacttgtgggatttttgaatggtccagaaaaggccacacaaaatgcattcccctccgacttacttcattgattctctacattggaaaagaatgtcatatggctgtttattttgtatttagaatcctggcagaggtgaatgaatgtccttatccaggggaatgctgttcacctgccacaccaatccttattttacattggccattacccccacagactccctccaccttaaaatgccccctgctttgttttgagaatagcattgagacctggttctcctctctcatgaatttttgtttcaagcttccttggagacaatcagtctttgcctgttccttaaccagcattccttaaggctccatccttagctctttcctcttcatcttcctatctgtgcccccagcttcctcctgtgtgaagatagctgtgtttgctttatttaccactatatgcctagaacagtgcatggcatggaatcaatgccaaacaaatttgttgagtgaatg

SEQ ID NO: 915772 - DNA, 4001 bp, Homo sapiens
ctcagttgtgaggattaaataaaataatatttgtaaatttcatggcccatagagttcaataaacattgatgattatattgaatacttccacttcttattataattagtggtattattaataatagcgccttaccaggtgaaccttcctagggagaaaaggagggttactcctggggaagtgttcctttctctttttttttttttttttttgagacggagtctccgtcgcccaggctgcagtgcagtggcgcgatcttggctcactgcaagctccgcatcctgggttcacgccattctcctgcctcagcctcccgagtagctgggactacaggctcccgccagcacgcccggctaatttttttgtaattttagtagagatggggtttcaccgtgttagccaggatggtctcgatttcctgaccttgtgatccgcccgccttggcctcccaaagtgctgggattactgcactttgagccactgctcccggccggaagtgtgcctttctaatgccagagaacagtcccttggttttctgaactgaccatgtcccataactgggaagggcaaacaaggcttgccatcttcctagacgtccagtccaccaagcagagaaaggccaagcccatctgggctccttccccctttgcctagaaaaatacggcaagtgcagcttcccccaggccaccaggagaatgcttggcccctctggggtggttccactctacctgtgggagggctcaggattccagggccacagagccgggctgggcagggtcacaagaggaaggaacggggttcttagcctctctggccttggtgcacttgtctgctcccaggacgtttctcgatggctctccccgaggactgggagtacccagcctggtgcctccaccctgtcttagcacaggctactgactcagcccaggtcctaatgatgcacttcagaggacgccctcattccagtcctcattctgactccagtctgacatgcatctacagcatcaaaggagggggcctgcctcgaccttagcccaatcagctctcctttcctctgctttacgggggtccatctgggggatgttctcatgcccattccaggggaggtgagcagcccctaccactacctccagctcagtcccattctaaaggcagccaggtcaggaggtaggatgttcactcttcagggaagggctagaatgggttggctagggcttcccttgactgttgagaagttgctctctccggagcaccgcgtgcctgcttctggtttgggactggtgagaatttcaaagctgcctctttctggtttgggattggtggaaaatctccccttccgcttaattgttgcccaacccccgcccctaaccccctttagcaaactgaccggggagctttaagagcagcgagtgagctgcacgcacacgtggggagggggtttgtcagtgtcgctcaggccacataccaccgatatacacggggcacagcgaggaggacccgccaaagcagcatttccttagaatacactgatcagcacacagttggctcttcctggcaccctgggctgtcagcaggcagccctcacacaactggcagacacagctggagcgtccctgcacagccggctctctccctatatttctagtgtccactctgcccagaatgtcgtggacaccttactttctgagctccaaaccggcactgatccccgaatcccccctcccggatccccgacaggtggcacgtacctgcctcttcttggagtatggacgagtcgaaccgggcacaagcatggagctgcgggtgagtcccggctggcgctggcgcggcgcagtgagcaccagctgacgaagagggctccccggcctcggctcctgcctgactctctcccacctccgccgggggcccagaagggacctccccgggaaatcggcgccacccagcgggcagccgcctcatcgcgcctgggccggcagagccacaccccgcgtctcgcgtcactgagtcgcgtcacggctattggcttgttcctactgtggcgtcattagagcccggcctccggctggggccacccaggcaaccgatatacacagagaaccacgtggaggaaaagcacgcgagtttggagcgggtggagcaggaacagaggtggactggaatgtcacacgacggggcagctggaaggtattgggaaagaagaggcgtcatgggagaaggctcggaacttgagccctggggcgtatcaactttcagtttttagggaaggctaaacgtcccccactccccttctcactgggctgggggaggtcctgttcctcagcctcttctctttttctctgctgtcaaagacactctccgctcattttactttcatgggaccagtgattagtgatgaatgcctgagtgggtaaacggaggcactgagtcaatgaaagaattctctttggtcttttcaagaaaaagccgagacaaaacttgaatttttgctgctcccattccttttatgtaaccttctcccgactcccccgatgttgatgaggaaaatcgcacaaccaggtagctgggtaccaaggcgaatccaggttttcaacttcagctgctccatcaacccttgcagctgccgttaactcctcccatcttcaccatagatctctctctccatcgctactctcctcaagtccttccttctcttctatttcccagagaaatcagacgcaatcaagaggggaattcttaaatttctacctacaaacatgtctgaatccattcttatcaggagcagtgaaagaggcacccctgttcttgtccaaggcacgattcccttcttgatttcaactcttgttttgtttttgtttttgttttttgtttttttgagacggagtgtcgtcgctcttgttgccaaggctggagtgcaatggcgcgatctcagctcactgcaacctccaggttcaagcaattctgcctcagcctcccaagtagctgggattacaggcgtgcgccaccacgccaggccgattttttttttatagagtcttgctctgttgtccaggctggagtgcaatggcataatctcggctcactgcaacctcctcctcccgggttcaagtgattcttgtgcctcagcctcccccgagtagctgggattacaggagcccaccaccacgcctggctaatttttgaatttttagtagagacagggtttcaccgtgttggtcaggctggtcttgaactcctgacctcaggtgatccaccagcctcagacccccaaagtgctgggattacaggtgtgagccactgcacccggccccagctaattttttgtatttagtagagatggggtttcaccatgttatatttccttagggccctcattccatcacttcattttacagatggatattggacatgccagtcactcttctagaaactggggatatagcagggaacaaaacaggcacaatccctgccctcagggagcttacattctagtagaagcaggactaaataagtagaatatgtaatatgttagatgatgctaagagctatggggcacatcaagcaaggaggaggtgcgttcggagaaggtaacattcaagtgacctgagggaggctaggcgtgaactacacataaatgtggggaaagaatgttctaggcagagagaagagtaaaagtaaaggtcctgaggtgggagcgacctgccactttcgaggaagaacaaagtcaatgtggctggagtgaagagagagaaagatagggaaagagtgggagacgcgatcagagaggtcagagaaggacccagcctgtaggtccccaaggccattctgaggactttggcttttatgaagctactggaaggttttgaaacagggttgtccaatcttttggcttccctgggttatggtagaagaagaattattgttttgggccacacataaaatacactaacactaaagatagctgatgagctttaaaaaaaactcataatgttttaagaaagtttac

SEQ ID NO: 915773 - DNA, 4001 bp, Homo sapiens
cactcagtgctaatgggggtagggaaatgggaaaacggagtcatctgtctacagaagcactcctgtggtgttttaagatgttgacacttaattctgacccagcagtgaggggcaagaaggacacttcgtcacccacgattactattcttgaggatctaacccctctattggcctggggggtggggagatgggagaagctcctttaaggcatccttaggacccttggttgttatgttttagggtgggggttgatgcctttgtctaaaatttcctcagctcaaaaccacatgccagtttctaggtgctctgtgtagaaggcgggtggataacaggagtgggggcgacagaggagggggagcagggctgctccatgcccagccagatattcttctgccaagaataggaaatcaggagctccagggaaagtcagcacttttcattacagaggggaacaaaatgtccccagagtgacctttcttacaggacaaacaatcctacctcagggtcgacagggagaaaggggccagaactgcagaaggtgggagaccctgcacagccaacctctttcggtgaaagccagagaaggaaatgaccccaagtgttatgctgggacacatgtgcaaagagttgagaaagtttggacccagtcttccttccattcagccatcagcaaacctagttttgactcagtatcaagcactgttgcagggagcagatggcaccttcaccatcagcaaatagacagctttcaccttctagaggagaggagcgggggctcaggagagccctgcctgggttaatgcagaggtagcatctgggcacccttcggtaggagaggccgaggtttgtgtcttcacacttgagaccccaatcaagggctttcccgcctacctcacctgtgtggtgagggtcgccccaagtcctggctgcagctaggaagcctggtgtggccctggcacggggcagggcacgcactgccagcacgggagctggtgcctgttacataagacctgtcaaagctcgggccccttctcccttccccaggcgggcagcgcccagcctcggccccggcattcccctgggggctgcttccgcggagggacccgctgcccgctgcataaatggagaggacggaaagaaggggaagttgccctctgtcacctgtctgcacctcgtctgcccttcacagggtcaaaggacccccgtcaccaacccttgggaaagagcccttggtggacagtgaaggggaggcggcccctttctgcccagccttcctcgccggggtttggcctcggaggagtaccccggcacggtccagcgtgctgccctcgcacaccgatcgagacccagtcaaggttatgctttcctgcacctgtcctgataggtgccaggaattgagaggccaagagccaccacctggtgccggggccaccgagagggagggggcaagggggacttcctcggacctccacccggggaggggaccacgagtaagcgtgcgatcacctgaggagggggcattccttgccaggagaccctgggaaaggaggggtgggggctgggaagaatccgtcccctcacctaggggcgcgtggcgggcagaggccagggagaaggcgggaccccaggccctcggcgcgggggtcccggaaaagggcccgcgtaccttggctttgttgagcaggagccccacgaaggtggagagcagcagggacggggagagaggggagcgcggccgcagctccttggcgagggcgggaaagggggcggcgggggggtcctcgggcagggtcacggtgtacgaggtgcgcatgctggggggcgggcggcgggctttggccctcgcttaacgttggcagcgggggcgcggggggagtccccgcgcggtgccacagtccggacgccgaggccggcgagaccgctacaggacagcgtccgcggcgcccgaacgcgcgctcctccgcctcaacctccccggcgtgcgccgccaacagcccgggtcccggctctcgcgctccggccgactggcggccccgccggcgcctcgggccccgcgacgtcagcgctggggcggggccaggccctaagccccgccccacctcgcctctaccccgcccccggcgccggcacgcggacccgaacgaggcgacaaggtcggtcctcccccgccgggccttccccgcgctccccggcgcccccagcccgctgacccccggccaggcaggcccgcgggggaggcaggaccggagccctgaggccctggccggcctcggggttgaggctcagctcgggataagtgatctttggggcccgcagaggacgtctccccaagacccagtggcaaccgggtgagcttcccccaaggcaccattacacttcctaactcttgagggggctgcaaaccattttgagaacgtgatgaaagctcttctctcttcagggcgaaatacgtatatgcacaaacttttgtctagagttccgggggtactcaggccttcgtgaagacccaaactcatgcagtctgtggaggtcaatgtgcccaggttaagaagatggaccttcacggcctaggggctgagctgccctcctcaaaacagtcctgtttggcttctttcaagagaggcagtgctcatgttttataaggtccaataggtcaccttctcatttggctcctgaaaagaaccttttctggtctcttctaaccaattacccagctccggctctcccattctcaaatttgacttgttttggggagctggggagaaagcaatacaatagtggggaaataggcgctcagctggcatggggcgagtgttctactctggcgtcaagcacagccatgctggaagatcaggggtctttagatttcgtttctgatgccccacccctccacctaacagggaagctcacgaatctgcctagagaaagtatcttgtttggagcttgctggctatttttagccagtatttttagcatttaaaaatactccaagaggcagcagtgtatgctgttactcatctgtgggctccttctgttccttctggtgtgctcatccccacatgtacacgcacacatgaccacagctacatggggactgtgtccaggacacacgtatggcagtaccccaggccaccgacaaagcagcaatttcatgctaatgagagagggatggggacagttgccccctcccctgtgtgccagcagtgtggtgggaggagggggcaggggacaggaaccacaggcagtctgcttgtgatcagtgagagtgggcatgtgaggagtggtgatctctacagtcactgtcctcacccagactctgactgaatctggaccccggacaaactgcagcagcctttctccaagcctcctttccagccaaacgctttcaagccagccctacaccatctgaagcaatgtttgcatctgatctcatcactcttctgtcctgaaacaactagagcacctgcccttgcatccagccccgaagcctcaggtagcctttctctaaggctgtttgtccacaggcccaccaccctcagtctttgaccactgctgtcaaccagcctgtgcttatcctctgctgaaaaaccaaaactgccactcattaagtacttattagatcccaggcactgggttaagggttttatatatattatcccagttaatttctataacatcatgctgtagtaactattacctctattttatttgttttgttttttttttttttgagacggaggcttgctctgtcgcccaggctggagtgcagtggcacgatctcggctcactgcaacctctgcctcccgggttcaaacaattctcctgcctcagcttcctgagtagctgggattacaggtgcgcaccaccacgcctggctaatttttgtatttttagtagagacggggtttcaccatgttggccgagctggtcatgaactcctgacctcaagtgatccgcccacctcagcctcccaaagtgctgggattacaggcgtgagccac

SEQ ID NO: 915774 - DNA, 4001 bp, Homo sapiens
aatgactgagccacgacaaatttaaatatgacttctctctcccttaaaatagtctcttctctaaatcaatatgatagtctccaaactaaaattttcccatgtttttaaatcactgtgctaaaaacaaatagaactgacctctgaagccagagaaaaatcttgacacatttcaataggcacttgtgaacatctaacaatatttccattagaagtcagtgcatgatactttcgtttcggagcccaggacctggaagtatctttttctacatgagttttaaaaagcgcatccaggctgggcgccctggttcacgcctgtaatcccagcactttgggaggccgaggcgggcggatcatgaggtcaagagaccgagaccatcctggccaacacagtgaaatcccatctctactaaaaatacaaaaattagctgggcgtggtggcacgcgcctgtagtcccagctactcgggaggctgaggcaggagaatcgcttgaacccgggagacggaagttgcagtgagccgagatcgcgccactgcaccccagcctgggcgacaaagtgagactccgtctggaaaaaaaaaaaaaaaaaaagtgcgtccagactgggcgcggtggctcacgcctgtaatcccagcactctggaaggccgaggcgggcgaatcaccttaagtcgggagtttgagaccagcctgaccaatatggtgaaaccccgactctactaaaaatacaaaaattagccgggccggtggcaagcacctgtaataccagctactcaggagggtgaggcggaggatgcagtgagccgacatcgcgccacagcactccagcctaggcaacagagggagactctgtcgaaaaaaaaaaaaaaaaaaaaaaaaaagtgtctccatgctaaatactactggccttccagacaaaagagtaaaaaggtataaaaggattctcacctgagggtatctgtctgccagctttgtacgacaaatatagtttctcatctccaaactcgtatttgaacaactggcacagatttcccgttttctcttgaaaaagtgcagtacttgaggggtgaggaggtggtgttaagttataacattccgaagtaacactagaagacatgctcaaattgccctcttcccaagtttcttcatacagacattagcttttctctcaaaccagggttctttcactctcaccagattcttagatcagaagtccttatattgatttcaatcttcttagacattgggaacaggagatcatcatcagtagactttctattcatcacgcagctcctccccctccttaaaaatctagagcgatgaaggcaataattggggaggctgcgctgttttgtttttaaagccgggttgggagggagggaagtggtggtaactgggacccctggtcttatagaagacggtgattaattccggactttaagtgagataacttcggtctgctttaaccttttaaaaacgccgccataaaactgatttaaaagtcaaagcaaaacaaaaccaaccaacgctgccgctttcggaagtttctcaccccggacggggcccaggagggctcaccttactgatccctgcggcggagaaccccacgtccagccctttatatttggttttccaaaatctggaaatccccctacaacttcagctcgcccacggacgcgaagatgcagtcctcaatctccgcggcccgagccccgcagagcccttggccttctcacccacgctggcgggcgcaccccctgtcccgcccggccggggcgccctccgcagcccgcaacccgcagccctgcaggccccgcacgctcccctcagggcctggagcccgcccccagctcccgctcgccgccgcggagcccaccgagccgtggccgtctgccgcgccggccgcgtcgtcctgctgcagctccgcagtcatggccgaggcgcccagccgcgggtcaccggtctcccgccgcagccgccgccggcccagcctctcaggactaggccccgcccccgccctccaccccgctccgtcccgcccccgcccgcagcgcgcgccggaggcttggcccacatgccccgcccccggcatgcgcgcgcacgcaaggcgcgcggcccggggccgaacagttctgcgtgctcccgcgcacgcccggctgaccagacgtcggtcacgtgatcccggccccgcctgtcgctgttggtcagcttcacagccggtggaggctgcgggccgcgctgccagtgtccgggaactgggtttgcgaatcctgggagccgcgttcctgagtcttctccgctctctgccctcaaaacctcatttgtaggactgacctccggctccaccctccccacgggcgagttaaaactgttcccccgccgtgggaaactgccgaatgaccgtggaataaaggatttcccatcaggctttgtagccatttccaactccaatgacatgaagaagtgttcaccatctttaaggagagaaggaggatgaatgcagtcgcttgtctaaagctaaccaaacggaccaaagcctccgttcatgggtgtcccgcttggtgcccttaaccctgatgctcttaacctgggcatgataaggaaaattgcagtttttccattttcgattttcagaagttcaaactaaaattttgtgttactttgttacgtttgagccagatatttacgatttcatgttaaaagaccaggtgctcctattgaattgttttttgtttggttggtttcggtttgtttttttttttttctttttttttgagacggagtctcactctgtcccctcaagctggagtgcagccgcacggtctcggctcactgcaacttccgcctcctgggttcaagcgattctcctgagtagctgggattacaggcacgctgtaccacacccagggtttcaccatgttgcccaggctggcctcgaattcctgacctcaggtgatccgcccgtctcggccttccataatgctgggattataggcgtgagccaccgcgccaggcctgaattgtattttcaacaactgtgtgggaattgtgattactgaaccatgtttcacatttaagatacaaatgtgttatgatggcaaacccacttgacaggctgctgggtgtcccaaatctgcgtagaggctgagtgtggaagcgcgtcttttaagagtagcacctacacccttgccctggtctggtctgactctcaagctacacttttaagtgtgaatttaacatggacggtggcctttcctatactcctggcattgttgtcgctgggattgttatgtttcacctgcaggcctccctagtctgcatgcgggcgcagtttttgacaaaaggaaacaggtacaggtcaggtgcagctcccaggagaggccagattactctctgaggcctgaactaggactcctgcaacttccaccacctggagatacagggatccgcttcccctggcagattaactggcagattggcatggctgcggtgatactaacttggaatcttccacattcaacaggctgactgtgtttgtgtctgcgagtagtaggacattttatgtatgtggctctgccatttttcctttcctcatgagtgactgtgtttatggcctcaacctgggtgtcactgtagaacaggttgatttcaggttgatgctggttttctttttttttttttttttttttgagacagggtctcactctgtcacccagactgaaatacagtagtgagatcatggctcactgcagccttgaattcctgggctcaagcagtccaactgcctcagcctctgaagcagcagggacttcatgcatgtgccatgcccaactaatttttgtgtcttttttatggagatgggatctcactgtgttgcccaggatggtctcaaacttctggtctcaagcaatcctcctgccttggcctcccaaaatttggggattacagacatgagtcaccacgcccagcccacattgatttctgagtctagcttatttacagc

SEQ ID NO: 915775 - DNA, 4001 bp, Homo sapiens
tgaaaaagggcttttccctcttctctcctggaaaattctgactcacccttcaatgcccagctcacatgccctctcctctgggaagcctttccttttccctccacaattcaagtgtctaaagttctggcctccaaggccctcttagctattctcatccctctgcagcataactggaatccatgtctctgtctcccaccaggctgggacctcccttggcagaggtccaatccccgtctctgagcccagtgcccagtacagaaccaaggactgaggtgtccgtgaaggtgcgtcaagcaactcatgagagacatgtgacagcaagatgagagaaaaccaaagatgtaaccacaaaagtaccttccagaaactggcctaacctttggtccagtcaccaccccctcctttgcccaggcctggtcttgcatatcaaaaaccctgaaaatcttaaacatcagtcaagaaagcccctacagaggtcactggactggactgaggctttagccattctagaaattgttcaaacaaccaaagcaaaagaaaaagcacaaaacaaaaacaaaacaaaacaaaacaaaaatctgttcctggttagccttcaggtcaaaagctcacagaatctcctaggacctgagaagaaggcttcatggtgttactcaacctctccctgctccaggtcagagcagcccctcccagcctctgctcagcacctaagagctgaggagcacatttcctcccctctctgaccctcgaagccagcctccctcctttgactcccctgggagccagagcttccttgggggtaccaggctgcccctcccgacaccaggtggtgccctccatctctggcccctcaggtgtctgaatggcagcatctctctaggtattttttaactgaacttctacccaaggcaaccctgggaagaagtgcttcaccctactccgggaggcccatgtctgggccaccaaactgtctcctggaaagaaaaagaaaaaagggtttcactggtaaaaagcagctgctcttcctcaaaggataaggaggagagagaagggaagaaagcaggagcagctattcctcctcaggaacccaccacacacacctatccctgcggggccacccctcacaaacctgtgagggccgcactccaccccaagctttctggaaggaagggcaccaagctgacacatcagggtctccggtttgcaagggccagggccgtaagagggggttggggagggtatcccagggcccagcacactgagaataggaaaagcccattccaagcaatggtggcctcgggccccccagtttgtgccacctccctccctccagtgcacccgcgcccagcccacgcttgagctggagggccccacgaaaagccagcaagcgaatgtactaggtactgggtgcgaatgccctcttacctgaaaggggagggagcaggatcacttcgacatacaattgatgaagggaggggattaatgcccagagaggaatagctactcgcccaaggtcacacagtgaggcccaggaggcccaggatgcacccagatctcccgactcccagccctgggctcgcaagtccagggttctcgaaaggccagggtgcagacaccgccccccaaagacagtcacacgcccccaacccccttacctcccggaccccggtgggccagagccggctgctgggcggggcgctcaggccgggcaggacgaggctgggcccggctaggtcagggctggtcctctgctccccccagggtggggacgccctcagccaggtcccagacggaagagatgctgcttccactgcaaaatccagtcttcccaccccgcctggcacaagcctctatgtatccaggaagcccgactctgcggcgcggccccggggctgcgggatgaagcatggggaggggcgaggtgcgtgaaatggggcggagccggagcgggggccaccccgcgagctgccactctgaccgcgtcccctttaaggccagccggccggacaccggcggggacgaggcggggcgcagagcaactcgctgcaatgcctcctgggagatggagttcgctctcgacgcgccgagctgcgaggagcccagagagaactaccagtcccggaaggcagcgcacagaccccggaccgccacgcccctgggctgggctcctaccctccgcccccctcgcaaagctgcgctggccgctcgcggagggagaggctgcagagcgagggcaggaggtgggtgcggcacggccggggtcgcggggctcggggactaccggcgagggtacgtgggcccactgagcacctgtcttaccatgagactaatctatcccagcctcgccattcccatctgtgaaatggggatggcatcgcctgtggtgcgggggagggggcgcgtttcggagcgaggtgagccgaagtgggcagagctcttagaggggcggggctgttgggagagcaagggcggatggtgatagtcggaaaagcccggataatgagggtcgggactgtgggaggagtccttggtgggtggggcaaggagaggcgggatctctaggtgggggtggggcacttgtcaggtcggagtgggggctgtagggctggggagtgggtgcggaacaagccgatgaggccagcctgggtgagattggggaaggaagggcggagacacagatgacagggaacttgccccgctctggagagccctgggccggccgcgctgtggcggcgtgggcaaaagcctgtgatgcatagaacacctccctttactgactggaaataaagagtccatccccgagttcagtgcggcacaccagtgatctcattgacctcccacgccctgaaaagtagaggcgtcactatagcggttgacaggtgaggaatgtgaggctcagaaaagcgaagggacttgcctaaaaccactcaggactccttacttcaaagaccttgcttttctccctgcactcggggaggcagaggtttagcttggcgtgggaggcaggaaagaaaagttttgatgccccgaccttcgcaaattgtctggcaggaccagtccccccaacccttccgaatgacagcctgtaaggcagccctcctatagtactgtgaggatgaaatgagatggatttgaaagcacggtgtttataaattactgtttggaggagacataggaagagagcggtttgaaatggggtgctggtgccggaggaaaagcacaaggtgaagcgtgagagtgagccgagaaggtgaaggaaagttctggaaggggctgggggatggtagtggttgttggaggtctacgccagatgaaagaataccttgccgtgccagattccgtggtctccttcttccagcccacctttctctcctcctgccttttgcgcagctcattctggggtccctgtgtctaggaagcaccttttctctcctccctatgggttgtgatggtaatagagcagccttcggatttcttagagatatggactgggcaagacagaattatagacgcagctctttgatgtggggtggtcaggaagaggaggtgaagaaagggtagtcgtcctaggggcttcaaggcaaagagtcctttctccggtggggtaaggtggggaagtctcccacttactggaaaacacagtactcactctgagcattgtcttttttgaaatttacccagccacgtgctgtccattcccttacgcagtggaaactctccttgcatttactcccaagtaatcacctcggccttgtcacatccctttagattccagattgaaaattgaacagagcatttcaaaattaaaaagttttgaaaatccaggtggggaaaatggatctgactaaacaggagagaaatttcttcctcttcccctattctacgtgcttctgtggatatagaaaggggcacccccagccccagcaagggagccaggcatccatctacttaagtaaagttggctgtggtaaggggttagactaaaattctccgcagatgca

SEQ ID NO: 915776 - DNA, 4001 bp, Homo sapiens
tctgctttgcacagagttggtgacgcttgatgaacaaatactgacacataactctctgccttttacaaaaatcgtccttgcaaaacaactatcactgcccttctgacaaagctgggaaaatacttgtatcatacaggtacataactccaataatatcacccttgcatactgtcagagcttgcttaagtaacaaagaattgctacaaaacaagtaaaacaggcacaaaaaaatttaagaatctgtaatgatcactcattaatttcaagatcgcacacagttaatttcaatccaacacttgtctctatttaaggtatatgagaaataaaaatccaaagcattagcctgatgatcagccagttaaaaatacacatttgaatacgccgaagatatttataaagccaacagagatactattaatacgttgaaattcgctggccagtgctggattctaccctaaatcttctactactattcaagagaagccaagtagtcaaggcttctcgtatcacttgcttttaagaatttaagaagtcactcaaattggcatacacaacccaacctcaaaaaaaaaaaaaaaaaaaaagagttcagctctccatgtggtaatgttctcctatctccttcctttacattaatgtcccatgtactacttttccacgatcttcggtaggccccatttaggcaggccaatagtactaccaagtaacaggagttgaaaaaagtcgtaacagttaagtctgccctcccacagatctcacttgggtgtagatttcacaagcgctgaaagctatacgctgccactgtcaaacccagaagcagcaccgtcaccctgccgtgcccataggcaactgttccagaatgttttctttgaaatgatctctcccggctccacacgttaaacaagaacttaaaaggccaccttctcccctagagcagaacctgattctttcccgtccgctcctttattcgtccagccccataaaacccgaggcgggaggtccgctccccggcccctagagccagcgggtctcccaactgctcgccgcacccaccgtccacccccgactgcctcacgcctcctcattcccccacagccgagcctgcaccccggccgggcccgcagccgaaccccggcccgggcctgtgttgcctcgagcggccgcaggcctaaggcctaacctcctctggggcccctcacctctttcgggaccagttggttctcctcgccgggcaccatcgctgactccggccgctcctctccgccctgccgggggagggtggagggtggcggcggctcgctagctcaagagagaatggcagcggcagtcatcctctccgccgcctgcgctccagcaatagcggaggcctcagcctgggcctcagacaccagcgcgcagacaccgacccagggctccgccgccgccgccgccgctaccacagccgccttcgtcgtcggcccctcccccagcccgctgcaatcaatggaaaaatggcggcggccgctctcgcgagaattcggcccgtcgggctccaagcccggcgcctggcgtcggaggtggccggcacttgtcgctagcttctagtcacctcggctcttcctcagccccgggaggtacagaattggcgagacagccatgcaaacgcttttcgttagaggagagctggacgttccatctcgggactccctctgccggccggggaaggaccaggcccactgtcctccctgccttctcgggctcttcggactctctgccctgcagggaaagactcgagccgaaagccccatctctgaccctagcaactcatacccttctggcttccctttagcaaagcgcctggacgtcatcccctcttcagataccccaggcctcgtcctggtagagacaccaccgcgggccacctcccggcccccgcccttagacacggctctggcccttccagtcagaatggacagcgttttatttgctcccgttcactctcctgacgttcttttcccctctccccaccctccctctcaagggcccccagctggagggacctcaggggccaccccctgcttggggaggcagccaccccttcccttatgaagcggtgtcctcaccgcccgccccccgcaactacattggagaggcgctcccctgccctcttccagggaacttccttctccatcagggccaagtctgagactgagctagccttccaagagtagagctgcagtatgcttcaacctgtgatctccgttaacaaggtttttagagaattttaatcttctctagtagtaagcatggtgctttgtgttatactaaacaaagtttgcagaagtcatttctccaaatcctgcttccattatggagactcggcggggctccttcatgaagacttttatggatacagtgatcttacagcatgctgagataatataatcttgtcatgttcctaacacccacagcattaactgcctgcacttgtgttctccaaacttttttttattgtaatcccgttaccaaaaaaaaatccatatacttatataagttttatacgtgtcctgctgtgtgcagaattataaaacatttgtaaaatgtaaaaaggctaagacaaagatgacataaacatttaaaataacttagttattttccatattaatggtataaaaatctttgttattctcactaaaaatatttaaggaaatcaatatgattgactaggtttcgttagttttaaaaatctttaatacttcgtgaaatagttattaaaatatctgattgaacgtcaggttatttttgtacttggttttaatggctgtcataagctgaaaaaaaggtaactcacaaagatgtagatcctaaaggaggaagtacatctttggccactcttcctaatgcatgtttagaacgatttaaaaaaaaaaactgatatgaaaaaagtttcatttttatccattccatccaacaaccatgcaaaggtttttattgaaattcagctagtagtgttccatctttcctgatgtcaaccagaagatgttgcatttttatatttttacaaatgggttcaaagctctttggaataaattgcttagaagatttttaagaagttgaaaatttctatcttcaagttttaagtattcatgtatgagttttgggagttatagatcttgtctttaaggttttgatattttgattatcatggattgattaagataaattttgactttttaaaatattgtattaagattagttgtcttgattattgaatttttggcaccccccccttaaattttgtgcccaaggtgaacggttttcaccttgaaaaccatttgcttcaccatagtcccagacttgggtggctcacatatatcatttttgcatcaaaatcacatgatggaaatatttccaaacttttattttcaaaatgtcatcccatgacttagtaaggtgtcttctgtagtgctggccagtgctgtagtgctcaccctagaagtaaaaatgtcatctctgtcatcttttttgcttatgcttgcaatattatttcaaactcatgttgtctttccagaaatcctttttagtcactttcattttagtaaaggttgatataatgaaataagaatgtaattgataaatctacttaacccagcccacataaactggaataagtgacaacatactaaaagaaaatgaaggaatctctgaattctctacattgcagaactcacacttctcactcaggagtagtgagatgctggtgtttatatattcaatataagtaagatttaattttgcgtttttagattaaaataaatataaaaagaaagtctaacattttcttcctacaatcccccttttctgattgcacactcttttctttataggccactggcttgactattgcaggagagcctgataagatggtaagtatacaatgaatatttgtggaataagtatgtggattcatgaattgattaatgaataaatggacaaatacaaatatatggctactcttccta

SEQ ID NO: 915777 - DNA, 4001 bp, Homo sapiens
tacctcccacacatacaaaaactcacattaatgctcactccagagacgtgtctccctccctagccagacttctaccctctccctgtatctcacaacacaatccaaacccccactaccctcaaactcccactattcagaaattccctgccaacagcatcacaaaaccagggcacatggtatcttttcaatcctcttcggtagtagtcacacaaaaagccgttgctactgtaagctcttctgcctgcctattcaaaggcaaccacagtggttattatctccaactcttctcttccctttagcccccgcctcctttactgcactcaaatccatttcacttttcaaccactctctcccctacaacctctcccttcctctttctgaatccttcctaagtcccactggtagctgatggaaagttggaggggtgtatgaaagaactcactctgtcctgtgtaaaggtggtggaggaaggctgcccaagtctcaagcacgtgcatggctgcagagtcagacactggattctgcaacccagccccaccacttactaactggaaggctctggacaagcctcagtttcctcaactgccaaatgggggtaataaaaacagctatctcacagagttgtgaaaattcagtgaactaatggccactgagccctttgcacaaatccaacacggtaagttctcagtaaatgacagtttctctagatcctcttcttggcaggaggaataaagggagagggtgaaaggtattctttaggtctctttaatgctaagattcctgcaaaatctccccttgggggacagaaggaaggcaaccgatataaggagggaagtactctacagatatgtgagtgaaacaaagagttttgtcacatctccaaagtcagtgtttcccccttcttatcttcctacaacgcagagccaagaagtcctcaaagcccttcctaaaggatggaggaacacatgaatatatacatcaaatcctccttccacagagactcactgaagggaatgaagaaggaaaaagtcctcctaattattaagatgcgttccttgggactcggagaattaggaaggaaacccccaagtcttgaatacatttctctaaagaggccgaatacttaataatcaggggagattaaagcaaatggtagacaccctaaagtctcctccagggctcttgcacgaagagtacaaactggtttctccgtaagcggggatggccaggtggggaaagaaaggaaaagtgctttcactatggcccgtgggacacagggggttccccgggtcccttcctgggcggaacgagggagagggtctgcgcggggcaatccccggctccctgcgttgggggaggcggcctcgggccggggccccagggacttgagctggctggctgcttgtcccttaacaagcccatctcctgtaacgggattctcctaggactccgggatctcccggaggttcggccatcactggacccctccccgcacaaacctcctgacagtcttcctcagtcccgcgagccctccgggtccctgctctgggtgtcccggctcgcggggtcagcccggagccagcaagctctccacgcgggcctgcccgggtccctcccgagtgctgcgagccgcgcgggcttacctgctgagacggcagctccacatgcagggcccgcgcggcagaaccgggaggcagagcagcggccgggcccgggggtggctgggggacggggcccccgaccgacgcggaggcgctcatctcgatccaggggccgccaagcggcggggcgggcactcttccggcatccgccgccgcccccttgccaccacctaccaagcccctgcagcctagaaacccgccacccgagaggcactactgctcagcccagacagtagccgccgccgctgccgccgctgccgccgttgccgccgctggctaaggaagagccatattaccgcagtgcaacccctccaccccgctgagacccggagcgctcattggcttagccctcaagggggcgggacccaacggcagaaaaggggcgtgctattgggtagaaggtctgtccatcgctggcattactggacttgggggcggagggactcaaggatggcctcaattgcgtctgtcaagccggggtgaaacctggggcgttgcttctttttttcccagtctaattggttcttttactaccaacgggcagagtctcctggtggaggcggaagggccattgcaagaggtcgctgtcaattgtcagtaaagggaaagaggggtggggtcttgattaggtagagcgcgcttctgggctccggtgtcacgtgcaggaggcgggagagtcacctgattagggagaaccggtcttctgagccacttccgccctcactggttgccgtggtaacaggcctccggtggagggcggggaccctcggaagccagctgggtggcgatcgcttgtctgccttggcaggccccttgtgcagtcttttcccggcgtgagcgtgcagggattgaaaaggaatgctttatggttcagcagagagccaccacgcaggatgcactgggacctgagaaccgtcgggcagtcccacgagctctttcatgaccagctccaaccgacaagtacacgccccttcgcactccactagctagtaagctgagctacaaggtgtgccaggcacccaggacgccgattcaccgcttcaggtgggctgtttgtgctgtgtccccagaaagcctttgctacttatccatcagtcttagctggggcaggagtcccttcttccaaaaggcttctctgagcctctctgggaccttgagttaggaattttgaccctaccgtgggtctggattattctattaattttttttaacagtgcctcattctttcgcccgggctggagtgcagtggcaaaatcacggctcattgcagcctcgacctcctgggctcaagtgatcctcccacctcaccctcctaagtagctgggaatacaggcacatgccaccaggcccagctaattttaaaatttttttgtaaagatggggttctggccatatttcccagactagtctcaaactcccaggctcaagcgatcctccagtctcgggctcccaaagtgttgggattacaggcatgagccaccaggcctggccacattgtcttttaacacatgtaagcagccaccctccttcccacacacacacaaaatactgtgaattcttcaagcaaaaggactttgtctgattcatctctggatccccagtgcctgacagagaatcaggaaattttttttttttttttttgcagtgaaggcccagctcaaatgccacctcttccatgaagacttccgtgatccacaatgatagcatctccagcaattgcttctataatgaatagcatgagtcattctgcaggatgttgatcttcctttttttactcctagactgaatttttccaccacctggatgaacatagcagaaagaacatagtgttttagagtcagacacaataggaatcaggcactttggaatcttggctctaccacctttgagctatgtatcccaaggcaagtcacttcccctctctcagctttaaaatagtaataggattgctgtagggattaaagtaaatcaacatatgtaaagtgcccacacaggacctggcatatagtagttgcattttaaattttttaaacaaaatgtaagcatactatctttccagggtgttcagaagcctgaaaaacaccttggatcttttctcagagctggatcacaaagatgtcacactgtctcctgttctgacacactgagtggttcctcatggctggagcctggggcgtgtggtcaggtgtttgttgagaaaggagtcgcttgatcaggtgtttgttgagaaaggagtcactgggaaatcccaaatattatctgattgaactcatgtggtgccaagatctgggggaatttcacagaaaacacatttctgtttctaagctgtattagttttct

SEQ ID NO: 915778 - DNA, 4001 bp, Homo sapiens
ccaccacgcccggctaattttttgtatttttttagtagagacaggtttttaccatgttagccaggatggtctcgatctcctgacctcatgatccgcccgcctcggcctcccaaagtgctgggattacaggcgtgagctaccacgcccggccccttggttctactcttaggaacctggtccccagttctgtggaccaccatacccagcaccccccaagcctggcctctgcgagctcagaagttgggcctggctggcacctgcattcacactggctgtgttcttccagggacatctcccccagctgactgctcgggtaccggatcatgaggatctgtgctcaggagaagaacaggggggacagtgagggagagagagaaaggggatgctctaagactgaagggagaaaagctcacccaacagccgggaggctggccaccagccctccccccaaccctgtctcctgtgcatcagtctccaggctgccccagccccagagccagccagcatccaccctgcccgctgccccacctgcccagtacctgcatcccctgcccgttgccccacctgcccagtacctgcatccggacttggtgctgcccagtgggcacacactccaggccatcgtcagggcagcagccaccacagcgctgcacagtcacgcagctgggcaccagctgtttggccacggtgcccatgagctccacagtcaagggcaccaccacctcccggggctggcaggtagcgcgagtatacacatctatccatgacaccactgggagcagaccggtaggggttaagtcctcactggttttcctgcagctgctcccagcatctgtcctccccagtccccaagtcacagccaccctccactagccctccccactctgccctcacaacctgtcttcccctgccctgtttatccagatcccagtaaccccactgcctcaatttcctcctctgtgaaatgggtagaataatagtttgaatcttctaggggagttacacaagatgatggacacctggaatcagggcccatgacaaaccctcttagtgctggctagtgccgagtttttgtaagtattacctttcctctggtggccaggggcatcaggctgggagacaggggcctgtgggagagaaaagacctgtacccaaggtacactttaggagggtgtggccctgtcaccgtccctggggctttgcccttgcatcagtaggcttcaccacctctctgacatctttccagattgctctgttcctgcggccactgctctagctttacctgtcctctcctggccacccgggacctgccctggcccaaaacgcaacaggtgctctggtggccgcgccaaatctccaggccgcggagccgagcatgtttgggggctgcatgcagatcaggagcgcgcacagtgcccaccgaagcaggtcctgcaggcaccgagggagccccgcccccggcggtgcccaggggacggggtggggcggaggagtggccccagactggggctggcgggccagcggggaggggcacctcccaggggatgcacgcgccgggcccccgagacgcccgcgtccaaggccggaccccgcagatcccctcggccgaggccgcgggtcgcctcctcacttccgccaaccttgagagagggcacggcgggcgggcgggcgcgctgtcgggccgcacgtacctgggcgggggccagctgcaggagtgcggcgagcagcaggcggcggagcagagggctcatggtgcccgccggggccgcccgccgggggcgcccgcatcgccctagcccggcggcgcggggggcggcgacagccagagccccatggcgcgggcccgggcgcggcgggcgggggccgggcgcggggggcgactcctccgcggccccctcccgagccctgggtgcaggcagcgcagcgcagcgcagcggaggcggccggaggagccgggcgggcgggcggccggtggcggcgggcagcggcggcggggacggcgggggcggcggggggctgggcccgggctggcgggcaggcggctcatgtgacccagacacgcgctccccaccggcccgtggggcgggggcggggcggcggggtgggggggcgaggccgtcggcggggcccgcctcctccacacaccccctcccgcctcccgccgcggcaggggaaaggggacgcaccgcccaggaggctgggctccccagtcgccgccgccactacccggagggcggggcgctgccccttggcgaggccggggccgggggcgtcgggccttaaggagggagccggacacgagctctgcgaatcactttattgcgcgcgtttcggggagcgggccgtccagggaaggaagcaaagcgggaacgcactgcaggccccatccaggtgagcccctcaggggccggcgccccggggcacgatctcggggccttgggttggctcggatggtggcggctgccgctgccctagccgttgtcgctcctgctgaaggatgcctctgttggccctggaggagagggcacctgggtggttgggatagggatcccgaagtgtggttcctggacagggagcagggagcagaatagagcagggacagacctggcccgtgcccgggcttcgttgtagaaggctgtgatgatccgatccttttcatccatgaagttaaggtgcatctgcttcaccttcctgcaatgggtcacaattaaccctgggaatccaattcctgctgtccctgaagtcctgcccccttccaccccactctaggggcctcacagctttttacccttacacagggttaggaacctcagtctaacccttcctgtgatagatagggagggctcagagtggccctggcttgtctagggtccaatggcatccgaagtccctggtcactttgaggtgtgacagcagctgtggacatgggggtgctcctcccagaagactagaaagggtatgcgtctaactccatcactgaactaggcaggctgctagcagtgggcactggcctttaggtatctgctatagaaaatcggctttgtggccaggcgcggtagctctcacctgtaatcccagtactttgggaggctgaggcgggtggatcacctgaggtcaggagtttgagaccagcctggccaatatggtgaaaccccatctctactaaaaatacaaaacaactagccgggtgtggtggtggacgcctgtagtcccagctactcgggaggctgagacagaagaattgcttgaacctgggaggcagaggtggggttgcagtgagccgagattgcgccactgcactgcagcctgggcaacagagtgagactccatctcaaagaaaaaaaaaagaaaaaaagagaataaagagaatcagctccgtggcacgcgtgagagtggcagggagatgcctactgccaaatgaatgagctgtgctgcatttgctgcttgtgcttgattttgtttggctcaatcccttcctggcagccagcatgaaagatttacattcgaaatatgaaaaactgtaaatgacaacgttagctcttggtgcagcgctgcctttaataagtaaggagaggctccagagaccaacttcaagcagctcttagcttgagagacacaagagtacgggccacgaggtgctgtggaggactggctgaccacactggaattcacccaccctcctgccctctgcccatcaccccggggagaacaggcatcacctgaaggcaatgtagtgcaggcccatgcccgccagcatgaggaggaggcagtaccccagcacttgtttgttttgtttgtgttgctgctgcctcaactggggcccctgtggcctcacgctgtgaaactgggaccagtactgtgcgttggggggtgtccaggagctgctgggaggcagaggaagggacattgtggaaatgagactacccaagagacctgggggtggggcaagctgagggcaggattactgtacctgtgtgtttggtgggcagacttgtcatgga

SEQ ID NO: 915779 - DNA, 4001 bp, Homo sapiens
tgctgggattacaggcatgagccaccgcgcctggcccccattccaaaatttaatatcgcaaaggcctcagttcagtacaaagtggtctcctgaaaacagtaaagatgagaggcagaagcaactctgaagaaaatctataacaaatctaggagggttagttttgccttctgtttaccaatggccataaagttgagattttcatggacagtcaaacaagatacaacagttggctctgttcctggaatagcagggaagattcgagtgcagagtggattgccaccatctctcttctccaggttccagatcttaacctgtggacagacctcagaagtgtaaatgctagtcatcctccaacaaaaaatcattcctaggcttctggatctttcccatttccctgctgggactcaccaaggggttgatgccctcttcatcttctccaacagatgccagaatattgtgctgcttcagttggtacaggtgtgtcacccgtagtttgtaggcttggaagcctgtaagctgtagggaacgtggcaagaaccagatctggccttccatatgtgcagggtagtcaaggagcctcctttccaaggagagatacttacattcagaccagaactcagataacaattacatgtatataactctaaaattttcaaggattttcccacatactccttatcttaaaaagagtgaggccaggcgcggtgactcacacctgtaatcccagcactttgggaggccgggggggggggggggtgcggatcacctgaggtcaggggttcgagaccagcctggccaacatggtgaaacctgtctctactaaaaatacaaaaattagccaggtataatggtgcgtgcctgtaatttcagctactcaggaggttgaggcaggagaattgcttgaacccgggaggcggaggttgcagtgtgcccagatcatgccattgcactccagcctgtgcaacaagagtgaaagtccgtctcaaaaaaaagaaaaaaatttagtgcgccgggcgcgatggctcactcctgtaatcccagcactttgggaggccgaggcgggtggatcacgaggtcaggagttcgagaccagcctggccaatatggtgaaaccccgtctctactgaaaatgtaaaaaattagccgggtgtggtggcaagcgcctgtagtcccagctactcgggaggctgtggcaggagaatcgcttgaactcaagagacggttacagtgagcccagatcccgccactgcactccagcctgggcaacagagtaagactccgtatcaaaaaaaaaaaaaaaaaaaaaaaggtaaaaaggccagaatttagtagcagcaacatgaagatgaaagcaacaaaccgctaggctcatttacctcctcgccaacgataatattagggcaggggaaatcatgtcactttacatattcatcttttaaagccaacttgcattctttttcttattgatctcaaattaacctcgtcaaattggcatgcacacatctcctacagataaggaaattaaaacccagagaggttaaatgacttgcccaggattgctcagttgataacaagttaggagatggacttccttctttcttcccgtagaccacagaacaactctggatgaccagctaaaccaaagaggcgcgcggcacggacccctccgacaaacagatttcatcctaactcgatctcttcgggatcccgggagggaaaagacagctccaaacgaaggatatctccaaagaccaggctccctcggcctgagtcgcagacagtgatgccaggagggaggcaaaggaacttggaagcagcggatccagaagcaggtgtggccccgggagcggccccatcattgctcagcggctccttcaccagctccttgtcgaagaaaacgaagcgccgccactgcaggtaggccgccattttggcccagggctcccacctccgggagctttgtcacgtgagctgagccagcgaatcacgtggtcggcagcttccgggagcccgcgggcccaggagctcctgagtcggggtgacagcgtcccgctgctgggaaagtgggcggggccgcgcggggtagtcctagatctgcagtgtgcgagtttgccggatgtgactgtaacttcgctagctaaaatgcttgagagcggacccttcatccctttgagcatgtttcttcctaaaatgcgcggataccgggagatcaagatgagggatgtcatgtgccttgtgaactgtcacccgccgtgcgtaagtgaatgacgttttgacctcacaggactgttttggggcataaatgaaacagtgtatgttaaaccaggttttcggctgtatgagaggagaaataaaattagaagtttgtgtctgccaccacgcagattgtgaaccatagtcaatgttttatattcgtttttgtttcccccgtcagagcgtatgacacctaacagacgctcaaaacgtttcttaaggaaacgggctgggcgcgatggctcatgcctgtctgtaatcccagcactttgggaggccgaggtgggggaatcacttgagcccaggtgttcgagaccagcctgggcaacatggtgaaaccccatctctacaaaaaatacaaaaatgagcctggcatggtggtggacacctgtggtcccagctacttgggaggctgaagtgggaggatcgattgagccccggagttggaagctgcagtgagctgtgatcgagccgctgcactccagcatgggcgacagagcaagaccttgtctcaaaaaaaaaaaaaggaaactgggaaatactggtggggcaggaattcccaaggccctgggctttctccccctttcatagtggcagggtaggggacatagaactgagcaaaaacctggaagtggcagctttgagagctgagtgttttaatgagaagtggcaggtgtccaagatattacatgatcattctccactcccaactctggctaaaccatctttgaatccaagcaagatctatcctcatggacaactactgcaggtttactgtttgtgtgccatgagaacctatagacagaagtgacatagcatcattttgagatggtagggacatatggaaaagtgaccctgtggtatttgtgaagtttattgtttgcactcccccaacttccttttttttcttttttctttttttttttttttttttttagacagagtctctctctatcccccaggctgaagcgcagtggcacaatctcagctgactgcaacctccgcctcccgagttcaagcgattcttatgcctcagcctcctgagtagctgggattacagctgcctgccaccacgcctggctaatttttgtatttttagtagagttggggttttgccattttggccaggctggtctcgaactcctgacctcgggtgatccacccgcctcggcctcccaagtactggaattacaggcgtgagccaccgcacccggccctcccccaacttatttcagaatatttgatgctgtatttccaccagccagagttccctgagagcgggggctacatcttgtaccgtaactgtgaacgaggcctagcagagcctggtagaagttccatgtttggttgaaggaatgaatgtggtgtggatgcctctcctcttatccactcctctcctcaatctggttgatgggcaggtggcgtccatttgtctgaagaggtaaatgataggaagaaactctagccaccaccatgcacacagatttcctgacttccaactcaagtttctttcctcttcatcacacaggatatctccaattcattgcaactgtttcaggataccaactgttgggcagaagcacaaatgggagcgggttgaacccactttcacctactgagcatattccatactggtcatcagaatgtttagatagtatgttaatatgtcagttgttaagcctatgaagaatatatgttaaaagaagcaatgtggccaggcaagctggctcatgcttgtaatcccagcg

SEQ ID NO: 915780 - DNA, 4001 bp, Homo sapiens
ttatgtatgcagtgtgtggtatcggtatggattctctaccagaggtgtgtagctcacagggtatttactgtgattctactcctaacctaacgacaaaaacaacttattttaaaagtacccaagcattttaataatacacaagagtctaaataaggcttagaattggagacgacccagtcttgactgggagctccccaaatcactttaccattactgccttttactgtctagttcttatttgtttatttgtttatttttttgagacagggtcttgctggttgtcacccaggctggagtgctgtggtgttatcacagctcactgctgcctggaactcctgggttcaaacaatcctcccatcttagccccccgaggagctaggactaccggcaagcaccaccacgaccagctaattacaaaaaaatttttgggggtagaggcaggtcttgctatattgcccaggctggtctccaactcctggcctcaagcaatcctcccacttcagcctctcaaagtgctgggattgtaggcatcagccactgtgcctggcgctgtctagttccaatgattaataatcatgtttaaagcattgagaaactctgatcacttaattgtggtttttagaaacaccatttctttgtctttaaacagaaaatgtggtaactgaaaacttgcattctaataaagaagtctaagaaacgcagcctaggtagtcagatttagactgaagattatgggtcttctttctggaaacatgtacaagcataggtagttcagggctgaggtgaggtaagagagaactggttagctctctcacaccacatctaaagagaaaaacgggttggtgcgggctctgggaagtggggctcggtggacgagcctcactttgcgtctggcagttgcagatggccgggcgatgggaaagccagtattggcagagcggtctccccctaacaaacccacctgcaggctatggccagagcacctcacccagaaatcctggggacaagaagcaaagccgagtgcatgccggagacaatggggagaacccataggcaaggtgcccatcccacgaggcacagcagggcgcttcctcccgccctcgccgtccccatctccctggcagcgcgctgtcacttttggcagggaggacagtaacgcagggggagtcgcccacgggcgggacttgtagctgaaccccaggcctcagactgcagttgacaagcgactgtgacaggcctcgccggaggagctgggccctgaatcaccctgctccccggccggctgtcggcgctgggggagggggtcccgggggtcgactcaccgatctgcccgatgaactcgatcttgatgccctggtgctccagccgcttgttggggttcttgagggcaaggctcaccttcccggagaccgtctccccgtcgtagaagaggaaatatttctccttcttcccgtcctccgtcttgtgctcggcccgcttcctactctctgcatcgttcagaaggatttccacctccacgctctgcccgaagccgaagaagctcatcgcaccgccgggccgggcgggtctcggtaaggaccgctccctcgcaccggggcgcgggctgccctaggtaaagaaggccagagggcccgatgcgcgagcgcgctcggccgccgcggggctgcctggctccgccgctgccgccgggcagtgggcgccgacggacagccggctccacgggggaggggcacggccgggggaggctggcggctgcgggctgcggcgcccgagcagcaatgcaccgaggagcagtgccctcggccgagccagtcccagccagtcccgcggccggtggcagtgggcgggcgagggtcggccgtgcaatgctgcggggggcagccgcacagagccgggtgtgggtggcctgcgcctgccgggtggggtccagcgccgagcagcgctgcgagctgcccagcctccggcggtgcaacgcaccgaggcgcttcggcggctccgggcgggggagggggcgggcgagctccagcccggatgcgctggagcagcggcgcgcaggcgcaccccctaacgctcctgggactcccggcagcccggaggagagctcgctgcgcatgcgcagggagagcgcggccggcgctccagcggtcggcatggcagctgctacctcgctgggacaggctctgggcccacgcgtgccgcgcagtccctacagaactgcagttgtcttgtcttctcggagtgctttcggctacttttcccttattactttagctcgatacacgttgggctgcctttcacattcggatattacgctgttcgagtgctgacgggaaaggcagccctttgacacgcacgcgaaatgtcgcctgacgagggcaaaggtgacagttactaccggaagtaccctatctcagataccctttagattttcccccattgaagaaaaacgaggcgggaaaaacgctgttagggtttaactcaggccctggctccttctcgaacgaattagcggaacacccgcaggagccttgtttggcttccacttttcggcccgcccagttctctgagcgtgcggcggacgacgccggtgattggttgagcgaatggaaacggctcggcgcggtggttggccagtgggaaattctgtacgttgtgattggtccacaggaacgactcggcgcgcgcgcgggagcgagctttgaaagttgagcacggcggcggcgagccggtgccctgggatcatggtggcgttgcggggccttggtagcggcctgcagccctggtgtccgctggatcttagactcggtgagcagatgcagccgggaggcccgggggccagggcgagggtcctatgcgtccccgacgatgcctaagcccgggccggggtgccggtgggggcggggtgggggcgcccggctgtcggcggtgcctggggtccccagggccgtgccacgccaggattgcggctagccaggtttcccgtgggggctcaagccggccaggccacccttagaataagcgaatgttggccagtctcttctagcgcctgtgcatctgttttctcggccttccccttcttcctgtgcgtgtcttcgtgcacctatctattcttacctattaagatggttttaaattgcaaatctctttcttccgccagacttatttcttgaacttcatgttcataggttccactggatgtctcacatgcagacatcatcaaacgtcacatgagtgaaaatgggattcccaaagcctgctaatggcaccatccaagccaccaacccaggagtcatggcatttctgcttcccctttcatgcccactaccactgtcctgcctctgaggtgtctcagggcagccccgctccattcctgatgctgctgccttcatcatagcctcgagcaattgcaggagtattttagctgctttctgatgttaactgtgccagcccatcccccacacttttgcagaacgacttttgaaaacacagctttgaatgtgtcaagcctgtacacctttaatgtttcccctttgtttcctaaataaatgaccacatccttggcatgctttataagagctgccattctctccagtttgattttccaagagcataacctttggagtcggacacacttggattgttcccttggctctaccccatagcatccatgtattaccgtgcaggttgtttatccttgctaaacccctgttttctgatctgtcaaatggggagtacaatatctacctcacaggggtttttgtaaagataaatttgtacttgccacataataactgctgaacagatactaatacccacaagcaaacactgtaacaattttgttcatttagaaacactttaatttctttccctttgtgtgctttgttacactgtgcttgctgggaggcacttttctgcatttatttgcctggcaaaactcttacattcaggtccaattgaagaatcatcttattcctctccctcctcccccagtactattccct

SEQ ID NO: 915781 - DNA, 4001 bp, Homo sapiens
ggcagtatcacagagttaaaagcacattaacttcgaaataagactgatgggttacaaatctcacttgtggccagacgcagtggctcacacctgtaatcctagcactttgggaggccaaagcgggtggatcacctgagctcaggagttcgagaccagcctggccaacatggtgaaaccccgtctctactaaaaaatacaaaaattgcttgcagtgagccgagatcccgccactgcactccagcctgggcgacagagcgagactccgtctcaaaaaaaaataaataaataaataaataaaaaatacaaaaattagccgggcgtggtggtgggcacctataatcccagctacttgggaggctgaggcaggagaatcgcttgaaccagggggcggaggttgcagtgagctgagatcacaccacttcactccagcctgggcgacagatcaagactccgtctcaaaaaaaaaaaaaaaaaaaaaaaaaaatccaaacttggccacttactggctgtgtgacactagccaggttatctaacatctccgcaactcacttcatctgtaaaacgggatcatcacctatttggacatgttcgcaaaattcggtatgttcagaaagccctagaacagtgcccagcatatgaagccaagcaacaaatcacagctattgctacctgcaaaacagcggccagaaactgctcagaaagtctacaatgaaaatgttctacttaatggaaattacaaaggcacggaaccacatttccaagataatctaggtaaaaggcttttctgggcactatgaccgcaaagaacaaagactcagtttagcgtccagtattttcattgcaacagtccccgatcccacccggaactacagagttcaggtgtctgcagggttgcagctttggacaacaaagtaagagtctttctttccccagttcctcggtcaccaccacctccagctctaaggccaaaagtcacagaactgagagtctggtggcagcatcttggtgcattagtaggaaatgggactcctggagccaataaagagggtggaaaaggccttaggcagcaagagaactgaggtaccgctggagcgaagggaaatgagtgggaagtttctggagctgaagactgacattcccagggtaagtgagcccagacaaggtgtagctgggaaagcactgcctcagctcagcgactaaaaccccaggttgtagagtccactctgccagtaactcacaaaacacctccagttaactccttctcccatccgtaaagtgggaaatcgcctcatcggctgaggaggaaatgaagaggaaccaggcatataatgggtatgtatacatcagtgccctttgcgcccagagggtcccggggtaagaaatgttcagtgatgctgggaggtccaagtctgagtcctgaacaaagccaaagctgaaactcccatctctcaatgccctggagaaagggcacaagccagtaagtcacagagcaaagtccctccaacctcccctctgccactcgtctcccgcgtgccctctggcaagtcggaccctactcttaggcctcagcttccccatctatacaatgggctaattggctctaatgtcatcagaattgtgaccgcaagatgctcacatatgggacgagggcctgcagagacgcagaaaggagggtggcggtgagtggtggggcggaactggaggtgcgacccgccggggagccggggcggcgcctcgcgctctccctccctccctcccaccgcgaggggcaggggcgccggcccccggcgagagtcacgcgcccctcgtgcccaatcaccggcctctgccaggatgaggcgggcaggcgggggcgctccgggagccacggccggcgccgcccccaccgtcgtcctctgccccgcccgcctgcggcagagccgggaccctccccagtctccgctcacctgccagggccgccgtcgccgccgccaccgcgggttaaaccgcagccgcgcccacacttccggggtccgccaggcccgccccctaccggatgtgacccccttgcaacgtccggcgccccagtggcgcgcgtgctcgccccgcgaccccgttggccgccccgcctcgcgcgcctctgagttaccacgacatcgtgccacacacacacgctcgcggccgcccgggccacaaccacgggagcgcccacgagacccctccagcgctcgccgcacgcctcggccccgcccccggtaagaggccccgcccactgggcggagaccaggccgctctgggctagtgcgccggcgcggacgtccgccgccttccgagtggccagcgaggactcgctctgtacacagctcgatcttgggaggcttctcagagggacccaaaaggagggggaagcagatggaagcccagaacctaggaggagccccagatgggctgagctcagactgaggagccccaaggccaccacacactcatttccatttactagttaatctctttcccccacccattcattctacagaattaccagtattccccatctcctcccttcccccctggaaacaggagagtccagcataataaggaagccccctctgctctaacccttaaaaaaaggaatctgaagtgacctgatgttaactaatcaggtgtttttttttttttttctattctgttccctttcccacctatgaaacccactgctctgctatttcccaggggaatttgagaccaaataagtctatttacaatggtaactgatgtcaatgtctaaagtttccaacctctcaaaatcaagaggttgaccaaaaggggagaagtgtccagtttagcctaaagttgtctcctggcgtatcttaagtttgtcctaaaggtttctccgtacatagtgaactggatcctactcataccaatcacagagtttcagccaatcacaggcagccacctgttcaaaccttgttccaataaggcaaatgtcaatctgtcattggtagggaaccaaactggatccctttgccctcagaaagccaaacaccgaagtatcaggtttttgtagagggaaagatttgttgcaagtcaactgggaaggagacatgctcaaatctgtctccccaagccaggggctgtgacaggtgttataggcagagggtaatgagcagtgatctgattgaatcttgcaataagcaatgatctgactggatcttgccatgggatgatgccatggctcaatctgattagatcatggcttataccatgtatctacttcttaattctgttccggttctttggtctgagcatttaggttgcgcctgtggttgcatgcttggttcttctgggcacgctcaggttacataacttgcaacctgggatcatggcaactgaaaaaacaactcaccactttattacacaaagttgaaccagatggggctggttctgcgcttacataactggtccaactgtttctgtacctcgcttctgttttctggacatctatttcctttttcttttcttatttttaaattttaatgattattttttaatagaaatggagattcgctatgttgcccaggctggtctggaactcctggactcaagcaatcctccagcctcggcttcccaaagtgttggaattacaggcatgagccaccacgcccaacctgctttccgttttctatccctaaatgttatccaaccacctggcagcctcagagtcactctgaacctattctggttctgggggctgactgattcacaaatcattatttgctcaattaaactctgtcaaactgaatttgtcaaaactccttcttataacagaaggggtccatgaagaaggtcagctgctgacccttctgagacactggtgactcctttgagcgggggcatgttggttttgcaaacatttcacttggtacagaatgtcagagtgactcccattgacagcacctgtttgaaagctaggttgaaattgtttctgagggttagggagggccagggcagatgacctt

SEQ ID NO: 915782 - DNA, 4001 bp, Homo sapiens
tccacctcccaggttcaagtgattctcccactcagcctcctgagtagctgggattacaggtgcctgccaccacacccagctaatttttttatttttagtagagatggggtttcaccatattggccaggctggtctcgaactcctgacctcaggtgatccacctgcctcggcctcccaaagtgctgggattacaggcatgagccactgtgcccagcctagtgtctgggatgcttcttcagatagatactttcttttttttgagacagggtcttgctctgttgcccaagttgaagtgaagtggtacaagcacagctcactgcagcctcgacctcccaggctcatgtgatcctccctcctcagtctcctgagtagctgggactacaggcatacgccatcttgtccagctaatttttattttttatttttttgtagagatggagtcccactatatttcccaggtcaatcttaaactcttaggctcaagtgatcctcccacttcagcctcccaaagtgctgggattacaggcatgagccaccatgcctggccttttaagtgcttcagataaatacatttcattttaaaatttcattttgggctgggccagggactcacacccgtaatcccagtgctttggtaggatccagaaggatcacatgagcctgggatgtcgaggctgcagtgagccatgatcatgctactgccctccagcctgggagacagaacaagacattgtctctaaaaaataaacaactaatctccttttgtcttttctctcctttggtacttaagacaaccctctgagagtagctattatctctatagtagtctgacaacgaaggctcaaaggaaaggaggtgagaatggaataatgtcaggacaagactggaatctgagtctcccccctctaaatcccttgctggttttcccaacacaggtgggagaatgggggctgtgagactttggagggtgtgtccccgtggggatcacctgtggctgagatgaacttgttgtagttctcatagaccagggtctgcatgtcgctgtctagagcccggatctgccgcaccatgtccgtctcactgtccatcaactgggccagagggcactctctacgcagctgaagaagttgggtggttagtgttcgggtcaggaggcattcatgtcccccagccttgcctgcagctgataggctttcagggcaagaaatctctgatccccacccaccccgcaaacccccgccggctgtcaggaatcccaggcagggggccctaagtggcctagctcaggggttactaggttcaaccgtgtttggtgtttgtcagcatttgaaatcctggggctcggcctaagcccagccccgcgcctgtcaacgcttgggccacgcccccaattccgggcctatcacatcagcccagaagacctcagatgccgcatcacctcaggccagtccagtcctactcacatcccctcagacgcctcagctgctcgtactccctggccgaggttcgtcctcttatgaacacctgctctcctgaacctcacaaaaagtcggaggcatgatctgggggagcaatatagcaggggcctggttcccttcccccctccccgcacccccccactccccgtgcgcacacaccttgtctaggtaaacttccgggtcgaagtgcgccccgttcagatcagtcgggtccagggggtcgggccccgcggggcgtcccgccgcctccccttccgagaggccgtagtaaagcttcagcatcccgtgcgccttccgccgacgctccggagcctccccctcgggcccttctggggagtccccaggtccagaccccgggctaggcccggcggcagctgccgccgccatcgttccaactgcagcccacgggcgtgaggctggaaaggaaggggacggggaggaggcacttccgggagccataaagttgttgttgaaacgaggcagtccttcaggtgaaacgtccccctgcagccctaggtccttcgagactagagttcccccgcacctgtcttccccgggtgcaaaggttccgggagagccctgaattcccccagtttcctgggtggaagcattttgtggaactgcctggggttgctgctgtcccagaagggggacgggtagtggctccccaacctgcactctcgcaggcaaggggcccacggaatatgtgcccagatgcaatggacggatgcgggacgtgaggccagagtagagtgttcctgggatcctgccactggcagtggctcagtttatcccattcctaaaattggggtacatacttcacaggggggctacgaggattaaatgcatgtacactattctgtaccacgcctctagcgcagttcttcttagggcctggtcctctgacgtgcatcagaattgccttcaggactatctgtggcgcattgtaagtctctgcgctgagctgcgccgggcactcccgtaatcccagcactggggaggtcgaggcgggtggatcgcttgagcccaggagttcgagaccagcctgggcaaaatggcgaaactccgtctctataaaaaaaaaatacaggccaggcgcggtggcacacgcctgtaatcccagcacttagggaggccgggggggtgggggcgcggatcacaaggtcaggagttggagaccagcctggccaatatggtgaaacacccgtctctactaaaaatacaaaaattagccgggtgtggtagcgcgcgcctgtagtcccagctactcggagactgaggcagaagaatcgcttgaacccggtaggcagaggttgcagtgagcctagatctcgccactgcactccagcctggatgacagagcgagactctgtctcaaaaaaaacaaaacaaaaattagccaggatgatggcgcacgcctgtggtcccagctactcgggaggctgaggtgggggaactgcttgagctgcgatggtgccactgcactccagcctgggcaacaaagcaagaaaaaaaaaaaaagactctgggattctctcagatctagcttctttttagaaagttcccaagtagttctgatacacactcacatttaagaacccctaaggccgggcacagtggctcacgcctgtaatcccagcactttggaaggcagaggtgggagaattgattgagcccaggaggtcaatactggcctggacaacgtagtgagacccgccccctattattgaaaaaaaaaggacagactcagcagagcttaagtgactgatggaatgtgctgagtgaagggttaggtggaaatgtggaggataactctcagggttctcttttcctttttttttgagactgggttttgctcttcatccaggctggagtgcagtggtgctatctttggctcactccaaccttgacctcccctcccacctcagcctcctgagctgctctcccagggttctgacttggacaaaagtgcagctgtgcacaaaggtgaagagctcatgaagacagggaacgatctggagttcagattaggacacagagttggaatggaggaaaaagagaaaaagactttcttcatcaaagtggcccttgaaacattacttatgaagggctgttggaggaaggttggaatggaaaaactcactggtttacttgttctttgccagggatcctgcaggccaaacacagctcaccacctgttttcatatggtctgtgagctagaatggttttctcatttgtaaatggttgggaaaaaaataacatttcatgacacctgaaaatcatatgcaattcatatcccattttccgtaactcttattggaacacagtcacgcccattttttaacatatgatctatggctgcttagttgaggctaggcacggtggctcatgcctgtaatcccagcactttgggaggccaaagcaggcagattacccgaggtcaggagttcgagaccagcctggctaacatggtgaaaccccatctctactaaaaatacaaaaacttagccgggcctggtggc

SEQ ID NO: 915783 - DNA, 4001 bp, Homo sapiens
aggccttctcttttccatctaaacactgccagtctctgtgatagtttttctggttgctcatctctgaaaaggctctagtttggggtgagacagaagctctgagcacgaagttggtgctcagtaataggggcccttgttcctttggtggccactccccttctctgccattgaccttgggagggacagaatccaactaccgatgagagcctcccccatgatggagctgctgggagcaggctcagatccccatgtatgggaaggactttctctcacacactctgttattaggctctgatggaggagatgctctcggtggagggtggagttggagtatgaccatctgaattagaagacttggaaagggagtattttcacttggggcccccagtgcagttgtgtgcttgggctaaaagtcagaaaccagagatttagcaagaccagtgcaaacgccccaagtatgtgaaagagtatgtggctcgtggatccccagtctgccttacccagcacagtaaggttgattagccccaacccattggtgtagaaatctggtgggttgttgacttggcagaggtaggttccagtatctgaggggtggacgtcagtcagtttcagtgtggccacccccactgtgggggggttctgaagcaggctgacccgctttgacttagaaccagttggatacagatggccattggtgaagtacaggatctggggagaggcagaagacacacatatgtgcctgtttctgcctggcatcaactctacagtccttcctcatcaaagtgggtataagaggcctctgacttacatcagccagggaggctgatacccttaagctggaactccaaaggtctctctgtccccaaacaccaccccctttcaggtgctaaatgaacctgatccattggtctctctctctctctctcaaagagagaggcagaagaggcagcatattatcttggtatcagtcacaacaccttagtgtcaatggatacactaaggcaggggagttggaaataggagctatggaagaggaaaggaagatacacggtcaggcagactgcagctctgaaaagatctagggagagcccacttaccttttcatccaagcatactgatccccaaactccccctcccgaccccatgccctcatcctgggctcctgtccctccaggccaacccagcttcatgcagtcgctctcagctcactggatgggactcagagatgggtttcccaggctgcacaaagctccactccagggcgaagctgtctcccaccgacgtgctgtaggtgcaggtcagctcggctgtcttccccaggggcgtgctcagcggctctgtgggtaccttcacctccacggccagccctggggccggggaccagagggaggtgggaacccaaattccagtgatctggagggtcgggcccacccccgggcatctatattggaagctgggggctccctccccagagcacaaccctctcccctcaatccaacccctcccttcccaaaacctgaggtttccgggaggggccgggtctttgtgggtaaaagagccggaaccgggccaggtaagagggtgtgtgtgtttagcagagaaaggaaaacactagccctgcggtggggtggttcaggcctgtgccgcggagaggcccaactcgctcgccggcttgggggtctctctcctacgccctccgggccttggacaccccctctccggcctcacctcaggcgccttagggcccctggcgcccacggcagcctcatctggcctggcggggacagagtgggtccgaggagccggggaagccaggcctatgccccccagccctcgccgtggtcccgcccggcccctcctcaccactcaggcacaggaagcctagcagggccccgcagagaaagggccccgggagctcggccatggccgcgtccggccgtcctgtcctgctcctgccaggtgggcggtcaaggtcggtctgggtgtcgggcagggaagggagcacccaagggcagccgcccgggctgggcaggagcgagactggtatctcagagcaaacaggggagaggccggcgccgcaggttaaaaaaaaaaaaaagtgctcctccctcctctcctccagccccgattctgcaatccctctgtcccttcttcctccttccttcctcttctccccaaggtctgaagctgtccggccttgggaaaagcgctgggcttggggtgggccttctgcagagacggaaggaaagctgactttggaaggcgtcctgataccccagagctggcaaggggagtccccacctcggagcctcactgtgagtgtgagccccaggccgcagacccttcctgtccacagcgcttttcatttcaccacttactgaggtaggagtctctgtagaaatgagcatctctccatttccagagccactccattttaggggcagagaaactgagacctaaaggagacctcacccttggtaggaaagaacatggcagaacttggacacagacctgcacctcatactatgcccagctctccctcagtaacaacagagatctcttccagatgggcaaggagtgttttgttaaggattccgtggtgtgggagaggagcccacgtgagcttcctctcccctgtccctgaagaggaagcagatgaggtacacgtaccccctagccgggagcactcaagctccagcagaaagcgtatcaactccatccctctgctgttcagagtagcttagagtctcctccccttctccacgtgacaaacaaggacccttctaaacactagaagagctgctctaagcctgtggggggaagccctcctgggtacacagcttgggaaggggtccactttgcatcctcctgaagctcaatttcaagaattcttagtttgaaaaggcaacttgtttcttatctcatacaaacattatgtatctttatttaaatttgcaaatgaaaacaacacatatttcatgttagttttaataagagattccctatcctctgccccagtaaaacctaaccaagccagcctgacaggttatatcaatacagggagctggagtgggagccaagggtggtgttagataggggtggggtacagatcaagggggcctgggagactcagtgactggaagtctctgcccctcactcttggtgagtagctaatttcagcagctggcttcataaggaggagtcaggggtgggtggaggctcctcccaattccagatccacttcctcttctccttctgtctcctggacacttaggtcttactgagatggttttcccacagtaaagagaggtgggggcagagtactaagggtcaggagtgtgactctttcccatgactcaggcctctgtgctagaggtgacccttataggaaggagagaccccaaatcctttagccaatgagtggtggggtcatcataccagagagccagcttgactctgggcaggcaccatcacaggcacagcacccatgcggctcaagccagaggaagaaaccccaccagggatgggggatattggttgagggtgggccccatctgtcgtgggcagtcttggtgagggcagggcctggctggagagactgggcgtgggggtcaatgcaccaggcctgggagggccatggggtggccggagggctcgtgcggaggtgacagaggaaagggtcccattcttggagattgtgtctgagctcttgggccagggcagggtccggggagcaatggcatcctccctagtcatcaaagaaataacaagaggtcagaagtgggtgggggaaggaggagagagtttctacctgcttggtcttatataccacctctgcctgcacacttcagtactcctttccctctcccttaaaacctgcccataggaatgatgtttcagccactgaccccatcccaatagatgagagctgcctgaattcccagcctctgtgaggagagctgggagagcccccgctgcagcagacaccagggacacttact

SEQ ID NO: 915784 - DNA, 4001 bp, Homo sapiens
caccctgcattccctttgtcctgtcccccgagctgctcctacccatctggcaggtatgggcaggtggggctgttttggggaagtttcctcaagtctggattctgagacgctagggcttctagaacatggcacctcttgcctctcaaggcttgccattgcaaggctgcccctcttgtttgcatgtctgtcttctccatgacacctgagcttcctgagaacgaaacagtgaaccaccatatcctaggtacccactgtggcctgcttcctgcagggagagggtacagtcaatgagtgagtgaatgaatgaattatacgctattgcaaatggctggtccctgagcatgaggggtatctgaacagatgtgtaagtatggtgattagaaacaagtgataaaggtttgagaaataatataaaaagccactgcaatgacaaacacacccatccacctgctcgagactaacaaccaactgttttcttgatccatagctgccagaggaacatgcctctgtcttactgggtttctgagatttgcaacctctgcagctgggttctagccagagaggtgtaaaggtcaaaaatgttagatcgttcagtcaccttgtataagttaacataatattattttttctctctctctcttcttttctttttctttcgctttggagaaggtctcattctgttccccaggctagagtgcagtggcacaatcagggctcactgaagcctcaatctcctgggcttaagtgatcctttcacctcagctcccccgccgcccaccccagtagctgggcctacaggcacaggccaccacacccagctaattttttcatatttttactacagacagtttgccatgttgcccaggctggtcttgaactcctggactcaagggatccgctggcctcggcctcccaaaatgctgggaatacaggcatgagcccctgcgattggcttataacatttctgtgcctcagtttcctcacttgtgaaacaggaataagagtagtttattagggttgccctaaggactaaatgagagaggtcttgtaaagtctgagggatggtgaatgcataaatgcttaataagtgctggctcttactacaaggcctctcacctccagcggccctgctctgtcattctctaaacctcagttggcccatgtgtaagatgggagtgcgaatggtaatgattaaatgagaaagtaaaactgtgctaagatctgttgtttgtgtccaagagagcctctgggactacgcttcgcatccaggctcaccaggctggggattccgggtccggccatccaaagcaaatctactcagtgcgctggtcgcgaggaccacctccagcctggggacttcaggccacaacgcccaacccaaaccccagaaccgtttttctcacgggagcaggctgctgtgggttcgtctgactgataaggaggcctgattattctcctgggagatgaccaggaaggccatggaggggtccccacagtagggggcggcgcacggactgcaatctggttattccaggaaaaagaaataaaaaatgttgcagaggcggcggccacagggctgggagccggttatctctgggccaccttccagctctgataaccgtaggccgggctcgccgggtggggcgggcgccccgaagtgggccggggcgccgcggccggtagcctctgctttgcccagcccctcccgctacggtcggcgccgggtctccaggcctcgcccagccccacgaggaagcggcgcggtgcctgccagccgagctcaccgcgcgccctcagccggacaaggtgggcgagggccaggggggccgctgctagaccccggggccccgcccgtgcccccctacccattcccgctcccccagcacccggggcgtcccccggagcttactctgcagacagcgggctgcggccaggcagagggcgaagagtcctagggagatgcctcgggtcttcctcctcccgctgggcagaggcctcatgggcgagcccggggcctcgcgggccggggtgtgtgctggccgcaccgcgctgcagctcctatgcagccttctctcttcctccgcctctggctgccgcaggttctttagggccagatgcagatgagctggttgtactctggttgaaccagttcccaaggatgggggggcgggggggggggggtgttgcgcgggagagaattaatatgggaaggaatgggaatgcacagactcagaggtaaataatggcaaataatgagcagcctccttccgttcacacccattttactggtattgattcaaggttcggctggatgctaggtggcaggaaggagggaaagtactagctattgcttcaggacagagctagtcattggcatcatgggcaaagggaaggcttttaggaaagtgaaatgacagcctggagtgagagggatgaggggagggggtggggagactcaggctgccctgatgggaaccactgcacagtgatgatatccatccatctatccacccatcagtccatccatccatccctccatccatccaggaaatgttcaccaatcgcctgctttatttgcacagagcctcgcacatggcagtcactcaaataaaccggtggaatgaagctaggcactgtgttaagtgctggggatacaaggatgtgggcacctgtttagaaatcctagcaaggggtgggggctgcaaaaaatgagcaaccgctaggccgaggcgggcggatcacgagttcaggagatcgagaccatcttggctaacacagtgaaaccccgtctctactaaaaatacaaaaaaaaaaattagccgggcgtggtggtgggtgcgtgtagtcctagctgctcgggaggctgaggcaggagaatggcgtgaacccgggaggcagagcttgcagtgagccgagatagcgccactgcactgcagcctgggcgacagagggggactccgtctcaaaaaaaaaaaaaaaaaaaaaagcaaccgctgtacagtgcatatgtcgctaggatcagagaggcccagcatgctctgggggctcagagcaagtgtaattagtctccaggagaggtcgatggaggggtggggcaatcagttttggtccaaactagtcatgaaattatatttcactttgtcaaaactagaatttctagcctcacttgccacaaggggtagcagtgtgacccagtgctggccagtgatatttaaggggaagtctttttgaggtgtttctggaaaagtttttgctttcctcataaaaaggacagctaaggctgggacttcccctccccctttctttctgccttgaaaacatttattctgttcagatctgtggcatgtgtcttgcatccattaagttacataaatgaatgcaaaaaccatcatgctaagtaaggatggtggagcaggaagatagaaagacctagaagggccgggtgtgatggctcacacctgtgatcccagcactttgggaggccgaggcaggtggattgcatgagcccaggagtttgaggccagcctggacaacatactgagaccccatctctacaaaaaaaatataaaaattagcctgggcatggtggcccacgtctgtagtactagctacttgggaggctgaggcaggaagatcactagagcccaggaggcagaggttgtagtaagccatgaatgtaccactgcactccagcctgggtgacagaatgagaccctgtttaaaaaaaaagataggaaggaagacatagaagacatcgtaatccactgtactttcctatctccttctggtttctaaaggagatttcttgccaattccgatgtgttcctggtgaggccgacactagtgttaccctgctgactggcttggggtgggcttgtcaaccatgctgtccatttgaagtaccctctctgccaaccaaagtatttggttcaagaatgggcagacagggccatcagcgtcttccctggaaatgtgtggccactgctggcatactaaaaatg

SEQ ID NO: 915785 - DNA, 4001 bp, Homo sapiens
cattcaaagggttaatgttggagttaggaagttggaacctttaaaaaaaaggagacaaagatttcagtcataagggtccttttaaatggcagtcccaggtggggaaggtgtaagattcactggtatctactaaacaggaaatctctgaaacaccctgaggctggttcaaataccaattccactttctcaaaagtgtatttaattcaccactccttgggcatatggagtaggtgtcactaatccctctgagcctcagtattttctttccaaaatgagtagtataatatccacacatcgtatgtgaattaatacatgtgaagtccctacaatagcacatgggccataggaggcatttaatcaatgatgacagacatcactattgtccctattattgttgttactgttaatcaataaacctctgccaccattcactttggatcatggcattcagagacgcgctgcatgtgagaagctgtgtgattcaagatggactcctgccacaggccatttaccttgtggcttttcttttgggacccaaaattaaaagatacgagtatatttgtttgtatccatccaagatattctaatatatttaaatattatataggcacatagcctacatttgcacccccactaaacagcaccaataaatcaggcttttcattccatatctgtttttattttgagaaattggataaaaactgagtgtggcaaaatgactcacaattcgacagcaacgcagaggacagtggcaggtgtgaggagaggagaggatgctcagaaaagggcttctacgcagacctctgacctgggcaagttctctggtagaacaggctgggctgggggagggaagaatttctaataacacattaagcagagagcctaaagcaggagactcacacaggagtaaaacagctgaaagagaagctctcaggctgggcaatactcaccaaggtggctagagtaaaagagagagagacgcaaagggcacccctacaaggaaatagccttcgcttcctgattctaagctcagaacaaatcctccgttgaggaaaacttgctattctgcacccttgcccccactcttcccagtacaaacaaaattagtttgggtcagaattagttctgtctctcaggatggcacttcagaaaggcaacttgcaaggcttaggtagagactggccaccaagctgaaagccatgaatctgaggcagctgggagaatacaaggcttccggcctagccaggtagctgcttcaggaatgcagagtcccagcaccagccgctcagcagctaggagggtgggaggggagctgggtggcaccaccggccacacacacccctgcggcctgtggcaggggtgaagtggagaactcggaaccagacaaggaggagatttggggtaagaagtggggcttggataaaatcagagattgatttaacctttccattcagtcctagatttccaatgtccacgtatttacagaagagactgcgtcggtctcttacatttctatagagaagggcttaggggctgcaactgattggagtagatgaggcttacagcctcatttcctcagcttacactatcctgaaactgagaaaacatcaattgtctatatcaaagaaagaaagcgggaaaaaaagtaaagtaaaagagaaggaaagtaggaagaagggccttgagattaggagatggctaaatccctccttcaacctccaaaagattcccctaaactgccaaacttgcaggaaccttcctggggatcatacatcaggatgaaatcctccacccatggggcgtgcaattcaaggagcccctacaaatttggggactggggaaagggagctagaatgtggagctctcagtcttccagagcaggggttggatccaggccctgcaccggtagcttggtcccctaccttcctctcctgcagcccggagcgctctgagtcacagcggagtgaaaacagctgcagtcataatttccggaaagaaccgcccccttctagggaccggttataaagtagcgactacaagactaagggatcaacggaaaattattgaacaaataatcgaactttcgcttgtttgtatcaaaggaaaagtcttcgactttggaacgtttggtttttttctttgctctttgctaaggaacaatcagagaacaggcaaagagggcaagggaaaatgctgcaacaggaacaacaacaatgacattaaaaactgcatatttttgtaaaagcttaattgccaaaggcttactgtgtcctgggccctgttaatcaaagctttatggagattatatcattgacaccttatctctaatgtgagtcattttcccccaagttgcccctcccctacagcagggggaaagataaggagatagtgcaaggcacacacatctgctctaatgagagaagctctagccagggaagcccaagtcttcctgtcatgggtcgcttatgggatcctgaaaccaaatgtttgggttaacgatgtaagtaactgagaatgtctatgctcatttacctggctaaaggacattagaagcgatcaaggtccccatggcttctctatttcaaaacaacctattaaatctgagacttaaagtgtcatattgctgtcgagaatctataggataaagaatacatgatacatatggaaaacacagcttgattttggtctctgtgatgtattttttgtggatatacttgttatatactggttatatacttgtttttgtgagatatttgttatatacaaataactctccccaagttatttgttctctcatctgaaacggggataatgacaaacctccactgattgtttttgtgagatctaatgaatcttagtggctataaaagttttatatatatatatatatatatatatatacacacacacacacacacacacacacatttatatactttatatatatacacccacatacacatttatatacatggatgtgcatgcatagatgtatatatgtgtatatatgtacacccatgcatgtatatacagttacatgcatgtaatatatgcatatatagtaaagcataatataagcacaaattctattttatcagtactaggccctacaaccatgttttttacatgtactgaactaattatgagaggaaattatccttttctctggagagaaatcatgtctggtattgttccttgtgactgtgccttctttccattggccgaaacatctgagcaacaaaagggaggagctggaaacgtgggcagagttcatcatctgatcctgctgggcttagagcttagcactaaaagtctgccacagaccaggcatgcagcgtggttagagggcactgaatcaggaaacacacagaagttgctggttgttgaaaaaacaactatgtgaaaattcccataacctagcacaatatacacaattaaaccgatatagatgagatatcttcacttaaaagtctgtcttagtgttgccaggcattcctcaaggttgattctcaccttcttttttatactaacaggaaccccaagtttcacaatgtctatgaccattcagaataaaaacattgcctagcctcccttaaagctggtgtggccttgtaactaagctctggcccatagggtacaagaaataagtgcaacaccatgtcatgccctttcaaagaaaagaggatggcttcccattcactttaccctcttcctgctcattggtgtgaatgcaggtaactgaaccagcttgaaccataaagactagatcataaagcctggagcatttcccctaaaaatggagaagcaacaagacagaaagatcctgagcccctgagactctcatagagcaagccactgtatcatcacagaattttacaggataaagtaacaaatttctccatggtttataacagctctttgggtccttatcttaccctaatacatttgattatgattaattaaaaagtagacttttaaggaaactatcttcttcagaatat

SEQ ID NO: 915786 - DNA, 4001 bp, Homo sapiens
tgaggcatgagaatcgcttgaacccagaaggcagaggctgcagtgagccgagatcgcaccactgcactccagcctgggtgacagaataagattctgtctcaaaaaaaaaaaaaaaaaaagtagggcagccagcaaaagaagaggaagggagagggtgttctagcaggggaaacagcacaactgcaggcctggagggggacagagaggacaactgcaaccagctccagtcatggactggacagagggtgatgaaatccagcctggtttgagcttccaaccccaccgcaacagaaaagggacaagaaaccccttcccaatggtgttccaccaatgttcagagcggagggaagatgattctgcgaggcaggcactttgtaaagcacccactctgcgctgggcactggggacatgggacaaggcaaacttagcgtgttcttggggagaaaaatctgtgccaaaatgtgacaagtattccggaaagggaagctcagggtgcaatggcagcacacaaaagtctgaggaaagctgtccctggggcctttttccctctctgaggtcatcacagaagaaagggggggccctcctgctggcgggagctggcagtgaagtctcatccacccccttgctggagtgattatggcagcagcctgagaaggaggggaccgggcgaatgagcggagccttgggactctcagaaacggacaggcagtgccaccaaggcggcagataaaagggtgcccagggaggctgatggagtcgaactctcaggtgggcagggaccgagcacccgccagagcgccctaaggagcctcctagggctggtgacagagggacaggtggtgggagcctgtggaacgccggggagtcggggcaggttctgagcaggaactggcggtggctgtggaacacacgtgtgagctacaagcctggccgggccgcccccgctgcgcgccccccggaggacgtggccgcgggccaggccgcctgctgacacagtgttccctagctccgagcatcacgcacacacgcgcacggccccaccgcggcccgggggaaagcacgtgcggagggcggcatccatcgcgaaagacagcggaggggcatgcaccccacccccacgcgcgcacacgcacggacagaaaacgaaaagtgacccagagaccccggctgttccaaggtccatgaagttcgtagggccaagacccagggaaagccccgcgcggcaggggaggccaggcgctgcccgggcagagccacgggcacgctggggggtgagccagccagtccggagaccagatggcacgtcctgggctcccctctccagaggtccgcgctccagggcacattaggagtcacccaacgcctggacctccgatctcccaggtcccagtctggacagccccagccaggggggcacgatgagcacccgcctagaggcacaagttgctgactctttgtgccgtccccgagctgtgcccgcgctgatagcaccccagaggaagccccgacacgcggctgcctgcggctcctgagcgcccctccgcgcctctcgactgcacgccggtagcgctctcccgggcgggggagcggggaggagctccgggcgcttacctctcggccgcgaagtgcccgggcggcttcctcccggtgtagcctcgggctggtgcccccggcagcaggagcgcgacacaggcggcccgaaggagcagtccggcccacatgaccggcggcggcgggtcccccgggctgggctcggctcctgcgccgcgcgcgggagagggggctgccggccctcgcccctcctcctggcgccgtggggagcgaaccagcgatccccgaaatggcacgcagagctgagcaggggggcttgggacgccgagaggaggggccgagggccgcgaggggacgcggcggacgattgtggggagggtctctggcacctcgaagcgaaacacacaaaggcaacgccgcccgcctgctgatgcctctccgagaggcgcggagcccggggcgggggcaaagatcagggacccctgggggcggggtttcgccctcggcccacaccccctgccccggtttgggagtcggcttcctgcgaagcgctgactgaaggcgtcagaccgaggccccgggaggaaacagacttcgggaacaaggctagcaccagaggctgcgcgccccgggcatggcccctgtcggtgggacccgagacgccttgttgtgacgaggtgggaaccgtggaaattcgaacccacgacgccaggtcgctgtgccgctgagcagttctaggcctgcccccagcctgccagaaggtctgcaccctaacgccggagtgcgttgatctgtgggtccaaccgctccctggcctggggccctagccacttttgaagccccgggctcctctgggcacccagggggcagatggccggcctcccgactgctggtggcaagaccaggaagcagctggcgccgttggcagtggagaggcagcagcagatctggaaggctcctctttgccccttctgcagctgccccaggccgtggtcagagactggggggctgcctagggatttaggcaaagaaggggtgcggaaatcaaaatcatcccgctgggagaaagctgaaaggataactgattttaccttctgctccatgcagtaatctttcccttagccacccacaattagtcaagattttgcttaaatacttccaggggtaagaaactcactatctgttaagaagcggcccaatccagttttgaaccacatttgttttaaagtgtcttcacttcccagttgaacaatccctgttcctttggccttcctgctacctctgcctttactgaggtgcttaacattggtggccacaaatggacatggcgtaccagcggtggcctggactcgtgcctccttcctgcagacaccatacttttactaatgcaccctaatattacgtttttggcaaccccatgatgttaattatgacacattgagtttgcagtaaagaaaaaccacaggtggccgggcgcggtggctcacacctgtaatcccagcactttgggaggctgaggtgggcggatcacctgaggtcaggagttccagaaccagcctagccaatatggtgacgccccatctctactaaaaatacaaaaattagctgggcatggtggcgggcgcctgtattcccagctactcaggttgaggcaggagaatcacttgaacccaggaggcagaggttgcagtgagccaagattgcaccattgcactccagcctgggcgacagagcaaggctccatctcaaaaaaaaaaaagaacgaaaaaaagcaggcattttttgttgtgcttttatgttatttaaacacaagctgccaagtggtctccctacctgaagctgtgtggccccatttttttttttttttttttagatggagtctttctctgtcgcccaggctggaatgcagtggcacgatttcggctcactgcaacctccatctcccgggttcaagcaattccccttcctcagcctcccgagtagctgggactacaggcgcacatcaccatgcccaggtaatttttgtatttttagtagggacggggtttcaccatgttgaccaggctggtcttgaactcctgacctcaaatgatccacccacgtcagcctcccaaagtgctgggattacaggcgtgagccaccgcacccggcttgtggctacatttttgcagacattcaccttgaggccgtatctcaccttgtttgttttggcccattttcttgtcaacatattctcaacaagtaggagccaaaatattctgtaacataagatgaatgcaatttccgtcatatccattctgagtcccaaggaccctcggaatcctaaggcatctttctctcttgccccaaacatctgaaggttacactttccccctccactgcccctaaaccaccaatgtcaaataggtgctcttttttcctggccctaggggagctacccaaattttcaa

SEQ ID NO: 915787 - DNA, 4001 bp, Homo sapiens
ttgttgttttttttgagatggagtcttgctctgtttcacagactggagtgcactggtgcgatctctgctcactgcaacctctgcgggacggattcaagcgattctccagcctcggcctcccaagtagctgggattacaggcatgagccaccacacccggataatttttgtatttttttagtagagaaggggttttaccgtgctggccaggctggtcttgaactcctgacctcaagtgatccacctatctcggccttccaaagtgctgggatgacaggcatgagccaccacacccagccttgcttaaaactattaaatgacaagcaggcacagtggctcacgcctgtaatcccagcactttgggagtccgaggcaggtggatcacctgaggtcaggagttcgagaccagcctagccaatacggtgaaaccccgtctctactaaagatacaaaaatagccgcgcgtggtggcagacgcctgtaatcccaggtacttgggaggctgaggcaggagtatcgcttgaacccgggaggcggaggttgcagtgagccgagatcgcgccactgcactccagcctgggcaacaagagcgaaaactccgtctccaaaaaaaaaaaaaacaaaaaacaaacacacacacacacaaaactattaaatgacttgcccatggttacttagaggattataatggagtcaggtgaaaaaccttagaggatgagaactttttgaaggcagaaattttaccggcagcccctgtacttctcccagtgcctggaattcagtaggtgttcaataaatgtgtgttacaggtatgaactacataaggcagaaacccaggtccctgtcacccattcaaagccgtgtcactaagagtttgcctgtcgccatcattccagtatcctcagggagcatcaacgctctcccttcggccctgagtttagcgaggggattggtcttacccgtcggcctgggcgaggccacggaacatgccctccccgcccgggcagtgtctctgaccctggaatatgccatcctcggtgctgaagtgcttcaccgtcctgtccgcgcagcccaccagcatctgcggcaaagaagggcaagatggcgaggagagcgaggctgctgcgccccaggcccccagctccggcccgaccaggggccactcacctgggtctcgccgccggtgccccaacacagggcgctcactgcctcctcgcgccgcggctgtcctccggccgtgaagttcgccgcctgttttcgctgaagatttacccctgagagacgaaggcgtcagtcacgccaggggcgcgagtgcacccctgcacttcccgacgcccgagcctgccacccacctttcaagatcccagtctcggtgccgacccacacatggttccagcgtgcagcagcagccgccatgacaaagcctggaggcagacagttcacacttccggcgcagcgtgtgcgtcaccagcgggcgtcgagtccgatgcagcgcagtgtagttgctggaagtttgaagagccgaaacagtaaagcttccatgcttgttttgctttacgaaaatgaaaccaggaggtgcttgtttatgtagatcggaagaatacattgatcattttgcacttgggggtgaaaagcacctttcctggactgcgtggccggatcaagccagccctagtctgtctcccggctccattatgtaatatgtgttctggactgttagacaagaaacaacaaacgatttaagaaacgatttaagaaacactttagaaacgattcaaatcattaatgatgtgtggggcttcgttctggaatataagtcacgaaagaaagatgggaaaaggaaaccgacgattttttttttcttttgagagaacttcgcccttgttgcccaggctggagtgcaatggcgcgatctcctctcacctcaacctccgcctcccgggttcaagcgattcttctgcctcagcctcccaagtagctgggattacagctggtattactaaaccaccgcgcccggcctcgtttactcttcaagaggcggacagcgaggcgcggtggctcacgcctgtaatcccagcactttgggaggccgaggcgggcggatcatgaggtcaggagatcgagaccatcttggctaacacggtgaatccccgtctctactaaacatacaaaaacaaaactagccgggcgtggtggcgggcgcctgtagtcccagctactccggaggctgaggcaggagaatggcgtgaacccgggaggaggagcttgcagtgagccgagattgcgccactgcactccagcctgggcgtcagagactccgtctcaaaaaaaaaaaacaaaaacaactaaaagtactctgtgctatgctacatgagaaacgcagagaaagtcatcgctcagtagaaatacagtaatagcgcatgcgtaaataggagagggaagtcgctactttacctagagattaacacagaaaagcaacaaattaccagtttacaagtaaaccctttatctaacgcgaagatttatttattttttgagatggaatcttgctctgtctctcaggctagagcgcccgccaccaggcctgattcacttttcttttggttttttagtgaagacgggatttttcacaccatgttagtcaggctggaattacccaatccgcccgccccaacctcccgaagtgctaggatttcacgcttgaaaccccgagcgcgacctaggtttaacacatcaaacgcgaaaccaggccgggcgcggtggctcacgcctgtaatcccaccactttgggaggccgaggcgggcggatcacgagctcaggagatcgagaccatcctggttaacacgttgtgaaaccctgtctccactaaaaatacaaaacaggccgggcgcggtggctcacgcctgtattcccagcactttgggaggctgaagcgggcggatcacaaggtcaagagatggagaccaccctggccaacatggtgaaaccccgtctctattaaaagtataaaaattcgctgggcgtggtggcgggcgcctgtagtcccagccactcgggaggctgatgcaggagaatcgcatgaacccgggaggcggatgttgcagtgagctgagatcatgccattgcactctagcctgggcgacagagcaagacgacgtctcaaaaaaaataaataagaaataaaaatggaaaacattagccgggggtggtggcaagcgctcaatagttccaactaccccagaggctgaagtatgaagattgctgaagaccacatggagatactacgctccgtgctcagttataaaacaaaaccttctctcaacaagacactcaaacacgcgtcattcaacacactagcgataaaaacacctaatccaactcaaacaacaagaacataactatttagcttgtaccctaactgatcgaaatcttccattaaacaacggttgttctctccccgaagggagagtgcaccgttcctggaagtactgcaataccaggtcgatgcgtggagtggacggagcaagctcctattccatctcctatttccaaaaatccatttaatatattgtcctcggatagaggacgtatcagatattaaactgataagaacagatactacacttgatcttagccaaaaggccgagaagcgatacctttacttcggtcgcctcggcggccttatccttcccatcttccaaccagttatggtaactatccaggcactaaatgttaaattatctcccaatacattataattccgaaacacagttttcattattctttctttatagtagtggctatattttggaaacagccctatttaaacgtcctctacttcttccgccgcctgctccctgctcagtttgttttgcataaacccgcccctttcgcttttttaggatcctgggattggtccacacaccagtcgtgatttcaatgcccgcgtggcctccttttccccgattgtggcgttagtctcccatcctaggggtttttcgg

SEQ ID NO: 915788 - DNA, 4001 bp, Homo sapiens
agcaaaagacaaaatgtttaatacatactcatcaacagagcccgccaatggcttttttgatcgcttaatggcataaatgcatccatccagcctcttcacacacttaaatacagaaccaaattctccagagccgattttctctagctcatgaaattctgttgtataccgggacttcatattgctttcagtaattgtaattctctgtaataaaaagtgtttccatatatgtaatacaaatatacgaaaacagttatttcttgctatggtgatagggctatgtgtgaaatttaaaaaccattctaccttatgtgttaatgcttattaacatattcatagcatgctttaagtggcagaaaagtaaatttcaaaaaaataaaaataaaaagctatttaccttagcaggtcttgtttcatcttcaagctcataatcactggcttccatgtcttcaccacaggaactaaaaaaaatgttatttttctatcaatatatctgacagatacatccatgccattaaataggaactaaattttgataagtataccaaaccaatcttaggttatttggagaaccaaactgttaaataaacgacttactcattccaatacgttctctttctacgacgacactgtcctgaggaatgaagcaacaaagaatccggagtaaaaggattaatattcacttgaggagtctgtcgcacatcaaattccctttttcctgatttttctgtatccatgaagagagaactaccccggagtttaacagagctggaatcaattccccgagctttggagagcaaactctagggaaagaaaaatacaaatacaatttttaggatccaagtcctatagtcagccttctcaacctaaccttcaacgagcctttcatagggctgaatgcgtaggtgaaagcaacacacaagcctttgttagagttcaagcaaaataaattgtggctaatttaggaagactgaagctggatattaactatcttttcttgaaaaaaatagccaagtaaaatctgcctctaaccctaaaaagaatataaatgctgcctaaaactaagttcattctagtggctaaaagttaacaaattctttcaacccatccaaaaatagaaagcagtccgagagccccataaaatctcccctcccccatctagatagggcttccatagccacctccgctggactcctcccctcacttccagagggattttgccttgagcaagtcggccaataaacagtacagctcgaaagcacacagattgcctaggctgatgacaaacagtacattgaaaacaaaacaaactcactttaaaaggtgcatcttccctgttaaccttacaaatgcgaggcttgtcttaatctctggaagtatcagctttaaaatctgcagttttaaaagtggtcatctgcgcagtactcgaaggcctttcaaaacacaggtgctgaacacctccttctttaagataccttatctacggtaggatgttcctaatcacacggaggccggccaaactctgggcaccgcaaacccacgataaaaacaaatgctgggccaagaccttgtccagaaacaggcctcagtactgcctggacttaggatgagtctgtaggactgtaaatgcttggaaggccagcctttactcccaagtccaagcgtagtctccctgcatgccccagacctttcccccatccacgccacacgacacgacacgatcagggcgggacaattatttttctttaaactccttctgcccgcgccgcccaaattacaggcccgatcgccgcgtttaaaaggcatcctatggctcgggagtgtcaggtggccgggccggcaccctccagcatcctcgcgaaccgcgttatcggtgccgcactcggggctgacacgctcggggcggcccggactcaacgggcggcaaatccttggccacccggacgggccgatcggcccctttgtaagatgaagttccagacgaggcccattgttcagttacataatctcaacggacaacctcggggcagggccaaacacaagggctgccaactttggggggcggcgcaggaaagcgaggggggagcggccggccgcttctgtaaccgaacccaggcagcggcgctggcccctccggcgccgcggccccggccgccgggtgcccgcgcccgccgctctcaccttgggcgtgtgcggggtgtcgaagagtcgcagcttgcggaaggtcttgtgtggcggggtgcccgggtggtccggccgcggcgagcggcggccttcgcccgcccggcgcgccccgcaaccccgcggcgacgcatctcctgggccgccgcagcgcaccggcgagaaagagctacccaggaagtagggggccgccggcgacttgaccggcgacgaggagccgaagccctcctcctcccacgagtcgccctccgccccaccgcccgcctcgtccgcgcccgggcaggcgccgggcagcaacaggtcctcctccagctcgccggggctgccgggggccggcccgggcgagcggcggcgctcgggcccgggctccgtggggctccgcgcgggcggcagcggcgagtcgggctcttgaaaggccgagtcctccccggtgctgtggccgctgccctcctcctcctcctcttcttcctcctcctcacagtcgctgcagggcgagaagatcagcttctgccgcaaggtgcaggccgccccggcgcggcggggtggcggcggctgctgtcggctcaggaagctcatcgcggccctggggacggggccgaggacaggagagcggaggcctgcggggtccaggacactgcgggcctgggggcgggtccgccacgtgcggctgggcgcgcctagtcgcagccgcggcgtctctgcgcggcggcggcctgcggctccggggcgctcgggctgcggacggtggcggcagcggcggcgcggactttccggcagaggcggggcggcccgagcaccgaggctgaggtctcctcaggtccagtctcaggttcgggctccgcggcttcccgcgaccgttaaccacgtgagtgcccagtccaccaatcccagtgcagctccgggtttgaaaaaaaaaggagggcgcgacgtagcccgcgggggaaggaccagctacgcgattttggcgggaacccgctggctccacccccggctcggcgccagccaagtctgggcgggctgtggtgttccgggcctatgagcgagcctggggcggcggggggcccggcccggcgccgcccgaacaccgcccggacggggctgggccttctgggaggggcaaaagagagctggattcgcctaagccgacccgaaagccggcctggacgcacccccctcgctgctcctccggtgctgggggatctgaagaggggcaggcggccgggcagcgcctccgggtctctgcgagctgggaagagccagggaccgaatggccttcggccgctgccctcggaggccgcttcttgcccctcgtcccctggggcgagccactggggcgtagtgggcgtggcagtgggcagccacgttcagggtcgaggtctgagccggaaatggtgactcgggcctcgggacctttctgaactgcgggagccgatgtgcttaggctggacactggctgggaggaggcctccgagccccattatttccccggggtgggtgactgttaggggcgggtgtcagcacagcgagaagagctctcccaagcaggggtccacctctgccgaccttgtccgcggccaaaagaaacagcagcacagttgcccaccacgaaaccaagtgcccggcacacgatctccgtgtttacatttgttcgccagcacgtgggcatgcgttggcaaaaccgattggcccggctcgcggcaaactcaaacgcaattttaaaaaatttccctagtgcttcgttaaactgatttaatctgtcccttaatgcacttacacgtttcttccagttttcttttttctttctttgtttatttatttttttt

SEQ ID NO: 915789 - DNA, 4001 bp, Homo sapiens
gccaagtaaaatctgcctctaaccctaaaaagaatataaatgctgcctaaaactaagttcattctagtggctaaaagttaacaaattctttcaacccatccaaaaatagaaagcagtccgagagccccataaaatctcccctcccccatctagatagggcttccatagccacctccgctggactcctcccctcacttccagagggattttgccttgagcaagtcggccaataaacagtacagctcgaaagcacacagattgcctaggctgatgacaaacagtacattgaaaacaaaacaaactcactttaaaaggtgcatcttccctgttaaccttacaaatgcgaggcttgtcttaatctctggaagtatcagctttaaaatctgcagttttaaaagtggtcatctgcgcagtactcgaaggcctttcaaaacacaggtgctgaacacctccttctttaagataccttatctacggtaggatgttcctaatcacacggaggccggccaaactctgggcaccgcaaacccacgataaaaacaaatgctgggccaagaccttgtccagaaacaggcctcagtactgcctggacttaggatgagtctgtaggactgtaaatgcttggaaggccagcctttactcccaagtccaagcgtagtctccctgcatgccccagacctttcccccatccacgccacacgacacgacacgatcagggcgggacaattatttttctttaaactccttctgcccgcgccgcccaaattacaggcccgatcgccgcgtttaaaaggcatcctatggctcgggagtgtcaggtggccgggccggcaccctccagcatcctcgcgaaccgcgttatcggtgccgcactcggggctgacacgctcggggcggcccggactcaacgggcggcaaatccttggccacccggacgggccgatcggcccctttgtaagatgaagttccagacgaggcccattgttcagttacataatctcaacggacaacctcggggcagggccaaacacaagggctgccaactttggggggcggcgcaggaaagcgaggggggagcggccggccgcttctgtaaccgaacccaggcagcggcgctggcccctccggcgccgcggccccggccgccgggtgcccgcgcccgccgctctcaccttgggcgtgtgcggggtgtcgaagagtcgcagcttgcggaaggtcttgtgtggcggggtgcccgggtggtccggccgcggcgagcggcggccttcgcccgcccggcgcgccccgcaaccccgcggcgacgcatctcctgggccgccgcagcgcaccggcgagaaagagctacccaggaagtagggggccgccggcgacttgaccggcgacgaggagccgaagccctcctcctcccacgagtcgccctccgccccaccgcccgcctcgtccgcgcccgggcaggcgccgggcagcaacaggtcctcctccagctcgccggggctgccgggggccggcccgggcgagcggcggcgctcgggcccgggctccgtggggctccgcgcgggcggcagcggcgagtcgggctcttgaaaggccgagtcctccccggtgctgtggccgctgccctcctcctcctcctcttcttcctcctcctcacagtcgctgcagggcgagaagatcagcttctgccgcaaggtgcaggccgccccggcgcggcggggtggcggcggctgctgtcggctcaggaagctcatcgcggccctggggacggggccgaggacaggagagcggaggcctgcggggtccaggacactgcgggcctgggggcgggtccgccacgtgcggctgggcgcgcctagtcgcagccgcggcgtctctgcgcggcggcggcctgcggctccggggcgctcgggctgcggacggtggcggcagcggcggcgcggactttccggcagaggcggggcggcccgagcaccgaggctgaggtctcctcaggtccagtctcaggttcgggctccgcggcttcccgcgaccgttaaccacgtgagtgcccagtccaccaatcccagtgcagctccgggtttgaaaaaaaaaggagggcgcgacgtagcccgcgggggaaggaccagctacgcgattttggcgggaacccgctggctccacccccggctcggcgccagccaagtctgggcgggctgtggtgttccgggcctatgagcgagcctggggcggcggggggcccggcccggcgccgcccgaacaccgcccggacggggctgggccttctgggaggggcaaaagagagctggattcgcctaagccgacccgaaagccggcctggacgcacccccctcgctgctcctccggtgctgggggatctgaagaggggcaggcggccgggcagcgcctccgggtctctgcgagctgggaagagccagggaccgaatggccttcggccgctgccctcggaggccgcttcttgcccctcgtcccctggggcgagccactggggcgtagtgggcgtggcagtgggcagccacgttcagggtcgaggtctgagccggaaatggtgactcgggcctcgggacctttctgaactgcgggagccgatgtgcttaggctggacactggctgggaggaggcctccgagccccattatttccccggggtgggtgactgttaggggcgggtgtcagcacagcgagaagagctctcccaagcaggggtccacctctgccgaccttgtccgcggccaaaagaaacagcagcacagttgcccaccacgaaaccaagtgcccggcacacgatctccgtgtttacatttgttcgccagcacgtgggcatgcgttggcaaaaccgattggcccggctcgcggcaaactcaaacgcaattttaaaaaatttccctagtgcttcgttaaactgatttaatctgtcccttaatgcacttacacgtttcttccagttttcttttttctttctttgtttatttatttttttttttttttctgagacggggtcttgctctgtcacccaggctggagtgcagtggcacgatctcggctcactacaacctgcaacctccgcctttagagttcaagcgattctcatgcctcagccacccgagtagctgggattacaggcggctgccaccacacctggctaatttttgtatttttagtagagacgaacttcccaatgttggccaggctggtctccaactcctgatctcaagtgatccgcccgcctcggcctctcaaagtgctggaattacagacgtgaaccaccgctcccggcctcttccagttttctgttgtaaacaaccccgtggtgtatatgcttccttctccatgttttttgtttggtttggtttttttcgacacggagtctcgctctgtcgccccaggctggagtgcagtggcgcgatctcggctcactgcagcccccacctcccgggttctcgggttccagcgattctcctgtctcccgggtagctggtattacaagcacataccaggcctggccaatttttgtatttttacaaaatgcaaaatacggagtttcaccatgttggcaggctggtctcaaactcctgacctcaggtgatctgcccgcctcggcctcccaaagtgctaggattacaggcgtgagccaccgcgcctggcctttttaaaatactcttttggatacctccctggagttagaattcctcagtcaaaggatataaactggcaaactccccctccagaaacacaatacattctcactagcagtggattagagcacactctgtgaattcaggacatcagtggatgttcgttgatgtggttttgttgttttgattcatattgttgaacagttgtcatgggtttaatgataatttacatttatctctattgcctatttttcttattgttagcactttatgcatattaacactttgtcatatatgttgttctaatgcttttcaaaggctaaataaactcaagctgaatttttcttgaaac

SEQ ID NO: 915790 - DNA, 4001 bp, Homo sapiens
cttagatagaactgatcactcctcctctgggctgccatgctccctctgctaggacacagaccatagtccactttgtatttctatatgtccatctcccccaagagcctgggggcttatttaaggcacacaatgagttgtacccatttctgtggcagcctgactttgcagtggggacagaggacatggacgtcaggtttagccagccgtccatcccaccacaggccagcgtgggggcttgcgtgcatcatgccctttgcagggtctcggtgttcccactgtggagcagggatgatggcagtgaccccacaggactcttatgggcggcaaatgacacccaagcccactgcaaggcctctgacgctccttcagccaatcctctccttccctggaccttagtatccttatctgtaaaatggtggcggtggatgagagagcttggactcgctgatcggaggtccctgccagctggaacagtgctgggtaccccattgcaaaaggaaggtggctggtttctcacagaactcctcagggacagctgggaaaagctagtgcccagggctgggagattgctgagaccaggcttcttgtaaacaagaaaggcaggaagacggggttccctcctcgaatcgtcaattaatcaataacttggcctgagaaggggcagggccagtgacctccagactgtttgctggcggcgcagccactatcaccctgtcttccaactaattcacaaaccctttgcagcgccctccccagcccccacaacctgccccctgctgtcttatctgcaggctccctgccctggccccagattccagacccttgtcctgtcctggactttccctctcagggagcccctctgcccacagcgtcctctccattgcccgaaccagccaactcccagcagcgcttcagtcaccagaggcacagcctcggaaaagcttcccggtgtctcacatctgtgtccccaccaggtgggcttccttcctctaggcctccagattcccgctctggtttctcctcgggcacttggacacttgtggagttatttacagcctgggcttatctctctcaacttagagcgcagctcctccgggaaggggctggtgtttactcctctcttcaccacccccagccccctgagcaggcactcccttcagctcggcaccaagcctctctctccctcctacccctgcgtgaataatttctatctaaaggaatgccctgcacatgtgcacagtggcatctgacagcttctgaggtcctttcaggagcctcttctcatctgatttgagggaggtggggagtctcaccctcccgtgacagaggaggacaaggaggccccaagaagtagagtgacactttcccaaggtcgcccaggtggaggggtcaggagtgtctcagcggaactcccgctagggtcaaggagactgacggacaaggaccgctcctgggctggccgctctggattgcgccccctgaacagaatgtctttttccatctgcccctgcggaggtggccagaaactccgtggcccttgcgccaccgtcagctgcacaggaccaggcgcttccattgtggtccacgcccgtctcactcccttttcgcaagcctgcgggaggcagggacattttacagaggaggaaacagaggctgagggatgacttgcccacgaccgccaagccagcttaggctcccgggtcttggtgcgctcgccccatccaggggaccccaaaacgccctccgccgccccagtccctggcctgtgcgcgtggacgcggggtccctactcacagccacttgatgccatagcacacgccggtctggagcgccagggcgaagagcagcgcctcgcagacctgcggccgcgccctcatcgtcgcgcggcgggcgcgcccggggtcacacccaggaggagccgcgccgaagtcctccgcctgcacggccgccgctggtcctgcacgccgcctgcagccggggagagcggaggcggcgggttaaggcggcgcgcgggcgggggaggcgttttattcaaattacaaaggaggggtcggggcccggggaggccgagcgcggcgggcgtcccctcccgctccgcccggccgggggacgcgtcccgcgcctggctcgaattaggcgcggccgaaggcgtgtctcccagcgtggccccgggccccaacgcgccttcgagcccctctggccggggcagccggaaggagggacaggaggcggcagaaccggagacccaggagagaccgggcagacacagcgagagggagaaggacgctcagaggacaaggctgagagccacggagacagagggggaaacccggacagacgcaacctgggacggaaaggagaggaatgaggaatcaggagtccaggcgaggcagcagagtcgaggacccggagctggggcttatccctgcaatattgagcattagttaatagggcctcggcaattctccttcccaaacgtgtttcagtttacctcctcagtaagctggggcaattcgggcacaattccgcttttataaagaacgttccctggccgggcagggtggctcacgcctgtaatcccagcactttgggaggtcgaggcgggcgggtcacctgaggtcaggagctcgagaccagcctgcccaacatggcaaaaccccgtctctactacgaatacaaaaaattagccgggcgtggtggcgggcgcctgtaatcccagctactcgggaggctgaggcaggagaaccgcttgaacccgggaggcggaggttgcagcgagcggagattgcgccactgcactctagcctgggcgacaagagcgaaactccgtctcaaacaaacagacaaacaaaaaaagttccctaacacgatcgcatctgctcctcccagcaccccgtgagataggcactatcgctgcctcatctcacagatgaggaaactgaggcacagaggtggggttcagctagggagcggcaagccgggtgtccggcgaaatcaggaaatggggcttgctcggggccctgctttctcggtgtgggaaggggaggatgggaaacgggatggtagggctctttgtacagtgaggattccgagtctccaagtccgtctttagccgctccactttggagggtgggagtggaagcatgcgggctgggactgggcagccccgccttagcgaagcggggaagctcgcggggctggcgcggtgttgcctctggcctccaggcggcgccctcgggccgcggaggagaggctgccccgcccgcccgcagcccgcggagcagctatctccgctttttttctccttcacttcattctcacctcattaactcccttcccagcttctcccaaatttaccaacacctggcgttcgcccggagtcagacacagccccagcccctctcccctcgggaggagcagagacaaagggattcctttctaagggtttggggagttggaaaaggaggcgcccacggtagtgggggcgctggagcagaaaagggacgttcttatctggctctgtgagcttgggcaagccctcagccaccccagcctcggtgtccccttccataagaacgaggaatggggcttcgccgtgcgtcccccgaggaccccgtctccctgcagcctgcggggctcagcgcccctctgctatttgcaccgcgacgccacctgcgtggcgcgttcctgcgcgtgggtagtcagcacgcagagatgggaagccccactgttttctggagcctgtcggcaaaacccacaggaaggcgaggagaagcctggatcgtacagtttttttcctccgcagagccccgcagctagcgcccagcacaggggcgcctgcgacaaacatgccgtcaaggctgggggtctcagaggggttctcggtgtaacccagtcccgtcctcccacccagcctgtatccaaatcctttgtcttcctggtcctgcaagtttcttgcacttctcagaacgagaaaaatatccgctggatatggagggggg

SEQ ID NO: 915791 - DNA, 4001 bp, Homo sapiens
ggtccctaggccctcgagtaattttgctccaggaaaagcatccgccattgtattagtaaagcgtttactaaattaccgaatcaaaccgaactggcttaggttctcaatagcgtggaaatccactgaaaataaatgaagagggcaaactacaggggctccgcaggttcgggtccgcgccgcccaggcgaaagagaggtgggcgggcatcggcgcgggatgagaaaccaacctgatacttatcgtgtgccgagttccctccttgtatcctgactaagcacagcgaataaccctgtccttgttctaaccccaggtcttgaagaaatactgtcccagctgagccccgcgtttacaagatgaagaggcgccccagatgcgctgaaagaaaggccaaagctcgtgcctccttccactgcctgcggtagaacctggtcccgcatagcttggactcggataagtcaagttctcttccatccccagaacctgcgtggccgccgcctgagcgaagcccagtgaagatccacttctgtattaccatacgcgggagctatccacggacacgacgctgttccagaaagccatttagttactggaggtgcatgtgctcattctagttctctacgatacttaatgtgcacctaagtgtgtgccaacaccgtattataagggctggaggtgctcctggacattttagcgctgcggaggcagcacagcacaggcgctcacccccgcgctggtcccactccgaatccagagtccagacgtctgaaaagcgctacgcttggtgacaatttggcgtttccttaattaacaaaactctccccaaggcagagccagacactgcgccggtctcctggttccactcccgtggggactagcagtcccggaatctctcggactctaaggggccccagacgccctcccggctcttgcgaacagtcaggctcctagctctgcctggctttggaggatgtcgggggccagtgcctgcgtgcactcccactctccggcctcctccccagccgccgcttccgctatcctcacggcccttgggaagcagctgggtaagagctgcggtcaaaaggggtaggagaggggggtgtcctagagcggagagtccctggcgccactgccccgcgcgtagggggcgctccccggcctacttaccctgattgcgaatagcgggctggctctcgaggcagctgggcaggtagggcgcgttaggaaacatcctggcctggccggatgacgcctggctgggcggaggaggaccgaagggcccgtagcgacaggctccggctgtgccagtgaactggccggaaaagtggacagtgaaggcgctcaggcactgctcctcgtgcggctccgcgccgccccagctcggctcctgtttgatgaaggagtgaggcggcggcggcgggggtggcggcggagccggtggcggcgcggggccgcccaacgacccgtaagccgaagcgcccgggggcgcaaagtccagcaccggcgcccactgcgccgcgccgctcacaggcagggcacagccgccgccgccacccagggaggggacggcgggcagcagcgcgttcaggtcccgcacgtcggagcccatttgctgcggctcagacccggacgccccgcggctcctccggccctggagacgttcagcgctggcctcggcggcgcctaacttggcccagatgccgcccgggtcccggactccctgctgctctggctgctgtaggcacccaggcccggagcggagcgtgtgctgagacgccggctccgggacacacgtggaagccgggtcctgcagcaagaggaagtccaggatcgcggcgaggagacggcggggcccgggcgcctgggctgccgtcccggctctgggtgggtgggtgggtgaatgagtaggtgggagggagggcgggaagtgggggagcggacaggcggtcgggttgcggagagcccccgggtgtgggcgctgccttgaactccttaccccagctgcctggctgccctcagcttcccaaagctcaaataagaggggccggcggcgcggggaagaggaggagccaggaggctcggccgctccattcactcagcagcccaagcccggccaggcagcgcgcgctgctccttgggggcgccctcgcagctggggtgagggcgggtccgagggagcgtccctctcggagacaccctcctcttcaacccaacacgcgctctcagctggccggtgtggcacaaccctccccccacctccccttcttggccttcgccagtgtgggagcctcgtctcactggagagtccgttcaggtaagcagtgagtccgggcagggtcgaatgcggtgggagtagagatggggttgttaatctaaaagagtggtttggagggaggggcaggtaggctccaagagggcgggaacttcaggaaagcgcagaaagaactcagtcaagcttcaaagaagcgtatacccttgctttgcacccttgagtctggctcttgcttctagaactgtcgggtaggggagtggccatgatcttggggtcactggggaaagaggtggccctttgtgggttccagaggtcgggactgaaagcgaacgtccctcagttgggtggccgggagttgcaccagttataagccgggcgtatttcgatcggctagtagttgtttacttggtgaggtttgcgccaggcggaaggcggttgccgcctacctaaaattggagtcagcagcacttagtttccctttccagtgaggaatatctaattcttctacggttaagccgggaaaacagcggctagtttaggagggaagaaaacccttgggcaaacgcccaaagcctgcgtatattccggccggagcatcctggcgcccagtttggggaggaggggtgaaggggagggtttggatacgaagcccggcagggagcgggtaactcctggagccactccgccgagcactgcctgtggccctggtcgaggataccattctggttgctcagtgattgaccaggaggcggaagccagttaaggggaccaaggagtggagtagggagaacctccatcggcccacgggcgcgagttagtgttcgaatctttgggagctcgaagagcttcgctaaatctgactcccttcgtctagtctctgtttggcagcccccgcgccccagagcaggtgtttggggcgggtagggggtgttttggtttggtttttggatcttctaaaggagtcagtatctattgggaaacaacccctaggcaaggagaagaaccgggggccggagcggagcgtgtttcagaggtgcgtataaaatcccaggggcgccaggaggcagcagcgacggcgcagcgtgggacggccaggcgcgacgggagggaagcaaccggttgcagtccggcctcctgtacctggctggcccgggctggggctgcaagctttccagccaaacttatgtgaagcaaagtagttgcagtttgacaaagaatggcgtttcaataaatgacatagtaattttttacgctttggtttttagcttgcattgcataaacgttgtcgccattaaattctggctgcggacccgaagtgtgtgcgggcccaggacttactcgaagggcgcacttcttgggaatgcgcatcccgtaggcgcaggagaccctgagggtaaagatgcggcacttgagccctccgcttgcctcccaggccacctttgctgcttgactttgcgtcgtctccactcagaagcttttaaaattattattaagaaaagaaagattctacaagacactgcccccacgctctctgctcagtcctctcccacacgatctatccctaaacctttcgcggggctcgcgcgtttggttttttgagtggagaaaggactctcgagacaaaattcactgccagttgccctaagaaccccccagatccctgtatctcccttccttctccccgcctattatttctacttggaagtcgtttttcttaactaggactcaactg

SEQ ID NO: 915792 - DNA, 4001 bp, Homo sapiens
ggcttctccatccttttctgactaaaacccccacctcgctttttcccaatttatttatgccgcagtcttctacggtctctgccgcttctgcagcgaacccctggcaaattaagtataaaactcgttgcctgatcgacagagaaggttgttcaccccccaaaaataaactgcagctcttccgcaggagcagcgcgggcaagcgaaatgaatctgctgggctaaccccgcgttgactccgagctgtaaatcaggggcccgcgcaccaactttcattaattactcggagccagttaaatggcctggtcttaaaaatgggaagagtaattaccgagtaatgttatctgtctggggctacccgacctgacaccatgacacccaagggaaagctggtgagggggaaaacaagggccccttccagttgggccttcagatggcgaccctgcgctctcctcctcctcccccctatgggacccaccttgcgcccaggggtccgaccctgaccactgctgtaggagccaacttcctcactccccaggctggacaaccaatttcctttagagtgtgcctgacactgtatctccctttccctccatggtagtgcttcggtcctttgcctcagtttccccctagggaaatcctagcattcccccccccccccaaagtgagaaaaagagcgtggagcctcagttggaaaacatagtcttttataatttttgttattaaattgctttaaacttataccccacaagcttctggaaagctgttgctgcctctggggaaaaggatccttcggctaaagatacgtcattggccccggaacccaaggatggggtctcattcctctacaagttccggagtctgtggcctgaagtccagacacaatggctaaggagagctgctcctatgggatcctggcagggccaccccagcagcctcagatcctcctggcccaggactgccctgggtctccaaacttcacaaaattctcaggagtaaattgggtcaaacagcacccattctcccactcttgcactatttgaccaaagtgcctccaaagacttaagcaggactcagccgatgagcaggacccagggcatcgttacctccattttcgaaacacacacggacgctcatgcacacacaccaccaccccccgcccagaaaaaaaaaaaaagaaaaagaaaaaaaaaaagcttctctggggcaacagaggcatgagcctggagggtggtgtggcagagtgcaagggagggaaggagggggcaaatcctaactcccggatagtacaggtccaggcttaagtctcacacactgctcagcaccacacactggggatttgagaagccactagcttttatcatatgacctcgagggcctccatttctctcctgctaagtgggcaaagataacccccggccccgttagctctcctgcatgggcgagcacgtttgggcttccacagacttccttttgaaacctgaggcctggccttctttgaggcctatagatgagcttacaaacgaaatttggctcagggcacccactattgcccggagtgaaggccgaatttctgaaaggacactaaaaagagagagagagaaagagagacagacacagagagagagagagagagggagggagagagagagagagagagagagagagagagagagacgaaatagaagctacgaagaagttttctctagacgaacccttctccattcctgagcccaggagtaggcagggacccagggcactgcacaatcctcagagccctgctccgcaactgtccgtgcccggcgagggccgtgggtcccgagtcgcggcacccactctcgagacgtccgtccgcaccccagaactcgggcccaaggatgcccgtggcccgcgagccctcctaggcctcctcccagaccggacacgcagacctcggcgggcaaagaccggcctcaaaccctctccttcaggtccccccgggaggggcagtggtgaaagcgcctgcggagcggagggaggtctcttttaattagaagcttatcggacacgggtttgattagagcgcgctgtccctgggcccagcgcttggcctggcgcggagagtgcgggggcaggggccaggggaggtaaagctgccggctggaaggagcagcgtgttcaaaggctccttgtacaggccttggagggagagaatcgagtggccaaggtagcgcctttcccacggttagtcccggcccgggaggggagcgcaaccttgaccgtgcgctaagaggcgagacgcgctctgtgccctcctcccccgccggcggctgcagagaagccgggaaccgcctggcctggccgggccgtgagagctgaggggtgaaatggacagcaggctcagccaggaaggtgctcagaaggctgaaaacgatgactgcagctgcactgtgattggggaaaacctgtcccccaacaaaataccctctcctgtgtgaccggaagagggagcctttggccctcgggcgtcgcaggcctccgcacctgaccctagggtggcctgatgatcccaggcctaatcatgccttagggttctgcgagcctgcggggctgcgggatcagtggactagcaggcaacctcttttttttttttttttttccgagacggagtttcgctctgtcgcccaggctgcagtgcagtggcgcgatctcagctcacttcaacctcagcctcccgggttcaaacgattcttgtgcctcagcctcccgagtagctgggattataggcgcccgtcaccaagcccggccaatttttttttttgtattttcagtagagacagggtttcaccgtgttggccaggctggtctcaaactcctgacctcaggtgatccaaccgcctcgagccaccgcgtccggcccaagcaagcttttttcccctcctccttaagccttgcatctagtctggggctactcaagtcctcaccccacatctgccctcacaaacccgtcaacccccacacatggactaagagtttggtgcccctcccgcaggccagaagaaatccatctcaacggtggggccaagatccctggaaaaggagtagaaacaccctagcatggtctgggttcaaatcccacctctgccacctaatctcatagaacctggatttcctcatccaaaacaaggggcctctccaggattagctggtgagcttcttgcaaaggttctcgaggccattgtcttaattaatattcagaacccagtgcctgaccaagtaggcgattgatgtttgctaaattaatgtttacaagattaggatgcaagatataatatttaagaatttaaaatatgaacatgcttgtgaagttttgggcggttgtgagtgggtaccaacaattgcccctgcctgtgcaccatggctagactgccctagggatccagagacggccttgattcctctcccctggggtttggccttggcgctctgatggccatttccacatttttgagagttgatgcccttgcctctcacagcccaagtcttgggccaggccctgcattcctggggaagcagcaggaaccctggaaatccaaagaataaacccagaatctcgagggccacccttgcccactccaggatagcagccggagcgcttctcacatccaagctgcccaatgagcctcaagggctgggtaagatggacccatctgttttcactgcaagacaaaacttaaacctggagatggtgcttccaggctatatgacttgaatctagggccctctctccattgggctttttctccagggtggagaagaaggatacattcacctactagtcctggtccccttttaactttttctccatggcagccacgcctgtatattacagaagaatccagatattttccagaagtgtaatgcctgctggctgcaaaacccacagtcccaccccccacgacatgtgataagatcccaggcaccagacctgccctgaaaagggctggacaagggacccaaacgaa

SEQ ID NO: 915793 - DNA, 4001 bp, Homo sapiens
gaaatagtttcacagggtaggtgacattaaagctggatcttgaaagatgagaagttggcctggtgtggtggttcatgcctgtaatcccagcactttgggaggccgaagcagacggatcacttgaggtcatgagttcaagactaggctgtccaacacggcgaaatcctgtctctactaaaaatataaaaattagccaggtgtggtggcatgtgcctgtagtcccagctacaaagactacagcttgggaggctgaggcacaagaactgcttgaacccaggaggcagaggttgcagtgagccaagatcccaccactgcactccagcctgggtgacagagtgagactctgtctcaaaaaataaaaaataaaataaaaagtgactagggcaatgctgtatcatctcactttattttaaataaaagaaaaatgagaagttgtaaaagataaactgcaacaacaagctacaggggatctgactagtgtccacggattgcttcacagaggtaatgaaatatcatctgatgttattgctatttagtgatatttattttctttttagtaataatttagttatttagtgataattattttcttttctttctgatctcggctcactgcaacctccgcctccccggttcaagcaattctcctgcctcagcctcccaagtagctgggattacaggtgcccgctaccacgcccggctcatttttgtatttttagtagagacggggtttcaccatgttggccaggctggtctttaactcctgacctcaggtgatccgcctgccttggcggggattacaaccatgagcccccacgcccggccgagataattattttcacatgaattttggcttccccaagacaagtttttgtctgttttattcagggatatatccctggtgactagaatagtgcctgttacatagtaagaaactcaaaaatatttgtttaattctttagacgcttatgggggatatataggaattaaaaaacaatacaacgtaatagagcatggtataatacaatactgctatttgataactctgtcatggagtagtagttccaccagagtagcaaccaggtctatcttgatcccctgtatccgttagtacaatattggtgctcaatatacatttgtgaaaaaaattaattaaaatacaacgtaatagagcatggtataatacaatactgctatttgataactctgtcatggagtagtagtccaccagagtagcaaccaggtctatcttgatcccctgtatccgttagtacaatattggtgctcaatatacatttgtgaaaaaaataattaaaatctagaatactattacatcctaaaaccgtaaaagcagagtgtcagaagggatatatattggttttgattttttttaaatgccggcttgaaaaccgagttcagatacatgctatctggctttgggtaggttctttagtttcctcctcatctaacagggctgttgtgggactcagtgagagagaggatggctggaagtgcacataggatactgcctggcagactgtaggcactcagtaaacgcgagttctccgttaacacgaaaacattacaaacagctaaaatgacagctgcttgagagaataatcggtaagtgccacaaccgggctagaaaaggatgaaggacaagctcctgcccactcctttggaaactccacacctgggccggagaaagactcgaattcgaaaactaagtttcagtcgcacctgcctccggcgtcgcttcagcctccgaggggtctgcggaggcgacgtcccagtcaggagggatgcgcgcctgcgagccccccggggatctcggagccgctccactgcggtgcctgccgctatcttccccacgccttagtaactgcgacgcgacggcagacagtgtaggcggcaaccgacggccgggacgtctaacctcaagtcccagcaagccccgcggccacgtcctctgactacctcgcgccagcaagacccaaactacggatcccgattgactccgcgcggcgcgtcacgctgtcagctccagccaatcggcttcagacaagtcggaggggagggagacgcagaggcggacaagatggcggcggcagctgtacagggcgggagaagcggtggtagcggaggctgtagtggggctggtggtgcttccaactgcgggacaggaagtggccgtagcggcttgttggataaggtgaggagccggttcttgggaacagttgaatcctggggaggcctgggaggcggcgagccaaccttcccatcccggtctcccttattttctacggccttttgaggggagcccttgtgtgaccactatcacaaccctacgcacgcttggagcctgcccttgccctcatcacacttcaaacctggacccggtcctctttagaacttcttcttttctcgcaagtgttctggtcctggtcgccacacctttttcggtaatttgatttttcctatatttaatcgtgtccatctcttttctcctggggggctgggtgcactgttgtcagtgcccatttcacagacacggaaaaccgaagcccaaagattaaagaatcagtatcccccaaactctctaccaccatcacccttgcgtgctgctacagattccaaagtgcttcttgtccttttgcttactgaagtttttaggcgttttatcatgataggcgaatactgaaaatatttgagtattgactgttctactgggctgacaagaagcctttaagatttttctttttttcctgttgtttttccccgccctctcctctcttccctccacctccctctttgctaccaagtgcactgctgcccgctcacgcttgcccctttcctccctctgctcatccaaaaaaattttttttaactgcagtcctagcaacaagggtttaaaagaaaagaaaaaaaggaaaactgtccctgggttggcctttcttgctctttgcacagcatcttggaagaaacagttgcacggagaacaacgtcctggtgttgattttgcctctaattagctttgtgaccttgaaatatgcttgctctctctatatctgttttctcatctgcaaagtgagagatttagccttaaaatgagggacttaactctaaattcccttccagttctctcattgtagggccctgggctggtttgatgagaattgttaagcatggtgtctttaatatagtaagcagaatttttgaatataattgaaaacagctttcagacttccctgtgcataacacatggtaggtgcttaagaaatgaaaacatgattatgttgaggggttaagatccaggtctttttacttgtctttttgagtgtcattggttttgaaagacatggttctcacactcttctcttgtgagaggggtcacgctccattgcccagaatggatcttagctcactgcggccttgaactcttaagcttaggtgatcttcccaccccagcttcctgagtagctgggactgcaaatgtgcaccactatgcctgactaatttttttgcttttaacttttctgtagagtcagggtcttactgtgttgccctggctggtctcaaattcctgggcctcaagagatcctcccaccttggctccccaaagtgctgggattacaggcataagtcaccatgcacctggcctcacactcaaaccttaagatacagaaacatattctggaggttgggatggtaaattgcttcaagacatgtgagagtatggggaattgatggtcatttgtgtacacaaatccttccctcttgctaggtaagcacctcatagcctgtgcttacctgccccactaactgctcttgctcttccttgcacttggatcatcatcagcaaacattaagtatgggcattctgctaaggcagtatagaatactattattatggaatagtgtatatggcaccattgtgttattgaaagaacccggatgtggggatcataagatttcagctttgaagtatttctgctacttgc

SEQ ID NO: 915794 - DNA, 4001 bp, Homo sapiens
ctgaagcaagttctcaaaaaaaaaaaaaaaaaaaaagaagaagaaataaaaaagaaagaaaaagagagaaccctacacaaaacaaatccactgggacctattggaatgttaacactcattataaacagtttcacttctatgctgaatcaagttggcacaataatcgaacattgtgtatgtggaatagcagccatgttcatatccgcaataagaattaaaaagcaatggcgatcctagaattagtcatcgcttcccaaacattaacttttaatcacagttgaactaggcaggacttggcctatgagtcaacctgcagtgtattatcaaaggcttgtgttaaaacctcggtactgtaaagcgcaactcagttcctgcgcaacgtacagatgtggctaattcaaaagcgtttcagccgactgtaaataatagtctacaactgggaaaccaacacgcgacctactaagtttgataagagcaagccggcccaagttccaacacacaagggaagagcaggggtgaaagaactccataaacaacttccaggaaagtctgggcaggggaagcccgaaacctgtattccgaaatcgcctgagccgcgaggaaaataaatgcttacgggagggggaggggaaacgggaggggggaaggaaagaaagagcaaaaaactaaatggaccggttctacccccacctctaatcaacactggaaaacaagagaacaattatttgactcccccaggagactgaagtggaccgagaggccgcaaaggaaaggggcccagggctcaacttcacaaactcggccgccgctggcaacacacccacacacaaatgccagaggcccccctccccctttcccagcccggcccggcgggagcgaaggtgcggagcgcgcggaggcgcgcgcattgtgcaagcccaccgcggcccaggcccgacttttccccacccccttccttcctccccacccctcctccactcccgccaacctctcgggaaccccgggaagaaagaaaggaagaaggagggaaagcacgccccccggggctgcaaccgcagagagaaactcagaagggaaaaacaaatctcagccccggactctgggaggagtggggagctggtcaccgcggcggagtggacgactccagttccacttcgcctcgggacccccaccccagctagagttcccgcaacccccctcccctgaccagagctggcggccgcggctcccgagcgcccccccggtctgaggcccgcccgacggggaaacggggagaggggcaacgaggttacctgtcgggagtgggatttgggctccggcggcttgaagaaggagtcgggcagcttccggagcctcatgggcacggtctggggcacgttggccgtcttggggttcatgacggcgttgaagagcgcctccaggtcggtctccgagtccccgcggacgtgcacgatctgatgcccggcggggggtgcctgcggcgccgcctgggtcgccgcgggtgccggttgcccgggtccggacggcgggccctgcccctgcgggggctgcgaaggcggctgcccttggccctggggggccggttgaggcggcggctgctgcccgggatccatggcttctgcctcccccgacgcgcaccccctgacccaggcgagcgagggctacgcccggacgccccggctccacgggccgaggtggagaagcggcgacggctgcgggccgggcggcgctgtcctcgctctcagggccggggggctgcgccgcggccccgcatcccccgccccggcgcctccgcccccgccctgcgccccggctccactggtctggcggctgcgcctcgggaggggctgcgaggcactcggacctgcggcgcctgagaactttttccctccaactcccttgacggaggccggacagctcgttgcctttccccgcctcccctttctctttatttccttttcttgttccttccttcctccctttcttttccctggcggcggctgcgcccgactgagacagaaactcgcctcaaacgccaaaactaaagttaggagaagcgcccgcccgcgccgccgcggccccgcctcctctcggctcttccttcctctgcgcgcccgcccgcaccgcggcccggccggcagcgcagggaaacttttcgctgcaagttgctacattcctgcacactcccggcccgcggcgcctctcccggccgcacgtgacccgctcgccctggcccggtccgcccttcgcccgcgctcagccgggcaggggcccgaagcgtgccccgtattctgccccgcgaaccgcaaacgatgggtccaatccgggtccgaactgtggtgtctgcggagaacgcgggcgcccttggctgcaggaagttcttccgctccgctcggccccttttccccgcccgtgctcgggaaaggcgcttccagttcgcctggacctgcgaaagggccaaggccgaaagaagtggagagaggatgtgcgaacccacctcctcctcctcgcgttaccccggcttgaccgagcggagcgcctgtgcgagcttaaagccgcgaggatagattggagttaaaatagataccgtgagccggcattgatgttaataaagatccattgttttcagcattaactttattttgtaattgtttcacttatctgttagtctgcaaaaactcacttgagaggggtaaacggttactgtaattgaagctttgagaccaggtctgtaactcagtgtaacttattaaaagaaacaaaaacactacattttccaaatagtgaaatcacatcaacttttttagtactcgaatttgcaatagtcactggaagccgcaacccaaaaaattagtgcgtcttcaggtacaagcattcatgcctctgtacctgtctttcatcctcaaggagctgggtccctacccctgctatccctgtgcctggcccaacggtggactccgttaatgtggactgaataagaaatgaatgggcaaggaggtcatcccaggcacctgatgtacaaggagcccttctggaagccactcaaaaacaatagaaatgttttttaagtcatacactctgggttttttttttttaaagcatccttgttgagatataatttatataccatacagtttttgcaatagttgtacatattagtatatttaagcaattcactgtttttttaaatatattcataggattgtgcaacatcagtctaattttaaatgcacaagcccattctaaggaaatctggctttcttgttttaatgattttgtctacaatgctagtgaaacaaaggtataagtaggattaagcaaggaaaaagtccgtgagcaaaaaggtaatttcttccttcagccagaacatgcccaggagaattctgaaggatctgtatcacttggtgtggtagggctcggccaaaggagcaggcctcagacactcaaaattctaacagaagattccaatcaactactctgaacccccagtttcctgtctgaaaaaaaggatcagagtaaatgacacccatgactagttcttggatttgttcccactcctaaatgtcaagtgcatttaacgacagacttgcaggttctggagttacagagttttgagttcaggtcccagttctgccatttactagctgtgaggttttggacaagttatttatttcctgttctttaatattagcatcaggggtaataacacctacctcatagttgttggggcattaaatgagtcaatggatataaagtacttagcccagtttgggacgtgcagtgagttccacatcaatgtcagttgtcattgttgtcccatgttcacagattatttcacaggtagtaacatagcctctccttgcagcagccctctctttctaagcacagcctcagggaccctgttggtagtcccttcctctcttatccaataatcagtccacacaaacaaaacctttgggcagaaactatgcattaaaaactttacctgaaagaaaacttta

SEQ ID NO: 915795 - DNA, 4001 bp, Homo sapiens
acatatttgtcttagataactgtctcccaccattattttcacttactttaagaagtatctctgaccagaagatgtctttgccatctcccaacctgctggcagaggtacatcatcaggtatctcaaaagaagactgtcgaagatgctgagctgtgggtgtagctgctgggccagagactactccagtgggggtcagtgtcccaggagaaacagctcccaactgcagagaagctggagaggaatgagctcgaacatgctgtggagtcagggctcctgcagtgcctgcatcagtactggcctattagggaatattaagatgaaaaattaaaaaagaaaaaacacaactgagtccctttaaatttcccagtcagcgcttaattgcagccgaatatctaagtaccaaaggaaaatttcaacatttaatattcgacactggagaacacaggttttcaaatggatacttttaatattatataattttaatataaattttataaatgtttgtaattgtattgatgagcagtccatctaatgaatttcccctggtccacactagacatgtaagggcaactagtactgaatgaataaaacattccaaaaataatagtgaattttaaaacctaatttttaagaggtcagtgcagttatgggtgcttttccaagttctaaaatgttctaagtataaacacaacacaaagaatatgtattttttactaggttttaagtaattaattttttttctaggtcaaactcaagaaaaatcaagccctcgtcatttattccaaccatgataaaatgccatcaataaagaaatcataacaaattacacaaattttaatgagagcaacaaatttgaactgcccaaatgttcttaaaagccatctacaatgaacaggatgaaaaaaacccaactatatctttgtatgtagaagataaagatgttatcagtccaattttaacttaagaactcacacacatccacaactctatacaagcagaaaaaattctgcattcagaccccaaagatctgagttccagtctaagttggctagtgtgacactgaacaagtatcttaacttccatatgcctgttttctcctttataaaatagttttcatgatagaaaaatggatgtatatgaaagaacttacagtcaccagtttgtgttgtgaacaatagtatttacaacctagatttgtactattcataatcttgcatagtttttaaaatatttttaattagcattagagtttgattatcaaaaagttagaatttcctagattcacaaaggtaaggaaactggaaggactcagtagagtcattaatgccttaaagtgatacacctttttgagtttcccatcagaataagtatgatttaggaaatcattaggagaaataaaagtcgaatttacagatgcaaaacacttagttaaaaacttatttaaaacaaacaaaactataatagtttatgaattttagaactgctggatataaattcttgtaaaaattatttactagaagaaaaagtacacttcccagttgtaattctttgtggctgatgccacaaaatgggggatccaatctatgtgtattatactttgaaaacataccgtgcagtctgtagggtgcatgccaacatacatttacccacaatgagtccataaacccacttcgaggggtaagagaaaaaagcatacctaagacaaattgaagtgtttaggcaagcagctaaattgtttttccttctttcctcctccttaacccgggtttttgtcatcaggttaagtgattttttctgagttccaaaaccctttggtctccgacaggagactatacaacaggcctgcaaataggagagggaatgggagtgggggcggtaactcttctttccactcaagttacatcccgagtgggctaactacattgcagtatttggaaaacctattaacttttgggcaaagttcctatgctgaagtttagcctgaagcaagttctcaaaaaaaaaaaaaaaaaaaaagaagaagaaataaaaaagaaagaaaaagagagaaccctacacaaaacaaatccactgggacctattggaatgttaacactcattataaacagtttcacttctatgctgaatcaagttggcacaataatcgaacattgtgtatgtggaatagcagccatgttcatatccgcaataagaattaaaaagcaatggcgatcctagaattagtcatcgcttcccaaacattaacttttaatcacagttgaactaggcaggacttggcctatgagtcaacctgcagtgtattatcaaaggcttgtgttaaaacctcggtactgtaaagcgcaactcagttcctgcgcaacgtacagatgtggctaattcaaaagcgtttcagccgactgtaaataatagtctacaactgggaaaccaacacgcgacctactaagtttgataagagcaagccggcccaagttccaacacacaagggaagagcaggggtgaaagaactccataaacaacttccaggaaagtctgggcaggggaagcccgaaacctgtattccgaaatcgcctgagccgcgaggaaaataaatgcttacgggagggggaggggaaacgggaggggggaaggaaagaaagagcaaaaaactaaatggaccggttctacccccacctctaatcaacactggaaaacaagagaacaattatttgactcccccaggagactgaagtggaccgagaggccgcaaaggaaaggggcccagggctcaacttcacaaactcggccgccgctggcaacacacccacacacaaatgccagaggcccccctccccctttcccagcccggcccggcgggagcgaaggtgcggagcgcgcggaggcgcgcgcattgtgcaagcccaccgcggcccaggcccgacttttccccacccccttccttcctccccacccctcctccactcccgccaacctctcgggaaccccgggaagaaagaaaggaagaaggagggaaagcacgccccccggggctgcaaccgcagagagaaactcagaagggaaaaacaaatctcagccccggactctgggaggagtggggagctggtcaccgcggcggagtggacgactccagttccacttcgcctcgggacccccaccccagctagagttcccgcaacccccctcccctgaccagagctggcggccgcggctcccgagcgcccccccggtctgaggcccgcccgacggggaaacggggagaggggcaacgaggttacctgtcgggagtgggatttgggctccggcggcttgaagaaggagtcgggcagcttccggagcctcatgggcacggtctggggcacgttggccgtcttggggttcatgacggcgttgaagagcgcctccaggtcggtctccgagtccccgcggacgtgcacgatctgatgcccggcggggggtgcctgcggcgccgcctgggtcgccgcgggtgccggttgcccgggtccggacggcgggccctgcccctgcgggggctgcgaaggcggctgcccttggccctggggggccggttgaggcggcggctgctgcccgggatccatggcttctgcctcccccgacgcgcaccccctgacccaggcgagcgagggctacgcccggacgccccggctccacgggccgaggtggagaagcggcgacggctgcgggccgggcggcgctgtcctcgctctcagggccggggggctgcgccgcggccccgcatcccccgccccggcgcctccgcccccgccctgcgccccggctccactggtctggcggctgcgcctcgggaggggctgcgaggcactcggacctgcggcgcctgagaactttttccctccaactcccttgacggaggccggacagctcgttgcctttccccgcctcccctttctctttatttccttttcttgttccttccttcctccctttcttttccctggcggcggctgcgcccgactgagacagaaa

SEQ ID NO: 915796 - DNA, 4001 bp, Homo sapiens
ccttcctgtgtgccaggtgaggtgctgagcaaacatcaccttgctgaatctctccaacagtcctttggggtagggactacattagtcctgttttactgaaaagtacaaataaccagcctgaaatcccatagctggagtctgcaaagccaggtctaaacccagagctccaggctggggagggatacagtccaaatcaagaaacaggaaggtctcaaaagggtgtcctggggacactgaaggcgcattcaggaagctccttactggtcaccctgcactgcctgcctggtgtcttgcaactgccacacatacacaaagcaccaagaacagatgctgactcagtagctgcgcctctcttcccattcatccctcaaggcacaagtcccccccgaccccaccccaccacgttccccagcccaggttggagactcactggggatatagaggtcaggggcgttgaggtcttgccgggggggcagaggagcatcacgactgtactgcacttcccagttctggcagtggcagtggcagcagcggccacatcaggaggggaagaagagaaaagaggagagaagggggttgaggtctgggggccagactcgggcagaatgaggaaggcccaccagctcccttggtaggaagctcacctggtgtgtgtaggggaagaccagcagccctagcttcttggccacgtaggctgtgtccacagcaaaaaaatacttgagtttgctcacagacacaaaacggtgcagctgggaggggagagaggaagctgtgggcaagccgcaccccaggcctcagggtgcccctctgtgtgctccatccctgagggcactgtgaggaatcgggtggaatcccatgatgccccagccctagccaaaaattctgccacccgtgccccgggggcaggccacacctccttgtgcaccatgtccttcccatgggatgcgatggagctgccataggccatagccacattggccattgggtccccaagcaagtggttgacactgaaggccacgtctgctcctgtggctgggtatcccccgggctggctggaataaccaccgcttgtgtcatcgaagaggggagggggatccggggctgcccgggccctgtgcttggagcctgtgggtttggaggtatcagagtagatgacagaaataccaagcatgagcccaaaccaccgccccttccctggctggacagccctgcacgggtcctggaggcaccgatcagtgaggggaccccaagctgggtgagggggagctaactgagaaaaaactgtgatgagggatcctttgcgagaaatccgttgctaaatgtaggcaaagaaagagctgaggcagcgcctagaactggttgcccacttggggtttctgaaggcctctcactggaagtgacctctgaactgagccacagtgagtagaagtgtgctaggtgaaaataactgggagggcatccttccgtgaacaaagctgggagaggcgacagctggctacctggaggccctggacagtgatcagggacctcatcaggttcacaacagtcaaaggagtttctggaggaggaggcggaccccgtttttgcccgactccggcatgggattcccaggactgggccgagagggcgaagtccgggacgtgttggagtgttacgaggggcaggaacccgagtgacacccccgccctgggcggcggtcccagtcgctatctccctcggggtgagcgggccacgccgccgactctccccccgccggccgcgccgcgccccgcccgcgccccacgcaccgtgggctccgtagcccgagtgataagccatggccgcgacgctcgctgtccccgagggcccgctgcgccgcctcgtgggtacgaatactaatgaggcagctgctccgcgcccagggtaccgaccgaggccacccggccgcgcgacacgtcccccaccccgccggtctcggccaccatgtccgtggcgtcatcccccgcgcctgccattggctcttcggcggcgccggctcgcccctcccctctcccaattggccactgacgagctctggcctgagcggattcggcagaaggcaacatccgggtgagggacaggcggagcgacttgcggtgcctgggattggatcacgggcttgccagttcacggtgggaacagccaatagaagagttaagaaagaaggtgggcgagaattatttgcgcgcctgcgcggtgaggcacttgacgcaccctgccacgactacaccagggagtcgagaggtaacctgcagccggagtcaggagcaaagcttccttggtgggacgtactccaggagggaacggggcggtcgagttccaaccaagccctgcccttcggggcgcctgtttctccctctctgggcttgttttcctcccccgtcacctacacttcacccaatcttggaacggagccccggcagacccggaggtggtggtgggaggccggacctatcagtgacagagctgccaagcaagccccaggatgctgactccacccgcctcccactcctcttctccgcgcgggtgctgtccgtcgtccggtgctgaaaatgtcctcccgcctcagccgccatcctgtagactcccgggggcctgcgtatgggaagatttggggtctcgaaccacacgctcctagcgagcgcgtggccgcacgcacacatacacgcatactgcaaaactggggcccagaggatccgaagtctgagagattgggtggtataggtggggcaggatcctgccccgggcctgtcccatagactctcccgtagtccagcagatttgggggcagaggtgtgctgatttgcgtcctgaagctgcagcctaaactcctgagtcatcgccgggcctgtggtcttcttgaagtgaggcccctaagcctcacttgtagtcccgggggttcctttctctccacccaggttctgatcactcccaaccccgcggagacagtcttcaggggcctccctctcacagaccttcagccaccgctttctagagagcatgagcaggttctctgcgacctctctaattagctaccaggtatccagttacaccagatgaccttcctgctccccaaactcagcccacgtggtctgattgcagtgccattgcccagaggtcccctccacctgggatgcccttccccctcatatccacttgtccataagcctagttatctttaagagttagttcatctcgtgcctctcagagggacaaaggggacagagacctgacccggtcaggggtggaggtcataggttgggttctaggccccctctgggtgcacccaatttgccctgcatgtaagttccatgaggacaggccctgttgtcattctccacttccacccttgtcttcccagtgccaagcacaatacttgcatatggaagacacccaataaacatctgtgtccaagaaattcataataaatagataaaaccctggaccagtcctttcctgtgtccacatctcaattacctaatctttaagtgggtaaggatgtttaattgaatggtctttgagttgctctttgcctgaacacacgcacatacaaaaatgaattaacccaccagtattgcagctcattttctgcccatattgtctagtttgggagcaaagccagacccagacacagatgtgaagatctgaggccctggagggctaggaggtagcactggggccacgtgtacctgggagggggtcatctaatgcaagtcagttcccatgtcactgcagggcacaatggatacttgtaaactgaatccaaaacctttctatgtcttttcttttccttctttctttctttatttctttttctccctttctttctgtcttcttcttcttctccttctccttctcattcttcttctccttctaggcagggtctcactttatcacgcagctggagaacagtggtgcaaacacagctcactgcagcctcttactcccagactcaattgatcctcctgtcttagcctcccaag

SEQ ID NO: 915797 - DNA, 4001 bp, Homo sapiens
tggttcactcattctggcccagaataagcacctgcctgtcttcccagcctgtgggccccttggtctttctctctcctagtctttactaactgttgccttagcccttggttaaagacttaggcagaaaatacattttcttcaggcaatctgacagctggagccaatgggaaatgggtagcatgtcagaggagcctgattcctgggctgggcagggctgtgtggtagggtgagagcaacggccacaacgaacagcagaagggggactcttatttttaacagctgtgctttggggcacaaggcagaaaatgtttctttctaccttctcccaggggcagggacaaacagcagtgactctgtgggtgactgaagatgaagtaattgctgggttctgattaggaatagaggaagattgccttctgcccacgcgccagcctccgagtggctgaaggtgctggaggcagaggataagaagggaggtggcccctgttggctccgataagcaggtgagctgctgctttctccttcatagggcttcccagcccactgtgggtggttagcctaagtctggttcagagatgccagctgggcactctggcaatgctagagcactaagcagagaagaggcagtgttggctctggttagccagggcatacaggctctcctcgtcctgtcctccgcagtggccacaggcacccagctgttccactctctctgaaggccgccaggcagtctctccgcaaaacctccatagagactatcttcagtttcaggtcctctcctccgggctgggtcccaggaagacaccttgggctgagttcagggtgacattgggctccggctgcaggaaacgggccctccttgccaagagaccacctttcagtctctgcttcacaggtttgccttcaactttgccagcgagttcccctctgacatgcaccaccttgaaacaccttcttcaaggggcatggagaatggggcagcttgggtccccaatcctgagctccttctccagcctccggccgtcacgcctccctccctctcccctaattcccagtcaagccaaggaaaggctgcacagaaggccagagaatcacaaaggggagtaggggtcattttttcacccatctcggatcacagggagaagcaagttgggcaaatgactggagaaaaaacaaaggcaagccgagtgctggggagagatgttcccctgaagtgagacggggctggaccgtaggagaaaggggagagggagggctggcgggggcaactgacagctgacagcagaggcgccgaggcggaggctggaggaaccaggtgcgaatctcgtgcttctcaggggggaaaagaaaaggggggggacacctgctcacaatggattttctcatctgctctgaggttttggcaccccccaggctggtattctcagtatggtatggtccaaataattagcagcaccgccagctcccagggcaggctttgggggtctgcaccagcagcaaaacaataaacagtgatgcctgatgctgcagccaaagttgccgggaaataagtgcgggaatcgtcagagcttggagagggatggaggaaccgagagagaggagcggaggcagcggggagggggaagggaggacaaagggtggatgaataatgcttttgcaaaggggagaaagcaacacgcagcaggaggaggaaatttgcaaagagaaaaaaattcatttggagaagggctgccccctcaccttgaggtctgctccagagatctccgtctatctctctctctctctctcaatctctcaatctctctgctcactcttctctcttctctttccgctccttcaattgggaaggggatgggggtgggtggggggagggtagttgggggctcaagactggggctgcaaagctggccagctgctgggggggcagaggttgtctctcgttctgtacctcggtctgtgggtgaatgtggctgtgtgttgtggaactgcatcataacactgtgagtcatccatcccccccaccccccctcacctcccacgtcagagcagggctgggagacacaggaggcgggtcggaaggaagggagggggtaggcatcaagggacggggctagaggagtgggggccgagggacaaggcggcgatggtgggcaaggggagaggcaggttgttaaggaggaaggcagtggggccaaggagatacgaagaacctgggggaaggacagggctgggcaaggatgcagtgagggtggcagggctggaggaaaggaggtggcaaggctggtgaaggaagagatggatgcagagtgagggagcacacacacatttaagatgatacactttcccatttcagcttggacaccagccctgaagcagggaaaagacagatgtactaattgtcatggatggcaaactgtgcccccaaacttgtaccaagcctcaaagccttggtttaatactcctgaaggagtaatagacccaatgtgacattttgcatgcaggaaccccttaacagctacctccatattatgcgtgcttcatgaatggagacacctacgttatatgaagttctctattgggctgtaaacttcctgagacaggccttctgggaaattactctctacatcccaggactgcaatgtccagtgcagacccgtgcatttagatgtttccaaaatagcagttgtttccgcggcattatgttctgctggcctagaggtcttagttccagagggaggaatgctgccaccaagagacacaacaatgattccattaaactggaagttaagattgccacctggccactttgggctcttcttacttttaagccaacttgctaagaagggagttacagtgtttgacccagactatcaagatgaaatcagtctactactccacaatggcggtaaggaagtatgcgtggaatacaggagatcacgtagggcgtctcttaatattaccatgccctgtgattaaggtcaatgggaaactgcaacagcccaatccaggcaggatgacaaatggcccagacccttcaggaatgaaggtttgggtcactccaccaggtaaaaaaaacataatctgctgaggtgcttgctgaaggcaaacggaattcagaatgggtagtcaaagaaggtagtcatcaatacgaactatgaccatgtgaccagctgcagaaaatgaggactgtaattgtcatgagtatttcctcctccttttgttaggaacatgtttgtgcatatatacacttgtattaagaaaatatcttcattttatttcctttcttttgcctttatcatgtgacataagacttactgacttgatatcagcacttaagtgttgttaactctatgtaatagcatttgggttggggattggtgcgtttccggttgtacaaaggatagctgtattatgttaagcgtaattatgaccttattattgtctttatttgaagatcatgtatgatttcaggagacgtgtatgggttcaagttgacaaggggtggactggtgatggttaatattgtcaactagattggattgaaagatgcaaagtattgttcctgggtgtgtctgtgagggtattgccaaaggcgattaacatttgagtcaatggactaggaaaggcagacccacctcaatctggatgggcacaatgtaatcaactgtcagctaggccagaataaaagcagacagaagaacgtggaaagaccagactggtttagcctctgagcctacgtctttctcccatgctggacgcttcctgccctcgaatattgaactccaaggtcttcaactttgggattcggactggcttccttgcccctcagcttgcaggcagcctactgtgggacctcatctggtgatcatctgagtcaatattccgtaataactctgatttatatatacatctatcctattagttctatcccgctagagaactctgattaatagagcagttgagttgcatcttcagacatgaaccaagtgtctggctttggt

SEQ ID NO: 915798 - DNA, 4001 bp, Homo sapiens
aagttttgtattctcatgttagatcttgagtcaaaatggttctcctattaaggggtagaggataagatacctgaaataaggtgttctcctttctgtaatccctctctccaccttggcagcttgaaatgcactcttcaaaagaataaaattaagggatggggtgggaaggggagtaaccaaaagcctagaatgagaaaaattaaaattagatacagtaacaagcagaactaactataaacccgtaagatgggtttattctttctggatctaagcagtgaaaatgattctttactgcaatgcagatcttggactgaaagagaagacgcctagcatagtaaaaattctaacattttcatcctgttcaatatcttggcaatttagatgctttgagatgttcccccacctactgacttcatagaaacatgttaaaacaacaccaccaccacactttctagaacttgaaactaagcctaatttttaaaagtacaacctcatcaatgtctctaaaactaggtcttgaatctaaaatggaattatacatagaactattacatgaagcagttctttcactacaatcatttttagccccccagtgaccaatctcctcaggtaaacaatgtctaatgactgatgattgtttactgtatgccaattactgctaaatccctcatatagattatctcatctatgaagacacaaggattattaataaccccactttagagataaacagacacaggttaacacatctcgctaacacctcttgtaagtgaaaaaccaagttcagagcccaaaaagtttgactgcatagcccatgtgtctagccattacttgggtgttcctgaatacttttaattccccaactactaaaaaatctcgttactaggagttgggttatgcagcgaaacggatgaacaatggattataactgccagaaagtcgagggtctcatactagcaacagcataaagccctgcttcttattgggagcaaaaaagcagattctccttccacagtctccttttggattttgcaacggagaactctgtggagctgctggttcacgtaaaagatcaggatccctctcgttgccagaggacacagaagagtaggaagcttttgttttcagaaagaaggtcctcaaccccacctcttcgaaggtgtttccccgaatttctcgaggacaaagaatctggactcctttgagagtaaagtttcctttccactccctgaagagcggggaaaacttccgtctttagtctccttccggttaaactgacaagtatcacaatcctttctcccctatcttcgggcggttccggctgggaacaataccctcagggtcaggaggacaggatctgagtgcaggccagccaaaaaggtgggaacagatgctccttccaacacctaaatgcttttttaaacggtcacctggatgtgcagccagggccaactatccctcagctcctccctgtcacaggtgcgcgctgcccacagattgccacgactggggggctccctaccagtcgcagcccaccctcgcctcaggtcttctctcgcgtccccgggcggccgcctgcgctaacgaccacatgaaaacgtctcagcacccaacaccatctctctatttcatctccatcagcgatggagagaacggattttgccgcggctgggctgcacagcagcgccgcggtccacagcagagcccgcgaccgccatcttaggcagttccaggaagcggccatttcagagcgcaccgcttagccgcggcggcggctctgcttctcaccttcaccgaggcctgaacagggtcaacagccagtcgtcgtggactggagggggaggggagagagggaggggaatgaaaaacaaaacagagaggaaagaaggattcggggacagggtgatgctctcagctcagggatatcgcctaggccatctccatagagatccgattcgcggctggcgcggtcgccggtctgaagataaatttagcactctagagcacccgaaccctacaatcttcacgagcgactctgccgccgcccaatcagcgccagatttgcgtcccgccaccaatccgcgctgagcagcggggcgggaccaaaggaaaggaccaagctcggttgaggcgcggcccagccgcagccgcagtcacagcctcagccgcagcggccgtgctacctaggtgatagcggagcggctgggtaggaagcaattgttctcaaacttcactagccccgtcggcgcggacgcttgtcgagaatgcagattcctgggtactgccagatacggttggtgatcttgtagggctggagtggaagccatgaatctgcattttcatcatttctggccctctgcccgggctggggtgattcacggggattcgtagtggccccaaaggagcacgcagaacctcggctgctgtgcatttatcacctcttttgttcccggaggccgcaccccaggtccagtttacacagctgccaactccttttcttggttcccactggaatctaggaagaaaactcgccctttacttctccgccccacacccgacgacggagtgtctagaggtctggtcggccttggctgtgcggagggctaggcctgacgagcgggcgctgatgcggcgcagaccccgccggacctcttggtcggcccggggtaggctggggagccgcgggaacaggactggatagggaaagcggcaccgcagcgtccacgggcaagctgaaagtccgcttgatgtctttgcatcacagtggcgccctccccgcaggaacgcccggccgcctgcaccgaacgtttgcctgcagggaacggccaacccgccctgaaatactctttttgtgggctgcagctttcgggtattttaagccatggttctgtgcccttccttgttttcaaaaacaccacagccaaaggctgcgggttgtgtgctttcattttgtgttaagttctgtggtggagacctggagtctgtttttccaaataggcaccttgaaatagatacgcttcttaagcggggaaagtacgagtaggtcctattatttgcaatgttttagcctttccagactccgtacaaatgactaaatgaagattggatcgtattttcaggcactgcaccaatgatagaaaattctcaacttggggtcaaaagcaagggcagctttcgtttttcttaaatatgcttctgatcaaatatctaaagtgttgaaagaaacctaacccttaatagcacaatttacaggagtgcataatttcctaggactgacatttagttccaaatgttttaaagtcaattacaacatcatctcaccctatagtaagctgtccatatattctcattattatttttaaattatttctattaaatcagcttcatttgaactttaaccataaatgcataaatcgtttttgggaagggggtacagtcgcgcttgaagagcaagggattttgtcattgcgggagttgtctggcttcagaataatattggaataatatattttcgtgtttcatattttagaaaaaccttttacatatgtgctcccaaaccaatctttttttattttttattttttttattattatactttaagttctagggtgcacaacttgcaggtttgttacatatgtatacatgtgccatgttggtgtgctgcactcgttaactcgtcatttacattaggtatatctcctagggctatccctcccccctccccccaccccacgacaggccctggtgtgtgatgttccccaccctgtgtccaggtgttctcattgttctattcccacctatgagtgagaacatgtgtttgattttcctgtccttgccatgggctcccaaaccaatctttacacatcttgtttacatcttcatgaagagggaaaacccaaaatattaaactgttaggcagaatagtgtttaaataagtacatctaaagtttaggaattaggtcctgatatgatttgactctgtgtccctacccaaatctta

SEQ ID NO: 915799 - DNA, 4001 bp, Homo sapiens
ccaaggcctgtccccatccctaggtactaacaggaacacacacaacccacacactaacttgggtcatttctacccacggaagcctcaaagttattgtatgtataatataaaatctgaactgtgtgtatgtacaccagccagagacagacagaaagagtgtgtggggcagggcgcggtggctcacgcctctaatcccagcactttgggaggcccaggcaggcggatcacctgaggtcgggagttcgagaccagcctgaccaacatggagaagccccgtctctacaaaaaatacaaaattagccaggcgcggtggcacccgcctgtaatcccagctactcgggaggctgaggcaggagaatcacttgaaaccgggaggcggaggttgccgtgagccgagattgtgccactgcactccagcctgggcaacaggagcaaaactccgtctcagaaaaaaaaaaaaaagtgtgtgtgtgtttacacacacacacttacgtaaggtgtcgtacctaccctcctgcccacaactgcccggtggacaggaggatctaaaaaacgaagaaggatgggtcattaaggtatggagagagaccatagttaaatatggtcccctacagccaggagtgctcatgctgggctgggtgtgtgaactccacgtgtgtcccacaggctccaaggagtctgcaagtcctgtgaccaggggcagcaagggatgctggacatggctcagaggcgctggaagtgatattggcaccagcacctgtggtgtgagttacaaccagtacgaagggaagacagggctgggaaacaaaggcctctcccagagcctgttcgggatcaataagagggctcctagactccaaacctcgcttacaggagtgttagaaagaccgcgcaggcccaggaccctccccgtgtctgtcttacagcgaccaatattgcagtgaatgcactgagagcaaggaacagcaaggtctctccctcactcttcgaacactgcttgcttgcctccacccccagaaggagctctatcagttcaggagccaccaagctcacgcagaaaggattcacaggacggctggtcaagacatttttgctgcccgccccggggtggggacggaggccgtcaaggttgggatgagcattcagccgagccgagccaccgcgtgctttcccgcagacatcggggtttctgagaactaggagggaacagccaaaagaatggaagcttggcgccctgaaacaagccttttgggtcctgagggaaatctgggcgcccacgggcagccgtctcccccacccgccgctcggcgcccgcgatccggctggcgctggctgcagcgtccagccaggcggcgcggggaagagccggcgataacccgcccgagctccggggatcgaccgcgctctcacacccccccagttcccagcgacccccaccgagacttggagacgacttcagcaaacttggggaagcaacttttcccgaggagctagactcctgaaagaaggagagctgagctagggacgagggaaagcgaaagagacggggaggaacggcgacagtccgggcgggctggactccgcggcgagagcggcaggggaggcggacccgccccgcggcgaaggggaagcacaaaagccccgcagcgagttgtgggaggaaaggcgagaaggggtctgcccgccctccctctccgacccagggccgtgaccccctgggagcgaccggctgggtcccaggcctctggccagcggcgccagcggccagcgcgcccggcccaagcacggtgcgagcgtctcggggaggcggcgagcgagtcggtgcggagcgctccgtgcgtccgggtggttccgcgggccggcgggaccgtgcgcatttcaagcgcgtgcgggagtgtgcgaggcgctgtgcgagctagcggcgggcgcgccagggtgggaaaggcatcccgaacgcatcaggtgcagagaccggcacccaccgagagcggccgggagcgcacggcgagctccggtgtcaccgccggtcccgccgagagccgaggagggcccgcagcgctgcagaccctctggagcttccctccctcccctgcaaaaggggggtggggatcaagtccaatcaagaaaaagcccaccacgttttctcaaagagaaacaaaacgtaagcagtcccagtcctgctcccctccgcccccagatctactcgtcagctcctccgattctagcttcccagccggccggcgaataaacacacaaataaataaaccacaaccttatcttgcgcccgcgcaccggtccgcatacataagagcacccacgggctctgttgctccgccagcccctggcggtacaaagcctccggatccccgacccctctgctcacgccctcagcccccgcacaccgctacgccccccacctctcaccccgaccgtgccctgaagaggaagggctggggaggcagctgcgcccaggctgacagccggggctcccccttctagccgacccccaaccggtggcggcgacggctgcagcggcaggaagggaacacgccaaataaaaaaggcacaagcccagcggccgagtggccgaagcgagcgcgcgccccccagacctctccagccccgggaagccccggcgcgcggcgctcgctgggcggtgcgcctcttcccggcccctcactcaccgcagccgagccgggcactgtggggtgggtgtgcgtgcctgtcggggggtgtgtgcctgtgtcggggaggggtgttgctggggaactgttgctctccgtatcacggcggcagcgacagcatcgcccggcagttcgcagtacccgctctcatcgccctcaactcctctctgctgcgaggttagcaaatcaccaccggctgctgcgcctccgccgcgtcccacgtcaacgccgagccccctcccctgcaaggccccggcgcctctccatctttagtgctggcggccgagcccggctccctgcccacagctgccccccttccctcccccctcccgcgccgtccccgggctcagcccgcccaccaccccgcactggccgagcccgcgcgcgctccccgccccacccctcctttcccctcccctcccttcccctcccttccccgcgctccgcgctccgggcttcgcctgacatctagctgctgctggggcgccggcggccgcctctcaccggccgagcggagaggaaggaaggagccagaggacaggagtgcatggggactcagaatccttaataggggaactgagggtgaagggcgcgcagcagcccccacctactcccaagattttaatttgcactggatacgggttttgtccccccctccccgcaccccggtgctcaagcacgcagttttgtctcctcttccaatgtttgccccaattcagtgcgtgtcatctcgcctttaacttttttctcatggctcggggctgcagtccccctgacatctgttttaaaaggccgctttcctagcccaaacccggccctctcatcctcctggttactgcgcgcctcccggcttgagcatccggatttcaataagtctcccgaggcagagttcgcgggcgctagtgaaccaggtgccagaaggtccgcggggatctattgtcgaagcgagacacccgtttttagctgtcgcgattgctggaggccaaggtcgagtcctgggagaaacttttctctctcccaaaccttggacagcctctcggctctgccctcatcctacccccccgccccccagcaatctgggtggaaacagttcccgagaactgcgcccagctcagtgcacagtcttcagggggcagggggaagcttggacaacctctgggcccctcaaaagtgtgtcctccttcagctggccgccctacttcagagggtagagcagccaaagaaaatgtactcttcctctgactgcagaaagctgccctctccccttttccctggagctgagcgaaggtagggtgccagaggcgggaagcgctcttc

SEQ ID NO: 915800 - DNA, 4001 bp, Homo sapiens
caaacctcgcttacaggagtgttagaaagaccgcgcaggcccaggaccctccccgtgtctgtcttacagcgaccaatattgcagtgaatgcactgagagcaaggaacagcaaggtctctccctcactcttcgaacactgcttgcttgcctccacccccagaaggagctctatcagttcaggagccaccaagctcacgcagaaaggattcacaggacggctggtcaagacatttttgctgcccgccccggggtggggacggaggccgtcaaggttgggatgagcattcagccgagccgagccaccgcgtgctttcccgcagacatcggggtttctgagaactaggagggaacagccaaaagaatggaagcttggcgccctgaaacaagccttttgggtcctgagggaaatctgggcgcccacgggcagccgtctcccccacccgccgctcggcgcccgcgatccggctggcgctggctgcagcgtccagccaggcggcgcggggaagagccggcgataacccgcccgagctccggggatcgaccgcgctctcacacccccccagttcccagcgacccccaccgagacttggagacgacttcagcaaacttggggaagcaacttttcccgaggagctagactcctgaaagaaggagagctgagctagggacgagggaaagcgaaagagacggggaggaacggcgacagtccgggcgggctggactccgcggcgagagcggcaggggaggcggacccgccccgcggcgaaggggaagcacaaaagccccgcagcgagttgtgggaggaaaggcgagaaggggtctgcccgccctccctctccgacccagggccgtgaccccctgggagcgaccggctgggtcccaggcctctggccagcggcgccagcggccagcgcgcccggcccaagcacggtgcgagcgtctcggggaggcggcgagcgagtcggtgcggagcgctccgtgcgtccgggtggttccgcgggccggcgggaccgtgcgcatttcaagcgcgtgcgggagtgtgcgaggcgctgtgcgagctagcggcgggcgcgccagggtgggaaaggcatcccgaacgcatcaggtgcagagaccggcacccaccgagagcggccgggagcgcacggcgagctccggtgtcaccgccggtcccgccgagagccgaggagggcccgcagcgctgcagaccctctggagcttccctccctcccctgcaaaaggggggtggggatcaagtccaatcaagaaaaagcccaccacgttttctcaaagagaaacaaaacgtaagcagtcccagtcctgctcccctccgcccccagatctactcgtcagctcctccgattctagcttcccagccggccggcgaataaacacacaaataaataaaccacaaccttatcttgcgcccgcgcaccggtccgcatacataagagcacccacgggctctgttgctccgccagcccctggcggtacaaagcctccggatccccgacccctctgctcacgccctcagcccccgcacaccgctacgccccccacctctcaccccgaccgtgccctgaagaggaagggctggggaggcagctgcgcccaggctgacagccggggctcccccttctagccgacccccaaccggtggcggcgacggctgcagcggcaggaagggaacacgccaaataaaaaaggcacaagcccagcggccgagtggccgaagcgagcgcgcgccccccagacctctccagccccgggaagccccggcgcgcggcgctcgctgggcggtgcgcctcttcccggcccctcactcaccgcagccgagccgggcactgtggggtgggtgtgcgtgcctgtcggggggtgtgtgcctgtgtcggggaggggtgttgctggggaactgttgctctccgtatcacggcggcagcgacagcatcgcccggcagttcgcagtacccgctctcatcgccctcaactcctctctgctgcgaggttagcaaatcaccaccggctgctgcgcctccgccgcgtcccacgtcaacgccgagccccctcccctgcaaggccccggcgcctctccatctttagtgctggcggccgagcccggctccctgcccacagctgccccccttccctcccccctcccgcgccgtccccgggctcagcccgcccaccaccccgcactggccgagcccgcgcgcgctccccgccccacccctcctttcccctcccctcccttcccctcccttccccgcgctccgcgctccgggcttcgcctgacatctagctgctgctggggcgccggcggccgcctctcaccggccgagcggagaggaaggaaggagccagaggacaggagtgcatggggactcagaatccttaataggggaactgagggtgaagggcgcgcagcagcccccacctactcccaagattttaatttgcactggatacgggttttgtccccccctccccgcaccccggtgctcaagcacgcagttttgtctcctcttccaatgtttgccccaattcagtgcgtgtcatctcgcctttaacttttttctcatggctcggggctgcagtccccctgacatctgttttaaaaggccgctttcctagcccaaacccggccctctcatcctcctggttactgcgcgcctcccggcttgagcatccggatttcaataagtctcccgaggcagagttcgcgggcgctagtgaaccaggtgccagaaggtccgcggggatctattgtcgaagcgagacacccgtttttagctgtcgcgattgctggaggccaaggtcgagtcctgggagaaacttttctctctcccaaaccttggacagcctctcggctctgccctcatcctacccccccgccccccagcaatctgggtggaaacagttcccgagaactgcgcccagctcagtgcacagtcttcagggggcagggggaagcttggacaacctctgggcccctcaaaagtgtgtcctccttcagctggccgccctacttcagagggtagagcagccaaagaaaatgtactcttcctctgactgcagaaagctgccctctccccttttccctggagctgagcgaaggtagggtgccagaggcgggaagcgctcttcgggcacgggctgtggattctgaccgaagcccaggaggttggggtgggaggtgggggtggccgagagcgccatccagggttctcaggccagtcagccctcgaggtcacgcggttttagcaatgcggagcttatgtcaccaaggcctgagtctgcatgttctgtccgtgactcacgggtgggccagaggttttccgcaggactcacctagaatcacacctccatgcgtgcctctggcactgccccagacccagtcccatgaactgtagggtcatggaaggtggcagaaatctgtatctgttcgctgaaggccaggcggtagagtttacacatcggaactgatccgggttcacaagagccgctcatgaggcagccccaaagacgggtcattccatcccagcaagagccactcctgactcttaagagcagggaaagctcagcccagcaggagtctgcggagagagctgggcaggggaacacacttgagtgaaggaagggctcctctgatagcacgggatacaaccacatcaaacccagggcaagcggaggggaagcccagtccctgggtattcatttcattaacaataaagagcaatcccatttagagactacctgtttttctaactaaggtctatacaccctgttagaggaaagggatttaaagaaagttaggaaagaactgggctgcaaggagagcaagagtggagggatgtaaggagaggagaaaagaccctcctggtgcctcaccagggaaacagaagaaagaatcactacacttgttgagcttctgcctagatagtgcctgctggaggtttccgctttgctgtccacatccacctaccagcctctcctcagtgcag

SEQ ID NO: 915801 - DNA, 4001 bp, Homo sapiens
gcacccctagaaggggtcccacttctggatctggtttgctgcgtttggccaggtcctcattgtgagccttgcggatgtggcggtagaggtcccctgactgcgtgtagctccgcaggcagtagcggcactcatagggtcgctcacgtgtgtgcaccgtggcatgtcgccgtagtgtgtaagagcatgagaaggtcttcccacatgtcttgcaggtgggaacatcctcagtaaaaaccccaaagcttcctggagctgcttcgtactcagaagacaggtaaagtggctcatgcagggatgcgggtgcaggcagaggtgaggtcaccagtcctcgatgatactgccctgcacctggcagcagatggtagggtagatgagggtctgttggcaggaagtggtcacttggccccacctcctccagtcctgctgcccctgggtcttcaaaagcctctggctgggagggctgtgccccatacactgctcctccagatgggaaagctctctcaggaccctgaggctgttcatctgacacatcagtctcttcatcagagatcacaatagcttcaactttcacctggaccagctcagcttcagctggggctggagcctgggatggaactggagctgagacaggggctggggctgacgttggggctgaggctgggggatagaagccttgcagtggtcctccaggatcctttggttccaccaccctcagactctcaggacccacatcaagagatggcagtggctccaatgaaactgctgagatgccagaagagaagtagtttgtaggaatggtctcagtggagctactagggctggcaagagagacatcagccactggtggatgaggtgcccgcagatgtggtgcgtcaacctccatgccaggctgtgtagtgtcagccccactagacattggtggctcatctggaggacggacagtaggtgagggagcagcagagcctttccattcccctttgccccagtggcctgatgtctcagcagatgccaacgaaggttgggtgccacgggaagtactagacaaaaactccaaactaggaagctgtgagttggtttcctcctccttcttggtactgtctgcctctgccagggcccgggcttgaagccgccgcttacacaccttgacgatgtcattcatgtgcaagtagctggcagctgccagcacatcctccacaggggtatcccctctcagggtcagctggccagcatacataaagtccagaagcagcccaaaggctggggctgtgacaatttcattgtgaatacacaccagatccctcttgtccaattcccgctccttgtagaaaagctggaagaatgggctgcaggaggccagcacagcccgatgggccaagaactgggtactacccaccatcacggtgcagtcacaaaggaaaccctgggaccgctgctcccggaggctctgcagcagctgctgactgtgttctgggaactccatagtaccccacgaaggaaagggggcccaaaaaaggtccccaccagtggctccctgagaaaaaagggcagtgagttaagacaggtaacctccccagcaaccttatcagcccttaactatcacttgccactccaaaacaatcgcttaagttactgcccttctttctcctaggtcacacccaaagctctcccattagctccgcccacctcggcctaaccttagaacaggccccacccccgtccgataagccctgcccccggaagtcccgccccttagccaccctccgcttccttgatgcccacccggtagcgtccaacggctccacgaagtagagatctttttcgctcccaggccttgccaggcgatgcctctacgccccacttcgagaactccctaagcatctccctcacgcattccaggggctaaggactaccagggtgggaactagcggagaaagctgatacctcacccaccaccgagcagccacagggcgagctccgccccttcccaccttctcagctttaattggcttaagattgccctcccctgtcacggattggtccgctctccactaaccatcctccctctaactgccgtctacaattgggtgctcgccgccatcgcttttgcagtcaggcgttggattgggtgacgctcctgtcctcaacttttcctcttcgtcccgccttccttgcctccgagccctcaggattggctgagcttctccttctacctaatccagcaggcaggaggtacccggctccgagtcgctgaacgcggcgctctcctggcgaggctggaggtcgggaaccctgcagtgtcggacccgagctgacagcaagccactcccgctacaggctgacagggaaaaagagaaccaactaggccaggcgcagtgcttcacgcctgtaatcccaggactctgggaggccgaggagggcggatcacttggggtcaggagttcgataccagcctggccaacatgctgaaaccccgtctctactaaaaatacaaaaattagcaggtcttgggggcgcgcgcctgtaatcccagctactggggaggctgaagcaggagaatcacttgaacccgggaggcggaggttgcagtgagtcaagatcgtgccactgcactccagcctgggcgacagagtaagaccctatccccccacccccccaaaaaaagagaaccaactggtgactgtgggcaatagccccacgtccctgaactgcgtttgtctcttgaaggtcccttcctctcaaaaattctaagatttgccgggttcggtggctcacgcctttaatcccagcagtttgggaggctgagacgggcagatcacttgaggtccggagttcaagagcagcctggccaacatagtgaaaccccatctctactaaaaatacaaaaatcagctgggcatggtggcgcgtgcctgaaatcccagcttctagggaggctgaggcaggagaatctcttgaacccaggaggcagaggttgcagtgagccaagatagcgccactgcactccagcctgggagacagagcaaaactccatctaaaacaaacaaacaaaaaaacattttaagatgccctactgctccactcctccaagctaagtttccggggctcccggctcagtgatggcatgaaagaactagcagctacagggatgatgtcgtggtgtccctagcctggactctacagtcaatttacagtgagaggatagagtgttctttgtttccagagcgtgctgagcaggtgctggtaggaagggtaagaatggggtcaggatcataaaatgtcccaggacaggagagaagaagcaaaaaccgtgtctactgaagaaatctttgagagtctctacacacccagaggaaaaggctataagttgggagtcactgataactgccccgtctgacccaggtagtgttactagaggagtaaactcggtgccctaatcctcactccttcacccaccaccctaagcatctctactttattctgcagtcaggccctccgatcagacctaaccagaattagggagagttcatctatacaacaaacttgtgctacatacattcaggatatgttggccttagcttgagatcatgcctcttcaagacactgtgttcattcttacaagccatacaatatttactgtataggaattaaaactaagaaatgggccgggcacagtggctcatgcctgtaatcccagcactttgggagtccgaggcaggtggatcacctgaggtcgagagttcgagaccagcctgaccaacatggagaaaccctgtctctattaaaagtacaaaaattagcagggtgtggtggcgcatgtctgtaatctcagctacttgggaggctgagacgggagaatcacttgaacttggggggcggaggttgtagtgagccgagatcgtgccgttgcactccagcctgggcaacaagagtgaaattccatctcaaaaaaaaaaagaataaataaataataataataaaaatataaaaattagcttggcacc

SEQ ID NO: 915802 - DNA, 4001 bp, Homo sapiens
caccaaatgcaatcaatgcatgaatcttgactgactacaactgggggcagaaccctcaaagacactttggaacaactgaggaattttgaagatggagttgttaattttgataggcattaataatgatactggggttagtaggagaatgtccctatttttaggaaacacatgccgaaatatttgaggattacagtgtttgcagcttactttcaaataattacacacatacagagaaagacaggaaacaatatggcaaaaatgctaatcactgagttggttattcattgcattgattagcatttttattcattgcatgaataaccgatcacaattgtatagaacgaacctctatacgactaaaatttttcataacaaagttaataaaattgtacttctattgagaagtacggtagaaagtacacgaaagtacatctatactggaattatatttgggttgaaatctaaactatcttactagttgtgtgccctaaggcaagttgtaattcttcgtatcactaagtttgtcacttctataaaattcaagtaataatatctgcatcattaggttgttctgagaattaaataattacaaatgcaaaaatgccaagcagtactgcacaaaatgaataatctggttttcataattaatcagtacattactaataatcctaaaatacaaaactaaaggactacgttcattatattcacattctatgataaggggaaactacattaggtaaaattattattaatccactgacagtccaagtgaagtaatgggggaaatgaagatttatacagtattttttaaacccaagaattccaactgaacacctagagaaaaggaaatcaaaatcgtgcagcttgcttccggtatcagccgatctccaaataaagcattaagaaaataagtggaagttatggagaatttcttcctgacttcaagagattatctacttacacgctgaaaaagaaattaagtttttgtcttcatttttgtaagttccaaaaaaaagcacacaattacggggttttattgtaaattctgcttggattcatagaactcacatggacgcaatttccttttaatcagttctaacgtacctgtcatttctcgaggtaacccctttttctgattaggccagcaataaaacgactagatgcagagtgatcctcaggaaggaaaggaaaagaggtgtgtgtgtgtgtgtatgtgtgtgtgtgtttgtgtgtgtgtatatatatatatatatatttttttaaagaagtgccatctttttctttctgtaccagagaaaaagcagaaggggaaaggaggaaaaaaaacaggtctgagcctcccgggttcgaccaggtgagaggtggcaacactccggccgctccgggttagggtgttgggcaaatgggcgtgcaaaggacgggcagctccctggaaggtcggggtaactgctccgggaccgcggggcccaaggccggtctcctcccagaaggattaaatgccaccgaggggatcccgtggggtgtctcccggcgcggactaggctgacagacccggctctccgctcccttcggcgccaggtgggggccacgcggtgtcagccacgggcagcgtgcaggggccgtcccccgcgcgaccggagcccgccctcccctccccgttacctgcgggcggcggcgccgggcccggaggcctgctgctcctcctccttctcccgccaggctggggcggcgaggcggcggcggcggcggcccggggggagggggcggagcgcggctcgctgcctctctcctcccccgggaggctcaggggcccctatctcgggccgccgcgcctaggcccgtgagcagcctgtggtggggcatggcggcacagccaccggcgtgcccgcgagtgggagtgcgaggaggcggggagggaagcacccccagcgctcggaggggccagaggggaggagcgagggggcccgggagccgcgcgctggcgaccgttggggacggttggccgagggcaggcggttgtttggggagcgcggcgacggctcgcgtgttcccagcggggcggggtggggaaggggaaggggactgaggggaggggagggggaggttgggagggagccgccgccgcgcgcgtgcggccggcgccgccgccgttgccgctccgctcactccagcctgtttgggggcactttgtttgtgtcccacaatgctctgcgccggcggcctggctggggaaggggaggagaagggggcggggcggagcgcgctcgggggcggggctcggggcggggaaggaaacgtgatgattgcgcaagcgcagaaaatgggccctcttggccgtcgggacttgtactgttggtgactccgtctccttagacggtggagcctgcgtgacccagaaaggccgtgagtcttgacactgtatttttgcatatgtgcgcacatgtgccgatttacattcacatgccccataagccctgtcccatttgtccttcctctaagccgtcctcttacccagttcccctctcacacctgagaagcatttctccgcaggagtcacatttatagcattatttttttcttcgaactaaaaacataactcctattttctcgggtagtttttgtagggaggtcgaaatagaaacacttcagcccctcttcggcgagggaggttagttggtaaggtgcccattgttcacccatggaaacaggcctgccaagggccgccccgcagacaggtgagcccgcgcccccgtcctgggcggactgcgacatgcggcgggtgtctggattgcgtggctcctcgggcctcctcgcagtgcttgctctcttccgttctagcacttgcctcggtgacctggcaggacgtgcggttcttgagatgagtggagaaacggactcccaggtccctctcgttcttccaacacagggacagctagagctgctccaaaaatataccctacttcttccacaaccgtgaatctgtcatttttactgcaccatcacttacttcctggccttcccggaggaagtgtgcgggcctccccgaagtaaccggtaccgcccggggggttttgaagttcttggtcaactgcaaaatcaatcaacctagttaactcctagggccctaagtcttggcttcccctggccaggcgggcgagcgctctccacaccgcccccggaggtcataggggttcccgggactgcaggcggcagcgccccaggtgcctgggggcgggcggggtgcgggcaggtgctccttgggcgctttctgttttcccacgcctccagtttgcaaaccgaaagacttctttccagagggttttgtgcaaggtgggtggacgtcccgctgaagtagagtggattttccttttgaaacacttggcaacatctcacattaattcactctgagagacaagcagccaagcacctgaacaccctgacacttgcaatcttctttaggaataaaggcaataaaaacaacttctgtttttatagtccttcgcagtttccaacaagttttcaagcatgtataatgttatctaatccttacggcaactgtaattcacaggttttatcacaggtttctattattattcccactatcattcttattattcccatttcagagatgagaaaaatcagaaagatgcgaactaggcccagaaacttttgcactaagttttgaagaggggaagggaaagaaggcggaatgcttacctgggagaggactggcggccacagagcagggctcaggaaagggcatgagctggggccctggtgaggaatgtgtgagaatgtatgtaggtggtaagcaactggacaagaatcagggtggaaatgaagtagtcaaatcctatctacctctcctagtgcctttaacaggatagtcaataaaagaccatgaggcaagtcttttctaagtgcttctccaggggctgtggtggcagctcctcaactactacactgacacaaaaatttgctttcctttgtagtacaacttg

SEQ ID NO: 915803 - DNA, 4001 bp, Homo sapiens
gatagtaattaaaattaatgtagcaaccactgtggtctgctagaatgaagacctagttgtagaatgagaaaaatgttttaaacataaaatttctattaacaacttgggatccgattttgcagacgttggtaacccatgaaaacctagctccagagaagcccataatataaaatagggtatttttatatagtctggtcattaaaacaaaaatttagtaaaaggaagtgactaataaaaactctcatcagtatagaaacattccaagtttctgtttcctatcctttaatatttcccattatactaaaatagttccgttagacttcccttattaaataaaggctaaaaaatgccagtcactttgttgttgtttatttaaaagttcattttactttggttataatgtttaagtacttttatggtgaccaaatactagaagtagaatcttgtaacttactttgaaagtaagatagactctttcatgtaaaaatattaaaacattttgaactatgggtacatagtcaacaggccattctatttttatggtaccatccagtagacagatttaggtaactggaaataagcatgccaaattgttgaagaaaacaggtgaacagggggtcaagtccgaaataggcatcttcctgggcttatcacactaagattaattttaccaatgtttgatgaagctatcatgtagtcaaacacagagaaccctaaacttaagaaactgctactaaaattaattgtacatgtgattaaatgaatggaagtcataccctctaaatcctaagtccattaagacaaaaacatttataacacactgtatttatgacttcttgtggttcttgaaaagtcaaaaattgtgtttgaggtttatctcgttttccgtttataatatgcattttaaaagtggaaaaactcaagcacgtaacaagtgaaaaactgaacaacgttgccaaattcctaaacatacaatacttagctccaattatctctgcatctattctaaaatggtttaaaaaaagtctgaatcaataagcgcctgatgggcctgggatactccaatacagtcttgtcaaccaataggaaaacttttcctaaatctggattcgtctttcatctctttatcacaaaacaccgaacacaaaccgagattgttaacggataaccaaatggcaagaaccccagacagagtaatcagtacttggatgttagggctgtttttaaggacttgaaatgagacagcttagggaagaaatgcgggattcatttctccaagttatatttgtaacacttcttaatacggagttaaaaatgtgaacagccgagctaaaatgaacgcagcgtgtaaaagggatctggactggagcctgggggtgaaggagggacgaggggggagtgaggggctttcgtgacgctcggcctggggttgctggcgatctggatggagggatggatagttaagcgaatggccagggctggatccgagatgccaagagatgtctcgccccacgagcgcgcgcgagtctgagccgctggggcagcgcagtgtgtccgtttccatccgcggcgcccgagcccgcctccatgttcgcgatctatgcccccgggcgggcggggaccggtgccttaggccgcggggccgggaagcccggcctcacctcgcccgaaatcccggcggggacggcgttgcccgaggggaggatgcgctgggctttccgctcggccccacctgagcgaccggagctcggtgactcgacctccggagcccgacccgcctgggcctggagatcacacggcgaggtcgctgcggccccggcgccctccgcctggcgcccgggcgcggccccgcggccctccccacgaccggctaccccaggaccactctcgccgcggtccgcgtcccccacccccttcccgaggacaaacctgggagccgccacccggcatagccagccccgcgagaaagcggcgagcgggcggcggggcccgcggagaagcggccaccgcggccctcccgcgccaagccgcgcccgcccgcgcgccctctccgcgggccgcagccccggcgccccctccctgggttgcacaactcacagccccaacgcgcgcgcactcgaatctgttgctcaacctacttgcattctcttctccgcagccatcactacatgccctggagctggggcagccccggggccctccggcaggcggccgcctctcgcctcagccctgggctgccgcggccgccgctagggcgcggggcgagcgcgaggctccctcatgcctcccgcccggacagctggccgcacgccagggccccggctcgggcgcgcccgagcgctgggctcggctcggccctgcccttcgtccgtgccgctgctccgcgggcgagagcgaacccggctccgccacctcgctccgcgctcctcgcccgcccgcccgcccgcagccaccgcagccgcgccgcttcctcctccccttccctcttttccttctcctccgtcgccgcctctggagccgaggttggcaaaccagcacctgctgctggagaacgccgagaactgaaacaggaaaccctgagccaaggggaaaacccgagaggcgtggagaggggtgaggggagctgctggaacctgtcgggctcgacccagccgctggggctgcccgaggttcccgcgccgcctcccctcgcgcctattccctgccccggcccaacccagcggtcccgacctccccgcgcctctcccccgacctggtgcaggacggcgcctttccgctcggcgacaccttctccacccagcagtaacactgatcatgtcccgggcagtcaaggagatcgacgggccgccttcttagggcaggttccccgtagttgtttacttatcaatattccgtgatgaggaaaaaccacaccctgcattagcaaggccaataaaagaatttaaacaaatgaagctgttgggatttcacccagggataggacttctttcagcaaggaaattggctttgatggaaatggcaatcgtgtcaaaatcgaggttgaacccaagatacatccagatctctttcaggagatcggaaggaaacagccctttgcacagaggtgggcgcctgaatcgcaggctgaaaagcaccgggagcagagagcctttctacttctgtgaatcgtacaacacccagcacaaactaagtcaatgtttcagaaatgttcaaataaccttattcgcctgtccttggaatcattacgagcagcctagggcaggatgagtctgcttctggagtgagagggagggacactgaatgggttgtgcccctaccatatgccacgggccaaatagcctgctttaaatccactgtcccgtttgtcaccacagccatgtgagctgggtattagaaacccctttatccatcagaaaatcgaggttagaaaatttacctgcagttacacagcttgaatgtgaggtattcaggtctgttacatctaaaggacgcatttgtttcactggaccacgattcatgcctttgatcaactttttacctttcataaaattagttttgcctctgagttgttttcagtagggcatatatatggtttaagcctggatctgttgaatttgcttggactgcctaatggtagtgatattcatgatgcttattggggttcaaacttgataattttcagtttaatattctctaccaaatgtaggcctttatggctcagttgagcagcacagatgtccccatctttttggccagcatcagttgctctttagctgttgatgttggggtcccagctgagagtatcctactggctggtgcacatgagcatcctgactctgcctgtgagatgaaaggagagtgtcttactgagcctgttttccacgtcagtaggccagtcatgaagccgattaaataaaattgcaggtaggcaggtaggctgccttctctggttctgtggtgcacactttttttttatatagagtctgaccctgtcgcccagg

SEQ ID NO: 915804 - DNA, 4001 bp, Homo sapiens
agcaagactctgtctgaaaaaagaaaaaaaagatgaggtcagaaaggaaactgcagacctgattgtataggcaaatcctggcaaaaatccaacagcaccgatcttggaatcaaaagaaccaaattcaatgagagcagtaatgtttttgtctgttttgttcactaatttatcacagcacctaaaacggtgcctggcagacattcaaaacacatttgctgaatgaacgactgaagtcttggctctatcacttagcagctatttgacttgtagcaagtgattccagttttctgagcctctgttctcatttctaaaatcagaataatcatttctccccacctcagaggattatagtgaggatcaaaaatggggaagtattttgcaaactgcaaagcagtatatataggtgaggtcttcacattactgaaaaagtgaacaagagcaattattattaacaacgacaatgatctctctacctttccctactaaattcaaccaccaaatcattctctccctctctataggccatggaactgggacaaggctaatcttcccttcagcatgagagagtgaactttaagcacttgaagccttctgtaaatgagtggcagtaattaagacataatagttactcctaccaacttttctttgagcctctctgagaaaaagaatgaggcgctgtttccatgtgaagattcaacaccctttggtaaaatccagtctgcctgagaactattttttttctgttaaaattcaagaataaccaataagaacaccttgacatttccccagacatcttgtccctcacttaaacctacacaagatcgtgctgaaagaagggaaagggaaagcatgaggaacactctcgggactggaaaaacgtttttagagatcaggtaatccaatcatcccaaactgagaatctaccgcctaactgattccagctgaagacagctttagtgttcgttctcatctgtatatggggataatatcttcttaaggatgcttcaattctggaataaaataatgcatatgaaagcatctgacatgggttatgcactcactaaaactggctgaacctggaaattctgcatttattcaataaatattaagtgaacgtctacaatatactagtcagtactctaggcactaggaaagggccataagcaaaaagcacaaaaatcttgttttcttggagacaacatctacctcctgtaacttctccgactggcccgcctggcttctttggacctccgtctggcttttatataacacctcctccacggaatattgtcctttgagattctgcagatcgctgtggtgtacctcccctctccacgcccctttcctccatcctaaacaagcagccttaattatttcaaggagtaagcaaggatgcggaaacaggagcgaaaactggactgggtggggtgaaggcgggtgctaagacgccagggctgaaaaagaaatcaacagaaccgctccgactccgggccaacgtcaagacgggcgggtccgaatcaggtgtgtcacctgacacctctcccgggaagggccatcgtcccctccccaggcccacagaggtccccgccgggctccgggtaccggccccagggggcgccctggccagggatggaggctggaggggccggctcgggccctcacccctcagtcctcgccttttcttcccagtcgcctcagagacaatttccagcatcgttcgtggtgtttccaggctcccgcttcccagacctaggccccgccgctcccgaaaccccctcatcgagcggcctctcacccacaccatcctttcctccacagctgcagccgctctcccggcccccaggacagccaccgcccggccgcactcacctgcgagcccagccccggcccctccatctccccaggagcccacagcggctgaggctactaggcaagtagcgactgccgccagcccgccagcccgccttgggtcgcctcttctcccacttcctgctggcgccctcacctccgccgctgcggtccccgctcgtgccctgagccgtcaatcggtcccggagaaccaatcccagccctccatcggctaggggcgggactttctcacctcctgggaagcccgctgtgaacagctcgccagaggctccacccccggcccgcccgtgccggtcgctcccccagccccagcccaggaccgagcgcccctccctgccccaggtgccacgggccccagatgtgcgtccagggtcaggatcagactgttattccaacgtcaaccaccatctattgagagcaaatctggacttggctacttaattgctaaatgaccttgtgaaagtctcttattttacctcaattttctcatctgtgaaatgaggaaaataagggtacctacttcatggaattatcaggaggattaaatgagaaaacgcatgtaaagcccctcagcccgtgcgttacatataaaaaggaatcaatagatgttagctatttaaatgttttccactccatttgcgtgatcttgggcaagtcacctctaccgcctgaggttctgtttcctcaaatgaaacaaaaaatgagttctacggcgcaggctagagggggagtgggcgagagcctcccacttgaagtgcacctcccccctgacctccacgaccctttgtggagggcactggaggagctggcatttaagccctgtccagcttgaaggtctatgaagcaagcattagggatggctccttcccttggggcgttccagtggggcagtggggctctcctacttcagccccgagtaaacactggggtttttctagcccagcacttaacacagttctttgtaatggttccttagatgtgtctgttgccaagtggaaccagattaagacctttagaagctaatttgaaaacgatctgaaaacattatgacttccttattttataaaaataatactaaatcataaaataaataaatagaaatccaacaaagtgctgggttttccatggaaaatattgctatgatacaataaaatcgtagatgtattactattgctttagtgtctgtgtcctttgggcacgtcagccctggcttgcccccaaaagcccaaaccctttgaggataggaaccatgtcagatccatctctgaactcccagtgtctaacacagcactgggacatggaaaatgctcagcacaattttaatgaatgatggatggatggatgtacaggcgtgtcattaatacacggacaaatggagtgacaagtagaagtgcaagcaactcccaccgaaagccagaggaaaaagcaattaattccgacaagttaggatgaggcattgggtgaggattcatacaggaaggaatgtttgggtttggtcattttgcttaactaataagagctttctggccgggcgtggtggctcacacctgtaatcccagcactttgggaggccgaggcaggtggatcacgaggtcaggagatcgagaccatcctggctaacacggtgaaaccccgtttctactaaaaatacaaaaaaaaaaaaaaaatagccgggcgtggttgtgggcgcctgtagtcccagctactagggaggctgagacaggagaatggcgtgaacccgggaggcggagcttgcagtgagccgagatcgcgccactacactccagcctgggtgacagagcgagactctgtttcaaaaaaaaaaaaaaaaaaaaaaggtttatttattcatcacttactatgtgttggcactgtgctagtgttttcatacattatgtctcatccacgagatgggtggtattttcctcatctcctgggaggagaaactgaggttcaggctgattccataaaccccaagtcactcagcaagtaagtagtaaagagagtattcaaacccaggtttcttactgcaagcattttggctgaagtagtttgtttctttcattttcaaagtctgatttagaagatgctgaacttgagggaggcttaaaatctgtttcaatgcgtctgca

SEQ ID NO: 915805 - DNA, 4001 bp, Homo sapiens
gtcctgagacctctctcaagccactgacatccagcagcaaatccctcccttcctccacggtcacccctttgtccaggtcactaggaactctctggattactgcaatagcctcttgactggtctccgattccacctttgccccacctcgtacggtctcaccccagcaaccaaactgaccctcctctgcttaaaaccctcctgtggttctccaatttatttctagtaaaaagcaaagccttcagtgtcctacaacatccttctatctgtgacatctcttcccctctcttactgcactccagccacactggccttcttgctgttctgggaacatacatgctgggtacacaactgcctcagagcctttgcaccacttgttacctctgcctggaacacctttccctcagattcccacatggctaaccgccccccacgccctccaagttttttgctcaaatgcctccttctctatgaggtctaccttgaccacacatttatgtatattattttaaaaattaattaaaaaaaatttttagggacagagtctcgctacattacccaggctggagtgtagtggttgttcacaggtgtgatcatagcacactacagcctcagtctcagcaaaagcctctgcctggcataaaatgtgtgtgtagagcctgtacctggtgtaatttttttttctaattataaattgacaaattccagttgtatatacttatgggataccaagtgatgttatgatttatcagtacagcttggaataaatcaagctaattaggatagccattacctcaaacactcatatttttgtgatgagaatttaccacctgtttatttatgtatttatttatttgagacggagggagtcttgctctgtcacccaggctggagtgcagtggctcgatctcggctcactgcaacctccgcctcccaggttcaaacaattctcttgcctcagcctccccagtagctgagattacaggcacgtgccgccatgcccgactaatttttttatatttttagtagagacggggtttcaccacgttggctaggctggtaaacttctgaccttaagtgatccgccggcctcggcctcccaaagtgctgggattacagatgtgagccaacgcacccggcctaaccacctatttaatattgaaacttgcaacccctttaccctgctctacttcttgtttccaaactactatcaccttctagcattctatatgatttgcttattattcctctagtttctcatctgcacccccctcaaatcaggaatttgttctattgtacccttcgtccctgtaacaaaaccttgcacctagtaggctcccaataagtatttgcgagtaaataaataacactcaattctagctcttccatcccaggttctaaaaaaatgtctgattctaacaacctggatcctaatgtaacccggttctaacatctcaggtcttggggcccctcccccctgtccaaggctcccacttctccccgcccgatcccgcaccccactcacgcccagccctggcccagaccgcggccggccagcatcacgccacggatgctgggatccgagcgcaggaagagccccacgttgcccagcaggttgagcagctggaaggcggccagcgccagctgcaaggcccgggccaggggtcccagcggcggcggcccgggaccgagcaccagcacgtaagccagctccaggcccacggccgcggcccacagcgcggtgagcacgagaggcagctgcgcgggcgccccgtccgtgctcccagccgcccagggctgccccatggcctggacacccagctgtcggagccggaggactaggccgcttccgtattggggcggagatagcggcagacggacgtctgctacggccaatagaagctcggaagggggtgcggcgagcgctcagactctcagggaacggccggcccacgcggcgagttgatctggccaacggaccagcagtggaggcgctcggaatcccgcggcgctggagcccggataacgccgcggagtgattgacccgcccaccctggaggctcctcccatcccgtcggagccccgcccgctggcgcgggggccaggagtgcccgggggattgagttgcagccggggtggtgtcggggtttcccggctcagcacattctcccctactccccacagccgccccgatattaatagccctgccgcagcccatccagctggctcagagccgttccccatgcccgggtgtctccatcaccccagaaaacatgcaaaacagctcggcgcctctgtgttcctgactgtgaaatggggatagggctctgtgtcccaccagcgaggtgctggaagaggctcacgaggagctccagagggcagcctctagagcggcccgcggccactattattatcggcctttctattgtggagaggagtaaacagactcagagaggtcccgtggatttctcaaggtcacacagcgccccagcagcggagcaggaatgcaaacccaggatctccgccgcgagatccaccccggcgcccccgagtcccgcagttcccggcttcaggacaaccccttgccaggtccaacccgagctccttcacccccatccggcccctccctcctcccccatatttagtgcgaattcgatctggggctgggctgggccctacttaatggggcccgggtgtccgagagcgtgccgagcggagcgaagccaggagcccgatcgagatgatgatggttatgcagcccgagggtctgggggccggggaggggcgctttgcgggcggcggcgggggcggcgagtacatggaacaggaggaggactgggaccgcgacctgctgctggacccggcctgggagaagcagcagcggaaagtgagtgctcgcccatttcctgacagcaaaaccgaggcctgagaggccgggctgtttgtcctgggcatctcagcagtgcaggggcagagcttgtctttaacctagagtgctaatccccagcccaggctctgcccatcagctgcctgctgtccccagggctggaggagagggctgggagccctcaagaggggtttaaaatgacaagagagtttctgggctccccacccccaccagggttcattcccctgggcccactgccccacttctgctgctgaaaacaggctgggcaaaccccaggagatccaagttagggggggttcagaaagaagaatcttcttctagttaaatattcccagaccccaccctgaaggcttgcagtcaggcaactagtggacttgggagtgtgggggtagtgagaagggtcctctcagaccccaccccacctcgtctccagggtggggtccatagtcgctgtatctcatttaacaattgaagaaactgaagcccagaaagagcacagacaggccccacatcacagactgtcagacatcaggacccccgcaacctgaggatctttacccttttccctacccccattctttcccaagataccccaggcatggggccctgagtctgctgaaaaggccataggtcggggaggaggggagacctgggtccccttacgctgtaacctgactctccagccagatggacacttagtgctgaggcagcacctcgggggcgccaaagaggggcacaggggcagctgctacccaggcccagcccgttgggcactcagggcccctccctccctgagctattttcactcccagactttcccaagtagagggggcaggacacctgggttcccaaagggaaaatgatccaggccagagggagaatactttggagagtggcaggccaggggtaaccaggagggcactatgaggccattggaccctgctcagcgtgtgccaacactgtatgactccaggagagggcagggtactggggtactcagtggaatttaaatgacctgagagtcccagaatttagaatcagagtacttctgctgggttagatgacaggagatgaccccaagggccgagaggctccg

SEQ ID NO: 915806 - DNA, 4001 bp, Homo sapiens
caattttgggagtataatactgggaacacaaaagagaacagcatctgagatgcttgggggctacacagtagaagggaaatcaaaaacctaacaatttattgggtataaataaagatgaaccaattcttagcaaaagaatgtgctgcagatactaggatgaaaccacaagggtgagtatggttcatcagagtcaacagtttgaatccatactagtatcaaaaaagtatacaagaatatgtatgccagctgggcacgggggctcacgcctgtaatcccagcactttgggaggccgaggcgggcggatcatttgaggtcaggagttcgagaccagcctggccaacataccaaaaccctgtctctactaaaaatacaaacaaatgagcagggcgtgatggggcatgcctgaaatcccagctactagggaggctgagacacgagaatcgcttgaacccgggaggtggaagttgcagtgagccaagatagcagccactgcactccagcctgggcgacagagccagactccgtctcaaaaatgagaaaaaaagtaatatgtatgccatattgaggcacagagtaaactatgaaatggaaatatgtatatgtaaaacaaacaatacaggatatgtggtttgaaggctttaataaggtttaatacaggtatttccttaaataggtggataccagcagtaccaaggacaacacaactattttttgttgaaataagcggtgtaacagtacaatagagtaaatctaaatgcacagtaatggaggtaccatggaataattcacatgtcaaggtatgggagaaagagccaagaagtttaatgtgggtgttatcattatataccgaggtagcaaaatacatggcaatataattttgtaaacattaagtttatacaatgggtgataatgagcattctgaagatatttgatccaggacagaggtatactgagatagaaggatgatatgcaaatgttagatcaacttggtcaagatggcattaaccaggaagtgaagaatccaaggcaaaaaatagtctagcgtataacgtatatgtgatcctacaactgccttcctaacttttagcaactttcttacttcttatttcagtgtttcatttggccaagtgggtaaaacactttccacctgcctgccccaaatataggtaaaatattgacaaacgcattcgggctccactttaaaaagtacaaagtactaaacgcatggagcactcggctggtggcggtaggaggaggaagcggacgggtgagagagaacaggtaacaggatgaagcttgagccaaaataagtatcagcagagtggagcgagggactcgaaccgcagagcggtaaaagggaaacagcacccggtccccaccacgggactggggaaaggagaatcacccgttggggcagggctgacgaccgctgaaaccgaaaagaaggaatccacggcggccaggcccaccgaggttgagagagcgggctgcggggaccgcagagcccgagggcgcagggccgggggcggaaggggcggcggctgggcgccaggcaccggggaccgcggtctcgagctgagtggccgtctctaacccgttccgagccctggcggtcgtggatccccggcctctactcgtcgtccgtttccaaggcccatgggtcccgccgcggttggaagacccggcccggaggagaaatagggccttaataccctccccgtcttcggtcccccttccctagaggtcaccctcccctcccacctcgctggtacggcacttccggttccgcagggaccggtgtcctccgcactcacccgcgagcccggtgcccgtcaccaccgccgtcgttgtcaccgccgcctcccggcagtgccgtcctgcctcagagaagcagcgcgcggcccccgcacgctccacgcccgccccgctgccgcgcgctcccgccaggcgtcgctcgtctcggagccggcgcgcggccgttgccctcagtgccgggtctcgaacccttccagcgttcccattggctccctagtccgggctcgcgcgacgtctcgcgcggcgcacgtttgtctcattcatgcggctcgcgctgccgcgcccaaccccgctcactctcccattcacccatagcccccaccccgactccgatctggggcgtgcgcgcgaaccctggcgaccgcggcgacctcgcggcctgattggctgcagcaacacaacgacgtacgcacgcgagaagacgagagcgcgcacgtaaggccgtggggttgcggggacaactaagagacaaggattggcctaatgcacaggagtcaggaatgaggaaatggccaggcgagtcttcccttctcctgcgtcctgttgtattcccactgaatccaagcaaaaacccccggaaataagaaaagaattatgtgtgtgtactagaagtactcaaaagcaagcagctaccttctcgaattcagcaacccctctcctactgaggtggtacagtccagacaggcttccagcgcagccaattaccgacgactatcgccgcttcctgcttcagccccttcgcggcggattggccaaccatttggcgactaggcctccctcttctccttcccatctccttttttttttttttttttttttttgatggcaaaaactttatttaaaacaatcttgctggagaaatcttcagtccggcgaggtcgctggtccgggcagaatccagggcgatggaatggtctgggctgtgtctcccacatgaaggggacgcccggacttgaagagccaatgtagggcgaggctcctgccaagggccggggagggagatgaagaagagcaggcgccagccttggagccgtagcgctaaccgtgagagggaagcctaaggagcgcgcgacctgaggcggtggcagcaccctcccgcccccggagtgcgagccgggaagtgaactccctgaattccattagtttcccactgtcacacgtgggatgggcgcccgcatccctcacctcacccaatcctagaatacaaagctaaaagcaaaaggttctctagaatagctactgtccctggcgagctaactctgcataggtcatagtgctacgctttgccctgattagcccaagacagctgtgaacccaatagcaatgccccatgttctctccccattcggctcgaggctatttcttttttcgaaagcaactctagctattacataatggtccctcaaaaaggtgtttcacaagccacttccctgaagccgaggcccctcacctgtaaaatcctgaggactgtcctcgggtttggtctcaaatgttgctggctttactgtggttctgacactagcattaggcagtaaggtaaaagagaactaccttctgttttctggaatctagttccttctctgacatggcatatattataagttctagtttattcttgttaacagcgtcaatccagcatttattgcaacacacttgagagttctttataacgactttatatttttaaaacagacctggcctggcgtggtggttcacacctgtaatcccagcactttgggaggccaaggcaggcggatcacgaggtcaggtgctcaagaccagcctggccaacatagtgaaactccctctactaaaaatacaaaaattagtcgggcatggtcgggggagcctgtaatcccagctactcgggaggctgaggcaggagaattgcttcaacccgggaggcagaggttgccgtgagccgagaccacacaacttcactccagcctgggcaacagagcaagactccgtctcaaaacaaaacaaaaacctctttagaccatatgaaaggtaaattattgaagatacaatattgatattttattttttactttttgagagggagtctcacactgtcacccaggctggagtgcagtggcgcgatctcagctcatggcaacctcctcccgggttcaagcaattctcatgcctcagcctcctgagtagctgggatcacaggcatgtg

SEQ ID NO: 915807 - DNA, 4001 bp, Homo sapiens
caacaggcattgtgtctagcactttacacactgtatttaattctcacaaactcacgttgcagagattatcctctataggtaaggaaactaaggcatgggtaggttaaggaatttgctcacggaattcatatccaaatgaggtcaatgatatacatgtatcttttcaaattcatgagattaaacaatatagaactataaaatttttgtaagatgaaatgcatctacagcaattagaagtctaattgcagctgaatctgtaagtacagatttttgctgtcgacagaactgcagttcttacaacaaattctctaaattatgttaacttagctgacattcaaaaatttgaaagcatatctaataccacaatatgattacctctgaattttatttctctttctgagaggcttctaaggcaagcatgccaagacacaggcttaactcttaattttggaccaagtctgtttcaagttttaaatctattaggtctggtgtaagtcaaaccttgccactatctctactggaagaaagggaacacttaaaactgactccccctcacttcaattttctctgtttttactaatctgttttcactcaaaaatcaaaggtcactaatgatgttttcagtcatgaattgaatagtcaatgtgattaatttctagaatttacaaacttgtgtgcttcagtattcttaacatgagtattattttaacgaacaatttaagacaatgctcctggccacctgttcatgtttcctctattacgtctaggtaataaaggaattcctctcagatgattctaatttcaaggatgaagttcctacatttaaaaacacgaaacacaaagataaaacatatgctacttagtaaaaacaaacattaaagaatgctcatataattttatatgaaagactccatacttaaaatcgtagcagtgggcttttaacctgaccataataagtggcaaatttctcaaaagaatgagaagggttgcgaaaaatttagaaaagtgaaaaaaaaaaaaagctacataaacacactagtacatctggctcttgagctaacgcgaaggcgggggggaatcatttttgaaggctatgatcgggctgtgtattccctaaagggcatgtgatgtaatactggagagccgcctaaaggaaagggatagggtgacaaagggggtgcggatgccagaaagagggatgagcctgcgggtgtcagggaggaggtggatcactagcgagtgcaggggtgtatcaaaagatgatttcggggagtggggaaacggcccgacaagcgaaggtacaggagcgagatgagggtggcgcagagaggaggcacgaaggctcccggggaaacggtgtgacatctggcgtgcggagccggcagggggcagaccaggcaggatgtcacgtggagtaggcgctacgggagccgagagggttgcgtacggacagaggggggtctttcccaccgcctgaaagactgttactcacaggagtcgcggactcttcttgccctgaactggagacggggacttcgcggcctggggctgctgcccggggacgtcgggaggcctggcgctggggctgctcctccgccggcggggatactcggccttcctccggcgggacacagctgcggcggcggcggccgcagcggcccggcctcggtcccgacctcccctcagcacgcggctgctagtggtccctgcaggcgccgccgcgaccgcctcagggggccgttgttggggctcctccggagccgccttggccgcctctcccccttcctggtcctgctgctccgggggtctcggctcttccgtctcccccggcatcggggcttgtccgtcccccaccccctagtcctaggcggcggaggcggaggcggcggcctcggcgctgctccccccgccccctcgcctcccgaagcctgcggctcactctcaccctgcgctcctctttcccccctcccctccgcccggctccgagggcgccccccccaccccctgccactcaaggtccgctaccgctggcggcgcgcgcgcgcgcgccacagacgctcagcgggccaatcggaaaagaggacaagcctcctcaccccgcccctcgcagtcttacacgcagcggcgccccaggttccctcccccaccccttccttcagccaatcaggaaacggctaaaaggggagcgcgcgaggtttccttccccgcgcacccgttctcaccgttaaacggctgtgtctcgcgacaatcccaaagtgacctttttcccccctccagacttcaacgcgcgctaggggcagtgcgaggggcaggtctcgcgagggaggcgggtgagaagaaatcgcacctctttccccgcctcacgcaaaccctagactggctgcgcgcgcacctgcctccctgaggagccactgataccacaagggctctttctattcttctttaggccgcagaagtagcctgggcgttcttccgcctccaccctaccccactttcctgtctttggcctttctgtccccagcgccgccagatcttgcgcggagaagggggtagtattttgagctgtcgcttctcctttaagaaaaaaagccccgtcggttgccggatgaaagtctctgaaaaaatggcggcggcaaaacggaggcggggttgtgggggcaacgagggcccgcctcttggcgcatgcgcaccgttaacttaaccaagggcattctgggagatgaagtcttatttcgcctaggctttaggaaaaatagatgggaaaccagaggtggagaggatgccgggaggttctaactgagtcacgacgggaaaggtagtttactttccgcagtctagagtttacctttttttcgggaggcagtgtttccgggttaggtcgcgacgcgtgccgtacatccgggctcaagcgtcgagccaattgctggtctgatgggagggtttttcctactttttcttactttttatctgggcgttggcgtacctttctcggggtgtctgcgtaactgcccagacttgccttggtttggtcagatgacacctcctctgggactggctagccagcgttcatgtctacattattgatctcgtcttccggtgtgtgagtcactcacctgtgagctcctagaggtcagcgactaaatctggttccatggggtccttgggccctcggagccctagcacaaggcccactactcagttggctcttaatcaaatctgtgaaacgaattataaagttgcttttctactagaccttgttgggacaccaaggagccggcgtcggttgcttaacttggatgcggtgcctgacctagagggaggcgaaagggttgtgagcgtgacatgactggtgacctacaccgagaagctgaagggtctcttaagctctgcggccggaagccatctgcttctgcggtttatacaatagcaactttatcagaggttacttttctgcacgctagcgtatgacattaatttgtcttcctgattcatcaaagggaatttccgttgcagttggtgatgcagtgggcctctcccatttcttttttcttttcatccattacaatcaaggaacgatttgcaagaacatcctttacccctggaaaataaggcatccagggctaaaagtcccaaaagaaagaagctggaaacaagatctggggatccaattttaaatttcacattaatcattcagttaaactgtagacaagtgctgaagtacatttttccttccagtactttgactcagataccacttcatattagacaaatgttttatattctctactgagtattttccattttcatagggctaatgtcattttcagttgtaataatcgattggcatagtgtcaatggaaattttttaagattgagtttgtagtgagcagacttttggaaggaacagtgctgacatccaatggatgctcaaagtaatacagaggaggaatctcctttcaaaaaaaaatgtacagacagtggaatggagaatgaattattcc

SEQ ID NO: 915808 - DNA, 4001 bp, Homo sapiens
ccaagctgtccagctcacaggggtaagtttgggtaggaagaaaacgccacctcccctttcagtcctttcaatgagtcctctctgggcctgcactcatcatattctttgggctaatggctaataatgaacagtttcagaaaaggttcctcgatacacacacaggcacacatatacatgtacacatccctgggcacaaatgtacatgtccttataagcacataatcaaacacaagtggcattccctatatctacactatgggtacaggagccctcacacatacacatctatacactcacaggtttgctaacaggcaccctcaaccatgcattctcttgcactcccacaacacacctgtgttcatatgttcacatacatacatttacccattcattcaccccaagtacagatcaacacactaacactcatttaaacacacaatgtacattaagtgcctgcaagtacacacatgcactcacaaggagaaacacatatggagctgactcttgcatgagctccttcaaaaactggagctaaggctcttaccccagattcaggtcaaagtcatgacacatatgtctgctgacttcttttagctaactttaatgtgggaaactcacttcctctctgtttagccttggaatcagtggtggatcctgaatatctgaaagcaacatgccggtctggctagctaatagtcacggccaccagcatacccgtaagcttgactggttctcgctgaaacctccagattggcagggcttaatttttaggaaagaggaactaggagctttaatttttaggaaagacagtgaggcctagaaaggaagaataacttgcctgaacttacacagcaggtaaggaactttaacaggactagaatctgggctctgagactcgggggactcactgtcctgctgcttgaggagggcctggaaaccagtcaccaagctggcccctgaggctggcctgatccccccgaggtgccaaggcctcaccatagcagacaaggcgggtcgtctctcggctggccaggggtatgttgcacaggcggcaattggggttgtagtcgctatcttggagccattgcaggtaggactggacgatgcactggagtgggagagagatgtcacaactggtgctggggctgctcggcctatcaccccaaggtccgactgtctctttttctctagccacagaggagactcatcctttcgtttgtttaatcaataaatatttattgagcacatactgtgcaccagactctctcttgggaacgggggatatatcagtgaacaaaataaatcaagtccttgcccttgtggggcttacattctagcgcggggcccctcatggatttggaggaagccaataccgccttgcccacccagtgccctgctcagtcgctcccctgaaggccccaccttggcgtgattggctaccaggcagtgctcgcagacgttgacccgatgttcgaagcagaacaggttggtcacctttctcttggggcacttacaaagccccatgatcgatcctgggaaaggggcatgagttggtaggaagtcaggttctggtggccaccactacgctctcaccagcccagtttccactcttaactcccccagacacctctcatattcgccccgatctcagattcctgcccactgtccctccttatgcggagaaacaccccctgcataaatcccgcctccggcgacccctcaatccttctggatcccgcccccggccaggcccctccatcagaggctccccgatactaccggccccgcccccaagacctctcctgagccccaccccctccaagtcccgccccttctctacagaccccagtctctgtgtttactgatcggccgctgcactggttccgaagggcggtagcgatggctcgaggcgcggaagggcagggaccactctccccagggctcctgcgcctctcccttcagccccggccgccccgattatccctccgctgccacgtctcttccgggtgcggcgcgcgctgatgacgccatcgcgcccctgggccacgcctccgctgccgctagaggtgaagacgggtggaaaagactcggggttccgagggccgcagaccgctagccctacgtcacttccgcttcctttcccgcagggcgggtaattcgaacgttttttgcagcgagtggccttcccggttggcgcgcgcccggggcggcggcgctggaggagctcgagacggagcctaagttatgtctgggaggcgaacgcggtccggaggagccgctcagcgctccggtgagcggagggcgcgcgggagacgtgaggtcgagccgtttgggggacgcagtccggtgaaagatggcctcttccctcccgctgccgccgccggaggaggcgcccttaaaagggcttgtttgggaatcttctcgctgtctctagaacctgttctctggactctaaggtctagagtcctcctctaccacttaacttttttctctttccagggccaagggccccatctcctactaagcctctgcggaggtcccagcggaaatcaggctctgaactcccgagcatcctccctgaaatctggccgaaggtgagccccagatttctcacttcctccccttgtggcccctcacctaatgttgagctcacgttcatccctcttctccagacacccagtgcggctgcagtcagaaagcccatcgtcttaaagaggatcgtggcccatgctgtagaggtaaaggctaaggagagtgttgtgggtggttaggcgggcaaaactggggaccagctatgtgatcaattggtattgtcccccgcaggtcccagctgtccaatcacctcgcaggagccctagggtgagttcactttcatctacttaattaagtagaatctgggtcactctagagctggacagcacacattggctcctcacatctgcccagggagctgttttgcagtactgcaaaaacagtttgcctgtgggcacctgcatgcattgccagtcttgattactccctgaagacttaatacacttaactttttatgccttgtgtatttctaccattttcctggaacttcctttaaaagctgagctatgtcttaactccacgtactgcctttctaatccattatgccttcagctttcatgtatgggtgttctgagataagtcatgtgtatgacatttttacagttttagcagaagttattatcaaaggatgtttcattaatagacaatctgaagacatactgactgagaaatgtgaactcctttgaagagctgatagggcttagagtcaactggggagaaagaccaatgacaagtgatagcaacgttgtgtactgggactgcaataaggaatactagatgctatgatggtagctaacccagaccatgtggctcagggaatgtttcgtggaagaagaaacatttgaactgagtctttaaagacaagtagaggccgggtgcagtggctcacgcttgtgatcctagcattttgggaggctgaggcgggcagatcacttgtggtcaagagtttaagaccagcctggccaacgtggtgaaaccctgtgtctactaaaaatacaaaattagccaggcatggtggcacgtgcctatagtcccagctactcaggaggctgaggcaggagaatcgcttaaacccaggaggcggaggttgcagtgggccgagatcacgcccctgcactccagcctgggtgacaaagcgagactccatctcaaaaaaaaaaaaaaaaaaaaagacaagtaggtttgttccaggtcaaagaagccatgtttgcagagattgggaatttaaagaaaaatcaaggttcggggaatagcaatttgtttagtgtctgcagcagacctcagcaggggaggaagcaccctaaggcagagcagatcctgatgaggcacaaaagccacactcatggcttgggcatcattcttgggtctgtgggcagcctttggagagttctgggtaaggtagtgaccga

SEQ ID NO: 915809 - DNA, 4001 bp, Homo sapiens
gtatagtttcttttgggggtgatatgttgctaaattgattgtagtgatggctgcgcaactctgaatatattaaaattcaactttttttttgagacggagtttcgctcttgttgcccagactggagtgcaatggtgcaatctcggctcactgcaacctccgcctcctgggttcaagcgattctcctgcctcagcttccagagtaactgggattacaggcgcctgccaccacacccggctaatttttgtatttttcgcagagacgggggtttcaccacgttgaccagactggtctcgaactcctgacctcaggtgatccgctggcctcggcctcccaaagtgctgagattacaggtgtgagccaccacacccaggctaaaattcaactaattatcacttttttttttttcgagaccggtctctgtcacccagacgggagtacagtggcacaatcacggctcactgcagcctggaactcctgggctcaagtgatcctctcacctctgcctccaagtacctgggactacaggcacacgctgatttcacttaaaaaaaattttttttgtagaaacatgggagggccgtctccctatgctgcccaggcctaattacacattttaaatgggtgaactgtaaggtatgtgaattacatcactaaagctattttaaaaaataaaggcgggcatctgtaaagcaaaaaaaaaaaaggcactcaagtatctgtagacagctgactgctcatagaatttccaaatagtggacactgacaattaaaaaaaaaaaatttccaaacagtcaaaatacgccaggacaaaattagctatgcatcttatgggtgtttttgagtgatctccttatcacgttattttcttactaaacgtaaacttgatctacatactcagcaagaaaaaacattaaatactgcaccgttttttgtcaactacaggaaaacacaagtatcttctggtaagattcaggacaaagccgaccacaatctcgaacctacaatttctccccacattctcacttgattatatcagctgatttagacacttccaaagcaaaggctgacgctgattttaaacaaataatgggctggcaatggtattcttctttcctctttttaacttcgttattatgtggaaaaaacaaatgtccaaagcaaaaggggaaggaataaaaactagttcgcgttccacaataatacgtttcaaagagacttataagaatttgttcactcttttggccaaaactggagaaaagggaggataaaattgtaaatttctaatatccgatgttagacctcagtaacctttttttttttttaatagaagaaagggtgagggggaaacaatctgcccacgatacgcatgggaagcaagcgctaggtgagaccggcaggtcctgggagggcctgggccagccctgtccccggcgcccccgctgcggcctggtgtggcccgtgggcccggcgtcccaggcggcggaactctgcctcggcggcgcctggggactcgctctgcgcggaggtcaggccgagaaacgcggccaaggctcccgagggctccaccctcccctctttcactccctccccttggcggtcccctgagggaaacaggcggggcgcatcgctcagagacaagctggggggagttgagtcctcaacgaaaaaagctccgccgcctagagtggcggccgcgggttattaataaactccgcttctgcccagacgccgctaccgcggccggcccataaaatcggcaaggcctgcggcggaggctgagcagcgggagccggagcccgggcccaagcgggcccgcgccgccgcgctgagggcggcggccaggcggagaataatgcacactgggtaaaaacacatttatatacgaacctccgagaaaattttccaacaattccttcgtccgaccaccatgcaccaggacaggaaacagccgtccggcccccaggccccgcaacccgcatagtgtgtctgaggcccgcccccagcttccattgggctgtcattacatcactcacaggacgcttccggttttccattggcccacgtttggtcgacgcgaaagaaaaccgccctagccgcgcccactcaactgacgtcagccaagcctgactttacagcccgcccctgagtggctcgcgcaaagtgcagaatcaaagctcctgtgtctgactggttgacataaccgcttatcccagacggaccccgcctcactgactagcgagtcataccgattctggggccccagcgggaggcgccattttgtagcgagggagggaggctggtccttgtgattacccgggagggagccggggtgacgagcgccattttccccacaggggcgaggaggcggctttggttctcccggtgggcttgccggagtgcgttctgcagaccagaagggctttgtctggcgattgctgaatgctcaatagcagcctgctgggagggaagtcgaagggagaaataggacagaaagagagacctgacctctccctggaggctctcagtgtcggccgaggcccttggtcttgctctagggctctgcattcccgagagctgctgtatgccggggattggcttccaagcctgcctgagcttctccagtctcccgggcatcgccatgcggtgggagggtgagccttcctctcctgctgaaattccggcggcttggcaaccggccggggggtcttggattcctcggggagacaccactgatgctttgtggtttcacgtaatttggatttaaaagttgaaggcgtcagaaatggttgtcgctacggtcttttgtatgttcttgtgttgcgaactaataaaggaaagtcaaaagggtgggagaagcattcagtctggttccctaaagttactaagaatggatacaaattagttgtggccgttgcggttaatgcttcttgtagctcttaacccagccctttctaaacctttggatatacttactagtcagttccgaaggtactcagtacaaatttgcgttggcgcaccaggccgactaaagatgaggtgggtgtattagactcaaaatttcttaagtcggccagggggtagaattgagctaccaagagaatgagagactaccctgttgtaacagatttggatcgcgcttagaaaaacagggagaaagctggatgatgttcaacttaatgtcttgcatttcagacgattatcgaatggacggggataaataaaaacgatgttacagatagccctctaagtgtggatagtaaatattttgatttacaattaagcctaccttgaggtgcaggccctaaccaacggatagttgagtaataggggcctagacgccaatggaaagaaaatgggactttaagctttgtttgaacatatattctgttaataaagaagtttaaatcagttcggattactgttttttgtttgtttgtttgttttttgagacggagtctcgccctgtagcccagactgcaatgcagtggcacgatctcagctcactgcaacctccgcctcccaggttcaagcgatttctcctgcctcaacctcctgagtagctgggactacaggcgcccaccatcacgcccggctaatttttctgtttttagtagagacggggtttcaccatgttggccaggctggtctgaaactcctgaccgcgtaatccgcccacctcagcctaccaaagtactgggattacaggcgtgagccaccgcgcccggcccggattactttttaagcccttaaaataaaagtgtcacatataaaaaatggattaggtggccgggcgcggaggctcacgcctgtaatcccagcactttgggaggccaaggcgggcagatcatgaggtcaggagatcgagaccatcctggctaacgcggtgaaaccccgtctctactaaaaatacaaaaaatttagcaggcgtggtggcgggcgcctgtagtcccagctactcgggagaatgaggcaggaaaatggcgtgaacccgggaggcgg

SEQ ID NO: 915810 - DNA, 4001 bp, Homo sapiens
tcaaggagacacagagagtggcagtgccgactggaacacagacacagctaatgacttgtgtcaagtcaggctattctattccttgggagattctcccacctccatcctgttcaccgaagtgctcaccggccacccccgatgatacactgcactgtgccccgctgagtgtcccaggtgaattttgctttacaggttttgcaccatctcacggggtggagtttttcttgctctttgaaacattctgtctcccttcacaaatctgagagtccaaagggcagaaatgatttcggtcttttccctctgacaggggcatgtgattggctgatcagccatgtgtctccagggattgaaagttgggttgggtgaagacaatcttaatgtcctaagtggttacctctttagaggaagagtagaccaggagatttctctcagcccagggcatccagctgctccctggagaggccacacttcatacctcaggctgtcctctgagaaataacccagggcctgaaattcactagatgctccagcagacatggccatggtgggcatcctgtgttatccctggacaatactgaaactgaggaaaaagtccagagggtggctgagagcaaatcaccctgtcaagtttccaaagtggaacctcaaaccaaagacattctggtaaggtgtctgtgcctagggaaaataaaaaggaggagaggcacaaagactttttacaatagcgtcaggggatgattctctgctttcctgtcacgtggaatgattacaaacagaaaacaaatctcttaaaaagtgccgtccaggctgggcgcagtggctcacgactgtaatcccagcactttgggaggccaaggcaggcggatcacatgaggtcaggagttcaagaccagcctggccaacatggtgaaaccccgtctctactaaaaatacaaaaattagccgggcgtggtggtgcaggactgtaatctcagctactcgggaggctgaggcaggagaattgattgaacccgggaggcagaggttgcagtgagccgagatcgcgccactgcactccagcctgggggacagagcgagactccatctcaaaaataataataattaaatagcaggcaatccgactgaggtggctctagtgccctgggttcttaggttaaaaaaaaaaatctaactcagatgcgtttcttgcaaatgactatcttgcagaaacaaaattcaggcttcgtcaaccacaaacctctaattaacttctgattacaggaccagaaaatttcagcctagatagctgaaatcaggagatgacgtaactgtaccgaactaatgaatgaatgtggtttgcttcctcatgcacctgataaaagcctttccttcaaggccggctggtgggacctccaaacccaaaaaacatggttgggtcctctgccattcatgaatcgctctttgctcaaataaaactctttcacatttttgcaaggactccctcgagagaaaggagggactggggcccccacgggctacagatcatcctcttatgcacaaaccacccacggagtcgggattctcccttcctgactcggggagacgagggtctgcgggcgaagagctgccggggggacatggctctgggcttgggccaaagccgctctgcagggatgcgccggggcgcgcggggcccggccgccatggtgcagctggaggggcctcgggtccgcggagcccggaacccacccgggcagcccggttcctcccgagccggtaccgcgggttccagtccgcccctccctgtctctcaggaggcctggcccctacactcaccatctcctggcctccagagagcctggcgtttcacttctggatctcccggtgcctgcgggtcacacgacctacggctagcaggggacacagagccgcggggacaggaagtggagctctgtcgggacaaaggccccgctagatcccggaagccgtcctctcctctccagacatgtgcctgattggacagtccccgcccctactcctctgattggatagggcatcacgccccgccccctcaggccctgagtgacaggagctgtaatcagacaatgggccgaatgagacagcaaggacaggtgctggccgcgatcttttggagcggggcttcctgcctgcgctgtccggccccacctagaggatatttacatttcatcttgtgactgcggttatgtttatttataaataataaatatatgttattcaccaatggaaagaagaaaataaagacaatcattttgaatttttatattttatggccttcctggcttttggtcctttgaacagacagcctgaaatttcaaaaaggattcaagcctctaagaattaaaatgtaagccatgtgtgaatcttaaattttctagtagccacgttttaaaatgtactaagaaacaggtgaagttgattgtaataatttaacccagtatgtaaccattttcctctatggtcaatatacaattggtaaggaagtatatattttggggtactaaatctttgaagctcactctgtattttaccttttcagcacatttcagttcagaccagctgtattcctgttattcaatagccacacatgatcaatagctgccacactaaagtgcagctctgaggtctaacctcccttatgtcaggaagtggagggtctgaaagtcccttttcagccagaggtgagggaacagcctcttgctacaaacatctctcctccggtcgaagggtggacgagatggtgatcctagagagcataggggaaagcaaaagaaaatatccacgggtagaggactgctgcccatcaataatggggccctaagaggagagaacacatcttcagatctgtccatagccttgacctccaacatttagatatggaggaaatagactagaggcagacttatcttgctatttggccttagccctaatgatcaagctgtgattgtctgtttcttcccgtggttggggggctgtgtgagtaaaagcaccaatcacatatatacatgtgtacatgcatttctgtatgacggaacattatcttacaaaagatccaactttaaataaggggggagaattagtacctataaagtgctttcttcttgcaggtaactaggaatcaacctttcattgaatcctggcaccctatctgccctgggtgcatgtattagttagctattgcataacaaatcaccgaaaacttaatagctcatgattgagttcatcagccattcacgctgaactcaactgagctattcttgtcacaactggactgcttcatgtatgtatggccagctgctggttgactaggtggctctgcttctggggatgagatggctatcaacagtggcaccttccttctccccaccatggtatgtcatcctccagctggctaatctcataaagatagcaaggttctgatagcttgatctcataaagatagcaaggttctgagaaacacagaagcatttaagaccttttgagcctaggcccaaaactagcacaaaagctgtcatattcgcagttgatacggtctggctgtgtccccagccaaatctcaacttgaattgtatctcccagaattcccgtgtgttgtgggagggaccggggaagggggtaattgagtcatgtgggcgggtctttctcatgctattctcatgttagtgaataagtctcacgagatctgatgggtttatcaggggtttccacttttgctttctcctcatttttctcttgccgccaccacgaaagaagtgccttttgcctcccgtcatgattctgaggcctccccagccatgtggaactgtaagtccaattaaacctctttttgttcgcatgttcaggaatgtctttatcagcagtgtgaaaacaaactaatacaacagttttctatagccagagaaaatagtgccagccagatgcaaagtttgggaaacacattcggcctcttgatgggaggagctgtaagagcacacaataaagag

SEQ ID NO: 915811 - DNA, 4001 bp, Homo sapiens
agatcagattactagtttccaacacagaagtactcaaacaaaggtattctgaacctcaacctactgcaatacatatatcacatttggccaaaaggtagttgttctcaaagtgaagaacccagatctgcagcatcagtacctgagccttgttagaagtacaaattctcaagccccagcacagacctattaccagaaactctaggggtgggccccagcaatatgcgtttaactagcccttcaggtgcttatagtaagtttgagaaccaccacctagcaaatgaagtaaatctgaagttcatgcagaaagccattgctggccaaactaaagggtttgctggtgagagaacagcaaaaacaaggggtatagaactgtttcacattttaaatctgtgccaaatttactgggaaaaaaaaatgtaaacctgtaacttacctcatctgtacaatttgcaatggctgagtccctcacattgtggtaaaccttgttgtacccttggaatgattgtctactgcaatatagtatatacacagagtacaaaaagggtatagctggaggagaaagggtgaaagattatgaatcccaggcgtttggtcctaggaggaaaaattcctgtcctctctccaaccctgcccaccctcttatgctagatagtaacagcagaaagttatcccagactgctccgcgttcacacgcttcccaccaacaaacctcctcccaaggctatcccacaacctttctgaagtagcttcctggatcaagccccacggggcagcttggaagagaagctgggagggatgaggggctccactagcattccttgtggcttctgagtgtagctgccctgggtgtcacctgcagagcgtggatagagaaaaagcaacagttctaagcccagcctctaattgagagcctgggatctagcgctgctccccaggaccaaggttgttcaagaaaggctgggtctaagagtctccctctggggaggtcagtacagattccaaggcagacagggttatcaaagcgcctagaagatgagaacattcattgttcagaaaaacaaaaattagactgacacctttctgaaggaacacagcctatccatggcacaaaaacaaatttttaatcaagacactcaagaagtaggtatactcctgctaaaagtaacgcaggtgctgagaagaggtgccaaaactggctgttaggagtgggaggagaggaaagttgcaagtggagacagcagctactggcttgaggggacctcagggtctgtcacagtggcagctgaaaagcctctggccaaatggacgccaaggactactatcatcacaggtgacaagatcacgggtgagtgtatctgggtgtgtgctggggggctgaggggggcttggtggtgtaaggagatggggctagccggggcaaggagcccgcggagatgatcttaagcaatctgagaggaggggtaagaaaaagctgcggaaaataaaggggcctagaccactcctccctcggttccggggggacagttggcgcggaagcgttaggaggtacgaggtacggactaactacatttctgcaggccccaggagggggcggagggcggtggctggaaaggaaaggaagccgggagcgccatccgtgtccccggagatactggctccggccaccaggaaacacagagaccacaacgtctcggcaccctcagtacaccgccgccaccccttccccaggacacggcgatttccccagactctggggggcggggtctccggtccctccccctcctccccgccctgcccggctctgcccgatctggtccggcccggtccagcccggcccggcccagcccagcccactcaggactcacggctccgacagctccggcggctcctcccctgccccggcttctctcccacccactcccgaccgaaacagcgccgccggatccgagccgcgcggggcctagcgggtcggaacacgtggggcctttgcgcccggaaccggaagcgatcgctcgccccgccttctcgccgagtaggagcctttctaggctgtgggaggtttgatcctctctatgcgccctccgcgggttgcggctcagtgctccccaaggacccagtgcgaagaagcctcggaccccacagctgccgtccgcgacccctaactccactctgcagcgaataaattaacatcttgggcctttcatttacaggcataccttctgcaagggttttctttttcttttcttttttcttttctgtttttgatcttttgtgtgtttgttttcatttggatacctctacgtgtttttcttgatttttttttctttgcattgtccgctgcaacatggtagaaaagggcagcgttaggtttgaatactggctcttgcagtcaccatcagcagcagggcctcggccgaatctctccatctttgaaccctattgtgcatcatataaaacgggcataataataccgttactctgaggactaaatgatacattgcacatgaactgaatggaacatcagaagctcagaaagaaaatagttatggtatcactgttctttcttttcctttgagtgttgcttcgtatttctttactttcaggctgtcttccctgatctcatttgttcatttttgtccgttcggtgacctttctgcccatacttgacattttcctttgctctctgtcccttttaccctgtaagtcaccactctccacgtgccatgtgccacttccttttcatgggacacattgctgggatctgtttactgggtttgaaccaaaggattagttacttttggtggagtggcagtgtattagcgaaacagaactaataggtgtgaacccagaaggcaggacaactcaaagcggggagggggcttccaggtcataggtagataagacacaaatggttgcattgagttgctgattagcctctccggaaggaggcaatcagatatgcatttatctcagtgagcagagaggtgactttgaatagaaggggaggcaggtttgccctaagcagttcccagcatgaattttccctttagtgattttgggggccccaaatcactttcctttcacacggggtatgtataaacatataaaaggagatttattataaggagttggcttacataattatggacgttgagaagtcccaccatctgcttactgcaagctggagaaataaggaggttggtggtataattcagtctaaagctgaaggcctgagaactggaaagggattgaggtgctggtgtctgaaggccagagagcaggaggagatgatgtcccagctcaagaagagagaggtgaatttacttttcctctgcctttttatactatttgggccctcaatggattggatggtgcctacgcatagtggtgagagtgattttctttactcagtctactgattcaaatgctaatctctctctcttttttttttttttttttttttttggacagagtcttgctctgtcgcccagcgatctcggcttactgcaatgtctgcctcctgggttcaagcaattctcctgcctcagcctcccgaatagctgggattacaggcatgtgccaccatgcccagctattttttttttgtgtgtgtgtatttttagtagagagggggtttcaccatattggccagaaacaccctcacagacacaccgactaataatgttttctgttgtctgggcatcccttagctagtcaagttgacacataaaattacccaatacaaagagaaatatacatttcatgaaagcctactgtgtaccaaatatttttctctgtaaatctcattgaatattttaaaatattggtattaagtgcataaataatacataaacatcttcttctaaacatttaatgcattacagtgttaaaggaaaaattattcagtgatacttgttagagcatggtaagggagaccttattcaggaccaggaaaggtaaagaaaccactgcaatgaagtcttgctgtagggatgagagat

SEQ ID NO: 915812 - DNA, 4001 bp, Homo sapiens
cccttccaggtacctgcagaactgtgagcttaaaactggcaagagtgtaaatgtgcatcctgcttcacctgtttagtatggcttatgcccagtggttcttcaaacaaattctctgtggtacagaggtaactagggcacacctgtgacagagcagtaagaagagcaaccatctctgagtctccagagctcctctctgcaggaaggtctgggtcctcgggcactgggacctctatgaagaaaagaaggcaaagatcagtaatatgcagcatgccccaataatgggcaaaaatctgggcatcccccaccatctttggtaggaaggtggccctatcctttctattatgggaaccaagaaactggcctaagggtagctcccatatcccaatcccatcacctatgagactatcagaatgccaagagaacaagcaacaatctgctgtctaagcttggccctgtttatgggggactctagctggcggtactgtctcctcttgacatcctggattctgtgatgtctttccatacagtctatctacccagcttccttggtataggagaaatgtccgagaaatgtccccctccttgcctgccttctgccacaatcccccctttctgctgatgcttcccaccgctctcctgcagggtctggagctcctcttcctggtgtggacgctgctctgccggtgcccccagatctgggctctgtgtggtttcctcaggagactgctcgggggtcgagctttgcacaggatcctgcagctcattaggtgactcaggctccactcctaaatgcaccgtctcctctgacaggacttcctggccgtgaacatggacagtcacctgggaataattccaacttccagtcaccatggagtcaggaggaagttcttggttgtcacgggagcttattttaggagaagatgcctagagaaaacactcccagagggacccagacaaggaggggaaactccagtttcaatggagcaggcaaggaggagctgaaggttatcctccccaggacaaggcaggggatgcgcaggcctgcactgctctctcaccacccccagcctgggcccctgtcacccaaggttccttcccatctccacctgtcccacctgcagctctccttgctgcctgcttccctagctgaccagccaggaagggggatctgtgactggggatctatgagaaccttcgaggaagtcacaaaattctcctctccaggaacccacggctcaacattcaaagaagggaaaaccaaagccatgaccctttggtggctgagacccctcagatggtccctatacaggtgttccaatatccagaaagtcacattcatacacacacatccccctaatccatggggctcatggtatatgagcaacccaagggcagagcccactaataatttatggggatcctgcaagctctccccgcaaatccagccttccagcaaatagtccccctccacatcacacagatcaggactccccctcctcacccaccgccttggtctcctgggttgtttctgcaaaccctccaccagcgtcactgcctcctcgccactttctggccgttggccccgcacccagctctgtagttctccaggtaggacggtaagaaattgttccagcacaagcagctctaggatctgctcctttgtccgcctctctggtctcagccactggtgacaaagttctcggagtctgatgagagcttctctagggcttgctgcctcctggtagcggaagcgtcggaagttctggtgggaggtttccagcaccgggtcatccctctgtaagacagactctggccgacaggtgaaatcatcttccagtttcaccatcagaattccctcttcttcccaaagatcctggtcctctggttccacggctgtagccatttcttggctttggggtggtctcacaccatctagagctcacactgtcattagccccccgcctcagcctggacacagcgaggattttcttccaagggccctggatagagaagtaaagacaaacaagagtataagcatgaaactatacacaaggacaacagcctgagttcaatcataatcctctacacaaacttcttcaaatggttaaatcctcttttccccaaccaccatagccataaatcaacagatccagttgggagaggataatttacaactaaaggtatggtcctctactccctttcctaggcaaggttcatactctgcaagaaaatactgcatttccacttcacaaatactgccaattcccccgcttaagtctccaaaccggttcccttctcttccttcctacagactgctttagtttgagccttcatcatctcctgcctggactactgctctaacttcctaagatccctgcagtactcaactataagcaaagtacaacagaattacctgtggagattttgcaaaacatagtatcacacatcatttttcagacactctgattcagtcaattcaggtaactgtatgtttagagatgctacttgcagttcgaatgtgtatccatggttgagaaacaccaaccatgagggagatgtgtaaggttatgagcgaaagttctggagtcaagctgcctgggtttgaatcctggctctgtcgcttactaggtatttccagagtgggaccataggcaagttctcattctcctaatgccagtttctctgtctatagaagggagataataatggtttttatctaataggcttactgtaaggattaaatgtattactaaagcctatgagcattaaatgtattactatctttgcttagaagagtgatggcaccagctattatctttctaaattatagttccaactatattactcagtattttaaaacaaaacctttttcatgttagtaaaatcagttccaaaatcctgggaatgacacgaagctctttacaatcagcccccaatctatttttcaagcttcagatcctaccttttccctgtatcacctggttataaaaaatgcattgctgatctccctacaacagggtgtcttttcagtcttccatgtctttttgaaggttgttccttctgcacaggctactctccacccttctcctttccacgctacatggtgtgttctctttctttttaacgggtcttgtctttattcccacaatttacagcttaggtccctctcacttctcatctggatgactgcaactgcctccaaatgtgagctatctgcctccagatttgtcaccttcacgtacccactatgatcagaacgagctctcttggcaaacgtgctcatgtccctttcctatctaagatccttccatcactccccgctgtcttgttaagtgaaatacaaacttcaaacattctacattaggttgacgttcatcttgttattctcttcgccctcctctccaatcctttcagacacacacgcacacacgtgtgtacatgcaaagcacacaagagtcccgtgttctttagcttttgaatatgctgtttcttctgattctttatccttggttaggttaaactttaaatttttcaagacataagctcaagcttcatgtcttctgagatgttttctttgatcccatttcccctactctcagacatagttagaaatcacctaagtcctcccgtagtgacctgggcacctctctatcccagtattggtcatattacatagccatcgctcatctttcctgtgaaactctttgaggtcagagactattttccatcaatctccaatacctataataaagtgcacaataaatgcatttaaaatgaataaaactctactccaaagcttcttcctatggtaacaggaagaaccattgtttcctccattatgcttttactatctcttgattattcaccatatcctgttaattccaacttccaaaaaatgtctttcgaatccatccatctcttcatctctactgccatttcccggttgagccattatgacccactagaaggtattcataggaactttaaaaaaaattacaata

SEQ ID NO: 915813 - DNA, 4001 bp, Homo sapiens
atatcttcctactcataattgttcaaatctgagtttctgttgctgtgttttaagtgccactcattctggcactgtttaatgtcgataacttcagaaattattattaatctcatatagtttattacccccaatgttaagacttttttttttttttttttttttttgagagggagtcttcctctgttgcccaggttggagtgcagtggtgccatcctggctcactgcaacttcagcctcccgggttcaagcaattctcctgcttcagcctcctgagtagctgggattacaggtgcctgccacaatgcctggctaatttttgtatttatagtaaagacgaggtttcaccatgtgggccaggctggtctcaaactcctgacctcaagtgatccgcccaccttggcctctcaaagtgctgggattacaggcgtgagccaccgcgcctggcgatgacattcttataattctttatctcagaacaccaagaacagcatgaattatacactagacttgagtgactgaatgaatgaatgagtaaatgttgggaaaagacactgggttggggcagggtcaagtctgcacgctcgaaaatttcacaggcaagcgaggaacgttttctgtccagtcatccatccatcctcattgccacctccaccacccatggagaatgcagggacattttgtaaatgagaaaagacaatcatcctcacttgggatcagactatgagggaaacagtgtacattccttcctcctttgtgttcctcttctggggaagggtagagtgctgagacggctgagctgaggaggaaggcagactgaaaacctgggtatggctttaaattcccaaattcattaaatttcccatatactaactgggtatgacgcacacatctcctagcaagaggtccaaaagaagcctatgaatgctcttgtttcctttcaacgaccagaaaggagagctatgaacactggcaccttgaaatttatttccaaccctctagaaacttcaaaagatacaactcacttatttattgagattattattactactaacaataataggaaagcaccagcacacttaaatagtatctattctcaaggtatttttcttattttgttcagtttaagtagaaaatcattccattgtcctcccctacttgctaaacaggaatactggatttactatcagaaaagtacctggagtcttagagaagtatcccagaactggagctcccaggtcctgatcaaagtctcaactgtgccatcaagcacttgtagaactttaaagaggaccaaacttatagatctccaagatctcagtttccttacctgtaaaatgggggcatgagcctttgccaccccagtccttccttgctgatcaaaggtaggttcctgggcaaagtaataagcaattagttaaccctctttctctagggaaaaaacgtttcatgcgtgccccaagagcaggacaggtttgggctcccccaacgcgtcacgggctgcccaagtgtaagcaccagagaaccagacacacgaacggttctctaggagcgggatctcccggtctccgccacagacccgggggtcccctgctcctgcactgaagacgcgcgcggcctccgttgcttatccagatccccggccagaactctgccccggcaccgaacaccgggcacccataccccggggcccaagctgcttctgccctcctctacttgcctttattaagtcttaacgtgggagagaagccgtgatgtacccatctacacgggtgtctctggggtttctaaaccggagtagcttctcagtccctgaccctcgattttctgcccctcttccttcaagcacagctcgtcttgccctgtccgcttctggctcagtcctcctgagagttcatgtcacttaacggagcctgtgagagtggaccgggatggccaaaacactcagtccacacaaacaatggccgcagcccggctggaccgaaacggaagtcccaggtcttggagtagacactcgcagtgtttccatggatacgggaggggcggggcgggaagagagagcgcgggaaaacgtgactcctgattggccagaagtatcccgcgcctcccgacctttggccgctggcattcctgcgcgggcgggagctgcgggcgctcgggggataaggcgaggacgcaccagcattaatggaataggagaactcccgaagcttttagggccctgggaaagggggcgtggctggaaacggagctactggcttcggagaattctgtgaccctcaccaccgcgacgaccccgaggaaacgctgtcaggtcgcctttggttggcaaggcgtggttgtcctcgctgtcccgcgccttggcggaatgggcacctcactagccctggcactagctagcatcgctctaaactcaaggttagaggttttcaaattccgtcctattgttgccagacaccctcttcgttcctggtccagtgaggctttcctccctcccgccttcttgccaaatcccaggctcctctggagactccaggcagagaagggaaacgcacagtggagctgaaatgaagccatgagaaggagcccctcctcagtgtcctgggaccacagagagttgcaagagcctgttctattatttagctgagtgtgttatattaggaaaatactttcgcatctttgggccctgtccttcaaacttgggctggatcagtaatattcaaacattttattaggcaaggaacttttggtaggatagtcattacaagcaagggactccttggattcaaatctgacaacaccacttacgagatcttggctggattacctaacctttaagcatcagcttaataggcgtaatattgatagccaataataatagtaactatgtaacagacttgttagattgaaatgagttagtgtagttaaaatgcttaaaccagccccttgcacataggaagtagtcttgtgaactatatatttacagtttggtgtttagcaggggtgggtggcccagcgcctatctgcttgagttcaccacacaataagctcttgcattttttatgactctggagaccacattttgaaaattactgggcgtgggccttccctggtttgaacattcagagagcatagcatagcattttaaaaatgtgggctttgttgtctgacggaactgacattaagagctgtcaatcattgttatccactaggtggtggtaagcaagttgtttaaccgctcacccttaagtattttcacctgtaaattgcaatgtatttatttatttattttttattatactgtaagttttagggtacatgtgcacaacgtccaggtcaggtttgttacctatgtatacatgtgccatgttggtgtgctgcacccattaaatctgtctctgcattcagtaattcaactatcaattgcggctatttaaatacattaaaaagcaatgtatttaaatagccgcaattgatagttgaattactgaatgcagagacattgaccggtaagaacgaacactggaagtgggctgttctgccacactgcttccaacctgagaatattacctgaacctcattgaactaaccaaaattaaaagaaaaaaaaaaagctaagaggatccagttttcagagaaacaaaatgtgtatctgaaggaatatacctgctaaagggcagaggccaatatgaataacaaagagcaccaagtatagcatacgcaagacttttaggaatgaattctacccagttacagtttggggtttagcaggggtgcccggcctagagcctatctgcctccgtccaccacacagtgagcatctgcattttttatgactctggaagctacattttgaaaattattggtcatggaccctccctggcttgaatgtgcagagacccaaagcaccagctttgatgggggtcctgggagcagtcaccagatgcctagagatgtacccagggtaggagtgaagaaactgccttgcatgggaagagagggat

SEQ ID NO: 915814 - DNA, 4001 bp, Homo sapiens
aaatgtacaacatacttgaaacatttttggcaaaattctcagaaaacaagaaatgaagtcaacagtgatacaatagaaatgggatattaggtaactttctcagactctgacagataaagtcaaaaaagtaatagtatagtggatataaataatatgcttagcctaatagataaataaaactagataaaatgtagtttctattcaagcacctaagggaatgtttacaaaagcaatttattaggctaccaaatagaaaatccttgataaatggtaaacaagagtagtggaaaccatatttattactagaatgcaaaaccagaaattaacaccacatagaaaaaacaatttcacctactttaaaattcaaatgtttgcttctaaaaaaaaagataaaagagaatcaaaaggacaactgcaaagtatctaaaaacagtaaaaacattgtacgtcaaaatctaaagcgcacagctgaagctcctgataggcaatggaaaagccttacatataattaaacaagaatgagatgcattaaatatccaactcaggaaataaaaaaaaagcaacaaatatactgggaggtttgtaggtgaaaaacacaaattaatgaattactcactgtaaacagttacagagctaggacagggagagacgttcaggatggcatgctgcatttaggtaagatttccgaggtggaatagttttgatgatagagatccaaggtgtgacgtgactgcaagtagcttaagtggcaaatgatgaacactggaatatacaaagccaggaaatataacagttaaactctaaagtactgaatagatgcctctgatataaaggtgggattcaggattaagacacggagccagtaccactgtgacggagggacctgaagttgtagtggatggttagactaatataaccaggtggcaccagttctacggttttatggccgcaaggaactcgaacagctgctaattatggaaaaaaggtactgtctgtgaagagggttatttctaatcaaacaggttgtaggtaggacagctgcttgaggtaagaaccacctggcgagagtagcttagataaagaggaacagaaaacagtttgcaaataagtgactgaatagaagtcatttatgttaaatggagaaagaattattttaaaataagtacgatacttggaggttttaatcttttagggaggtggccaggaatgactgggaaaacaaggcaatatgaattaattaaaactccattgtctttcccagttgattgatccagtcacgcttggtttttccatgaggcatcaataccagccattcccaaaccagctgatcataacatactaaccactctgcgcgtctggagactgcccctattgcagagtggaagaggcgacaggagtgtggttaaatccttgctttagcggagctggatcctgaccccagccgtcccgccgcccaccccctcgccctctgtcgctgctctcaacgcttgtcttacttccgcagcccacgtttccatccctcccgtcagctcgcgccctcctccaggttttccggcacagaccttggagggcagcgtggaaactgggtaactgcaagcaagctgaggtaagctgcacgttccgcatggacgccctcaagcgtgattcccaattccaagaccccgcgtccccaccgcccgctgacgagaacgatacccgtgagcaccgctcctctccagtggcccgttcagtcactcacaagcgccagttctcagaggagccgcggaatcgctgtcttggacagtgaagggagctggcgttggtaatcacgctgcaactaggaatccctgacctcgccgaaccctcaactcactgccggctccgagtttcataaattgccgcggaacaacctcgacgcactcttgcgcacgcgcaccagctgtggaaggaaccccctaggagcccccgcgacccggatcggtgaggtagaccaggcctttgccagccccgtccctttctgcaggccccgtccctttctgcaggccccgcccacgccgcacacttggaactctggccctgtgaatggactcacggtgagcttctagtggcttaaagaaatgagcgtcatacttccggcgctgcctcatcccgtccggggaaactagtccaaatcgcctttctgttccccacaccccatttgtctggaatcaaaaaacaatgacaatttcgacaagacattgtctcttacatggtctttattggtttattggttcacagattcattcattcagttttgtatggaagtgagagggcttgcagttcgttgttcagttttggcttgttaagactgaggtactttgtggcatctgagaagcattgtcaattaggcatttggatgtaggcatttgggaatttagagatgtctggggctagacctgtaaaatttgggtcaatctgggtagatggtgattgatgctatccattggaataggactgcagagaaagggacagagaggaagagagaaaatagaaggaaatgggctggaattggcccagggaacaccaacaccattggttgagtcaggaaggcggacctgcaaaaaagagagaggaggatcagcctgagaggtaggaggaaatctggtgggtgtggagacacagagggaagggatgtgtgtgtcacaaaggagagaatgcttggtggcattaagtacatgataatatgattagtgcttgcctagaggcatgtggacagtgctgtaggagcagagtgaaagaacttaaaccagagagagctttatatctaggccaggagtggactaaggtaaaacaagatggcaactttgaacagctagtgacacaaaaaaacaaggacacaccatatagtttcttttatttctttttaaatagaccttattttttagagcagttttggatttacagttttggaaaaattgagaaggtaatatacagagttaccttctactccacaactagttttccctgttattaccctcttaaattattatggtatatttgttacaactaagaaaataaaaataaaatataaaaataaaaaataaaataacattgatacattaagtccacaatactttattcagatttcttattttctttgcttttttcttttcttttctttctttctctttctttctttcctttctttcttctttctttctttctttctttctttttctctcttgcttgcttgcttcttttctttctttcttctttttttgactgggtctcactctgtcacccaggctgccaggctggagtacagtggtgtgacagctcactgcagcctggacctccctgagctcaagtgattctcccatctcagcctcccaagtagctggaactacaggtgcttgccaccatgcctggctaatttttttttaaatttattttttgtagagatggatttttgccatgttgtccaggctggtaaggaccagacttctttagctggtttatttgttttgtttttatcttttttctttcctctgatgcaggatcccaactggaatatcacattacatttagttgtcatgtctctttaggctcttctggactgtgacgatttctcatactttccttgtgtttcctaaccttggcagtgttgaggagtactggtcaagtattttgtatgatctccctctattgggagttttctgatatttttcctatgattagactggagatgaaggtcacagagatagagtgccatttttattatatcatatcacaggtacatactatcaacatgacttatcattgttggtgttcaatttgatcgcctgactcaggttgtgtttgtcagaagacattttttttctttccaacagtggcaatggatgcagcaatattcagtttccagaatcagcagctccggcagcagtgtcctgtgctgatggtgttggcaggtaaatcatgcttctagtgctgaatggaagtcttgtcctcatagagccaattctgtggtacaattttggtctgtg

SEQ ID NO: 915815 - DNA, 4001 bp, Homo sapiens
agcagttcagagcctggcagcaccagctggtacacttgcagatgaagcctctcgctgatccgcactggggccacatttccctcactctccagcctgccccgttgtaccaagctgcaaagcaaagtaacagccagctaggagatgctcactattcaagtggtcttccccgaaagccccagtccccaagcagtctgggtcctaaaggacgccgtgcctttggaacattcactgcaaaagagcactgaataggaaatgacagtcagcaccgggttccatcccaaaccacaacagaaaacctcaaaggaacgacacactctcctctgacttacctagtccagccagaactctgctcacaggcacacacgtctccccatgggcctaatgacaggttctgaaataaaccaacaaaagtccttctcaaatgtgttcgaggggtcgggtaggaataaaaaaagaaactagatgaaactttcctgggacaaatttaagatgaaactcctggaaggttagaagcctctggttctcctctaacaggacagtgctgtctgattcttcattcagtaaggaccaaaaagtctgtctcctcacctccctcccaagggtatggagaattactaaattgaacacattactgtcttccagtgagtactaaacagaaaaagtaataaggaacaccagctttttaaaatggtatttattgggccaggcgcgggggctcacacctgtaatctcagcactttgggaggcccaggcaggcggattacttgaggccaggagtttgagaccagcctcaccaacatggtgaaaccctgtctctactaaaaatacaaaaattagctgggtgtggtggtgcacatctgtaatcccagctactcgggaggctgaggcatgagaatcacttgaacctgggaagtggaggttgcaataaggcgagatcgtgccactgcactccagcctgggcgacaaagcaagactgtctaagaaaaaagaaaaataaataaaataaaatggtacttattgtgcagtgaaaccttttatcttcactatttcatcagctcctccatataatcccaagagagccactgctttgtttcacagatgaattaaatgcggcacgtaatttaaccagctaggtgacaaagctggaatttgatcccatgctttcttaattccaaaaaccttagctcttgaccttcctcactcactgctgacactgtatgattccagctttcaacaacttttcaaacctcgattctttaactactgctgctgagaggagacagtcctgaagagaagggacaagactatctcctatctcttgaaatactctctttcttcaaattgaaaagctgtctagcaatgtccaaacctcccctacattttcaagggcggagggaagtcgctctatccttcaatacctcctcctgccgtggctttactccctcgcccttctccttggaggcagactcctcttccagcggcccccacagcaggccgggctgcagggggtccccgacacaccagacccccaagcgctgttccttggcgagtgaggggccaagggccaagccccggggaaggctctttaaagcgaggatgtctcgggtcggctcgggtgggacgtctttgaggccctgcgtacagccttctccggaagggttccatcctaagtccaggcccaggcgcggctcgcgggctgcagagagaagggaagacagtgagggagccacccaagaaggtgggaggtggggaaaagtgtgggaggaaaccgcaggtccaggtgggcctgcggagcccgagggacaggtgagggctctaaggagggccctgaaagttttgaggaggctcaagggctcttcagaagcccccagcgactctgagggcactggaggatcctgggatccggaggagagaagactgaggagaaagctgaccacagagcgtcagatccacctgggccaaggttgagggtcgcggacatcgcaggtcactcaccgagttgcagcgccttcttcccctccaagagcagctcctccgcctcctccattccgggtcagaaagcctccctacgccggaagtgagcttcctcttctcagctcctccaggaaacagtcacggacttccaaatttttttctcaggaaagaagcctcagagctggacctcattggtgcacaggactgggagtttgggagtactggggaggcagaactctgtccgagagcaatgcgaacctcggattccggaggtgcaccagtgattcgactagctgggaaagcggaactaattgttccagccatctctttgggagcgacgagtcggacagttatgctgttacctccccgaggcaggaacttaggcgggcatgtgcaggaagtgggcggggctcctggaaaggccatgtttggggccggaagtgggttggaggtgtggcggaaatggttggggatagaagagagcgggagggggcggttcccgttccaccgcggagccggatgtttgccgagccttgacaggcgtggcagagggagcagtgcccgagcgcggtgagctgctgggcgcggggtctccccgggtggggatggggaaaggaaaggagctggccaggtcgtccgaagggatggggtccggatggggaggaccggagcagatccgaggaggggaacgggggtggaactgggctcagaggcctggccttcctgcagggtttctgccccattttggcgcctgcaataagaggacttaatcattttcactaccttcttcctgccttccccagggcagagtccaggccggatcgctgtcatccagcaagccggcgggagggggaaatctcccagatctgatctggcaaagcactaagaagaagaaatttgggggaagtgttcctccttgccacttattaggccacgctttcagttcaacttatttatttttttaagacggagtttcactcttattgcccaggctggagtctcggttcactgcaacctccgcctcccggattcaagcgattctcctgcctcagcctcctgagtagctgggattacaggcgtccgccaccacgcccggctaatttttgtatttttagtagagacagggtttcaccatgttggccaggctggtctcgaactcctgacctcgtgatcctcccgcccccgcctcccaaagtgctgggattatagacgtgagccactgcgcccggcctcagttcaacttcttaatctgtgaaacaggataattgcaaaacgtaacctgggctttgtaaaccgtgaagctctatgcaaacataattgtagttgagagttgtaattgctgttgtattgtggtgggatttgcaactgggaggccgattccaacgttgagaatatgatttcttttctttttttttttttagacggagtctcactctgtcgcccaggctggagtgcagtggcgtgatctcggctcactgcaacctccgcctcccgggttcaagcgattcttctgcctcagcctcccaggtagctgggagtacaggcgcgcgccaccacacccggctaatttttgtatttttagtagagatggggtttcaccatcttggccaggttggtctccaaatcctgaccttgtgatccgcccgcctcggcctcccaaagtgctgggattacagccgtgaaccaccgtgcccggctggtcctctctttcctcactgtaaaatgagcttagtagaacatgcctcatcagtgctatcgtgaggttgagtttgtgtccccagttcatggtcctatataggccctcaacaagtgtgggttcccttctttacttaggagatgaattaattggttcattcattcaacaaatgatagcatctactatatatcaggtgtcattctgaatagaccagaagttcttaaacagtgattctcagaaggtgtatgaacctcttaaaattgcatacatctcctaagttttcttagggaaaaagtccacacatgttaccaatttcagaaaagtctacaac

SEQ ID NO: 915816 - DNA, 4001 bp, Homo sapiens
acctagtccagccagaactctgctcacaggcacacacgtctccccatgggcctaatgacaggttctgaaataaaccaacaaaagtccttctcaaatgtgttcgaggggtcgggtaggaataaaaaaagaaactagatgaaactttcctgggacaaatttaagatgaaactcctggaaggttagaagcctctggttctcctctaacaggacagtgctgtctgattcttcattcagtaaggaccaaaaagtctgtctcctcacctccctcccaagggtatggagaattactaaattgaacacattactgtcttccagtgagtactaaacagaaaaagtaataaggaacaccagctttttaaaatggtatttattgggccaggcgcgggggctcacacctgtaatctcagcactttgggaggcccaggcaggcggattacttgaggccaggagtttgagaccagcctcaccaacatggtgaaaccctgtctctactaaaaatacaaaaattagctgggtgtggtggtgcacatctgtaatcccagctactcgggaggctgaggcatgagaatcacttgaacctgggaagtggaggttgcaataaggcgagatcgtgccactgcactccagcctgggcgacaaagcaagactgtctaagaaaaaagaaaaataaataaaataaaatggtacttattgtgcagtgaaaccttttatcttcactatttcatcagctcctccatataatcccaagagagccactgctttgtttcacagatgaattaaatgcggcacgtaatttaaccagctaggtgacaaagctggaatttgatcccatgctttcttaattccaaaaaccttagctcttgaccttcctcactcactgctgacactgtatgattccagctttcaacaacttttcaaacctcgattctttaactactgctgctgagaggagacagtcctgaagagaagggacaagactatctcctatctcttgaaatactctctttcttcaaattgaaaagctgtctagcaatgtccaaacctcccctacattttcaagggcggagggaagtcgctctatccttcaatacctcctcctgccgtggctttactccctcgcccttctccttggaggcagactcctcttccagcggcccccacagcaggccgggctgcagggggtccccgacacaccagacccccaagcgctgttccttggcgagtgaggggccaagggccaagccccggggaaggctctttaaagcgaggatgtctcgggtcggctcgggtgggacgtctttgaggccctgcgtacagccttctccggaagggttccatcctaagtccaggcccaggcgcggctcgcgggctgcagagagaagggaagacagtgagggagccacccaagaaggtgggaggtggggaaaagtgtgggaggaaaccgcaggtccaggtgggcctgcggagcccgagggacaggtgagggctctaaggagggccctgaaagttttgaggaggctcaagggctcttcagaagcccccagcgactctgagggcactggaggatcctgggatccggaggagagaagactgaggagaaagctgaccacagagcgtcagatccacctgggccaaggttgagggtcgcggacatcgcaggtcactcaccgagttgcagcgccttcttcccctccaagagcagctcctccgcctcctccattccgggtcagaaagcctccctacgccggaagtgagcttcctcttctcagctcctccaggaaacagtcacggacttccaaatttttttctcaggaaagaagcctcagagctggacctcattggtgcacaggactgggagtttgggagtactggggaggcagaactctgtccgagagcaatgcgaacctcggattccggaggtgcaccagtgattcgactagctgggaaagcggaactaattgttccagccatctctttgggagcgacgagtcggacagttatgctgttacctccccgaggcaggaacttaggcgggcatgtgcaggaagtgggcggggctcctggaaaggccatgtttggggccggaagtgggttggaggtgtggcggaaatggttggggatagaagagagcgggagggggcggttcccgttccaccgcggagccggatgtttgccgagccttgacaggcgtggcagagggagcagtgcccgagcgcggtgagctgctgggcgcggggtctccccgggtggggatggggaaaggaaaggagctggccaggtcgtccgaagggatggggtccggatggggaggaccggagcagatccgaggaggggaacgggggtggaactgggctcagaggcctggccttcctgcagggtttctgccccattttggcgcctgcaataagaggacttaatcattttcactaccttcttcctgccttccccagggcagagtccaggccggatcgctgtcatccagcaagccggcgggagggggaaatctcccagatctgatctggcaaagcactaagaagaagaaatttgggggaagtgttcctccttgccacttattaggccacgctttcagttcaacttatttatttttttaagacggagtttcactcttattgcccaggctggagtctcggttcactgcaacctccgcctcccggattcaagcgattctcctgcctcagcctcctgagtagctgggattacaggcgtccgccaccacgcccggctaatttttgtatttttagtagagacagggtttcaccatgttggccaggctggtctcgaactcctgacctcgtgatcctcccgcccccgcctcccaaagtgctgggattatagacgtgagccactgcgcccggcctcagttcaacttcttaatctgtgaaacaggataattgcaaaacgtaacctgggctttgtaaaccgtgaagctctatgcaaacataattgtagttgagagttgtaattgctgttgtattgtggtgggatttgcaactgggaggccgattccaacgttgagaatatgatttcttttctttttttttttttagacggagtctcactctgtcgcccaggctggagtgcagtggcgtgatctcggctcactgcaacctccgcctcccgggttcaagcgattcttctgcctcagcctcccaggtagctgggagtacaggcgcgcgccaccacacccggctaatttttgtatttttagtagagatggggtttcaccatcttggccaggttggtctccaaatcctgaccttgtgatccgcccgcctcggcctcccaaagtgctgggattacagccgtgaaccaccgtgcccggctggtcctctctttcctcactgtaaaatgagcttagtagaacatgcctcatcagtgctatcgtgaggttgagtttgtgtccccagttcatggtcctatataggccctcaacaagtgtgggttcccttctttacttaggagatgaattaattggttcattcattcaacaaatgatagcatctactatatatcaggtgtcattctgaatagaccagaagttcttaaacagtgattctcagaaggtgtatgaacctcttaaaattgcatacatctcctaagttttcttagggaaaaagtccacacatgttaccaatttcagaaaagtctacaacttcctaaaagtgattgcctaaggtgatccttaagatttttgtaaaggtttacctgctgagaatggaaaaattaatctcagagttgggtgtattttgcacagagtagagcaggcttgtgggtggctggtgtcttaaacaggcaggatacttcatttctactacttgatgttagaatttccctgtgctagcttcctcaccctcccactgaatgggagtttaacttccaggctcagaagttaaactgtgggttgggggtagtgggaggggccagtctgactgggagatgggaaccactgggcttagttatgctgggaaaggaggttatgt

SEQ ID NO: 915817 - DNA, 4001 bp, Homo sapiens
agagattagagtgagttatggggaagctgttctaacacttattgaatgaatgagcgaatgtgtgtctacatatgtacgtgaatgttgagggactcaccgagggacaccaggtgactgatattttccagcatcacatctctgtacagctttctcttggatgtgtccatcatggcccactcttcctgggtgaagtcaatagctacatcttcaaaagtcactttcttctaaaacatcacagacattttagtttagacagagaaatccctttcaatgtccggaagaggaaggctgagatgacatagctagaagctgggtatgcagaatactcagtgttttgagttccagccagttcattctcagtagtaagctggtatctgcatttcagattcactcacagagatatacccactctgaatccattaaactttactataaagaaatatcgcatgaggtgtggcataatataacccagatatttttcagtaatgtgttaatcacctctacgtaacgaattataaaattttcacttgaacattcataaataaaatgaaatttaccatgaatttcaagtaaattacagatttgtcacaaggcaaataaccatgatttactactttttaagcacgactgtgatgaaataaattatttctctagatgaaccacaggtttctcaccaatcaaatggttaaaagacctatgatgtgttttgaataatctaatgaactaatagaaaatgtgtttcctatctagcaaatatttattaaatataagtcattggtcccttattcattaaaaagttagaaagtaatgacccagactccagcattcttcagaactgaacaagctttatgcagaatataggattcaattcatacatatagtctccctaatgttatataattcaggtgttcatgacaaggcttaaagacagtctagcagcacaagacaagaccgctgaggctgctatactgaggaaatcttagtctgatgattcctgtgatatgaagcctcctgttctcaactttctcttggcaatccaaacatcagttatcattgtttctcttttaaatttaccttgtcacttcacttgttcaaagattaaaaaagcctcttcattttttttttctaactagcccttataaagcgtttccacagaaccctaaattgtactctatctactatattccttcttctgagtgtgcaaccataattaaataattatatttcttatatgttactttcagttaccagaaggcaaaaaggttaattaccaaaaggtaaaatgaatagggataagaataataataacttcttcagttgtcctttcacaaagtttttaaaagctcaaatatattttatcaaactcttcttttccctcaacactgcacagctcttgcccaagtcctatcacactggatttattgaactcagctgctagaacatcagactcattgttgggctgtgatgttctgctcttcactcatctctatcgcctgtattcatcacaatcctaagtctatttcagccaacagtacagttaatgggtcaattatttccctatgagattataggatggatagaagaaaaagaaatatataaatgaaacctctcatatcttttttgtaaatagccttaataggggctggaataaagtagtgtaatattagaaattatattgataatttaggagtctttgacacacgatacccaacctagagtcctgagaaaacttaattggaggccagataccggaaagccttctgattgcatttggaacacccaggctgggtggattttacatagtaaaaacaaacaaaaataataataaaactgaaacacccatgcaaattggagaaaactgcccatttgccagcaatatgggtataatttcagtagaaagaggcatcccctactcactagtgaatgcattgtcaggaactcagtttctctctgtcttcctctggatttccacttgcagacactttaggcactaagaaaagctgaggttggagaaagaacatgtgagacaccagtcttgtgcacaattttcagatcaacctgtgatgaaaagccagactttcactgaagtgtgacaccagctgcaccacagcctaaccaacagacacaaacatgcagaggcttctcctcttttcctgtggtcaaaattaggaagcctatgactatggttgctaaccaagaaggaacacagatatctcgtgaatgagaacatcaaaagcatggagttttgtatgttaattggcacaagtccagatattcaattccctcactgattttaaaacacagggatccctgactccatccacatgtggaatatgatttccacctatagataaacactgggatttctcagattttattctcctagctttatgccctagccgtgtttctccaacacccaccacagcctcctgaagacttactccacttttactttcactcaactctgacttttgtatttccccttggaacttggaaataatcaagtaagaatctgttctacggtcgagtgtggtggctcatgcctgtaatcccagcactttgggaggccaaggcagttggatcacctgaggtcaagggttcaagactagcctggccaacatggtgaaaccccatctctactaaaaataaaaaaattagctgggtgtggtggtgcttgcctgtaatcccagctactcaggaggctgaagcaggagaatctcttgaacccaggaggcagagattacagggagccatgatcccaccactgaactccaacgagggcgacagagcgagactctgtctcaaaaaaaaaaaaatctgttttaggatggggataatcaattgagggatttatttcacttagagggtaaacactcccatcctgctaatctagcccttaaaatctcctgcatcagaaattaacaggagtaccttgagtcttggtgtttctttcctgtgtatacagtcacaatcctctaggatgctcagaaaatacaaaatgacgtaggggtgggagaaatttagcagctcaatctgatattttactaacgtggtatctaaaattcttgcaatcatggtttatattagtctttgttagttgcaatatctctgattatcatgatacatatttgctgagaaatactgatgtccatgtacatattcatacatagatatgtaggtatataggtgcatatgtttatatgaatgtatgtgtttgagacagggggaaacatgcatgtattatttccctgccaaaaatataaaaataattaaatatattttatgtacaaatgataattatgtgtcataaacaaaaaatttactgacccatttgtacacgaagtccaggaaaaataaaagggtaactttgtattaattgtgacattgtgcttacagatgtacatatacatccttatttaaccctcataataaccctgctggttacagtttatttacaaatttaataaatgatcaacagagtttgaaaaatatgacaaaattacaaaattagaaaatgacccagcaatatttttaattatattctgcctgtcactgcctcttcttgctttttgacaaaattactcccctaaccaaggttctctaagattctggggactccagtatttagaccccagttcccaaacatcattgtgtctatttttactgccacatttaacgcacatttacagacttcaacaagcacttttcaatatcaacttttttcttattccttggactattttctacatctgttcatcaggactccagtaacatatgactccatctgcctgtccgttccatgaatgtacctgacagtacatgtattatgtagtctataattcaagcagaacagatattccctcaaaaaaataagatattagagaaggcctacaaagcttcagtgaaaccagctgtaacccttaatattattaccatgtaagctcttcctcgaatatcaaaataagatttgggctttagagaatatttatgtgtaattataa

SEQ ID NO: 915818 - DNA, 4001 bp, Homo sapiens
ctctgtgccaacctagtaccgtgtgctttgctgcagaccctggcgcttttgctgctgagccccgatgcccacatgagccatgaggtgtggaaacgtttgtgaactgcggggtggaggggccggcagggtggtcacagagcctccttctctacaggggtgtcacacctgctgccctacttctacctcctctacttcaccgcgctgctggtgcaccgtgaggcccgggatgagcggcagtgcctgcagaagtacggcctggcctggcaggagtactgccggcgtgtgccttaccgcatcatgccctacatctactgaagcggctccaccaccccaggtgggggcatgtgcccactcatccaccagcacacccaggaccaggagcctcgacacacttgggactcaagggcttgcaccccacccagccctgaggatgaacaacctcagagaagaggtggtttagagcaaggaaaaaaatgaaaccagtgaccaaaatcggagatgctcttcctcctttggataaacactgggaacccttggtgcacttctctcccctaggactggctgggtcagcactgatcagggagaagctgagcagtggcttgtgggcccaggaatctggggtctggtgggacaatagctatccctcagaaacaagcaacagggctgaccagtcacagctttattaatgaccagggtaacccgttcagctagggagctcctcaatgagagttcttggggcaggtggcacggggcctccccaaagccgctccagctccccagtgagggcggccacctcctcggctaccacagcatgggcttggtgagccctggcgcagtctagggccaggggtgtgagggccgcctcattttcgttggtccaggccaggaggaactggcactttttccgggcccggtaaagatgatctcgctcttctctagccacggcctgtttccgggcacggcccagggtctgtgccaggtcccccagtgctgccagcgtgtagcctttctggttggtcgggccctcgcccagcaggatgcgggcgacctcgtgcatagcccctcgtgtgcccaggggccccggcgggtgctcgcctgcttccagcacgtgggctgccgcctgcagggcttcttccgcagaggcgaagacttgctgggcacccagggctccggaaacgccgagcagtgtggcacagaagtcagagagcagcgcgtcgtcaccgccgtgatacagggcgagagtatgcgcgtaggcgaacagcacattgggcagctggaagcgcacgagcggcgagactgggccgcggctcaggctgactatcgcggggatgcgggtgggtacgacgggcgtgcaggcccccgggacatctccaagaacccgctcggcggccgcgggctccgcggcggaggcatctttcacagaatccggcggggtcctcgcaggggcgagctccagctccgcggcgtcactacccggggcattatccagctcctccagaagctgcggtccggctccgcggttccaccaccacggccgccatggaggcagcagccgcccggcctcaccgcggctcagcagccgctcgaaggcagctttttcgcccggcgccagccgctcccagagtcccgataggccgccgggcgccgggccggagctgaggcctgcttccccaggctcgtcctcggtctcgcgttgctgacgcagccggcgtagggcgcttgctaggcggctgggaggagcgctgcaaccgcggagctctcccagcacctggtcacggtagaagttttctgcgcaggtgccatgcgtccggtagcagcgcagcgagcagtagggcgcattacagcgagggcaggtgtaacgcgctggctggacctcccccgccgggcagaagccacagggcccggccggctccatggcaactggcaccgcgatctacctgcgaacgcacgccggtggtagttcgaaacttccggggcttcttcgattacttccggttcgcagcgcggccgacggcgcgctgtgttttcgcaaagcttccgaggattctcggcaatttccgcccacgcccgaaagccaagccccacccctttccctagtagggcgagagcaggcccagaagccgggcgtcaggtacgagccccgccctatgcgatgacgcaaggagcgaaaaaatgggtctggcgagcgcttcgccggtgccacgtctccccctagtggtcacaccaaaacgtggcccgatcatctaaagagaaaaccctctttttagcactacaatgtgctgtggcataaatccatctttactaggcacctactctgggccactaattgtgccaagcctacgggaggcgatgcatccctgcgctggacacagacaaataaaatgcactaggggacacagacaaataaaaggacagttagggccaggtacggtgggtcacgccggtaatcccagcattttgggaggccgaggcgggcagatgacctgaggtcaggagtttgagaccagcctgaccaacatggagaaaccccgtctctactaagaatacaaaattagccgggcgtgggggacgggtgcttgtagtcccagctactcctgaggctgaggcaggggaatcgcttgaacccgggaggtggaggctgcagttagccgagatcgcgccaccgctctccagcctgcgagcctgggccacagagagaaactccacctcaaaaagataaatagaaagcagcatttaagaaatatctgagctcctatgatttttttcctccaaaactgcctcttcttttcattaagtatcttctcattaaataccactattcatccatcttattaagtgcaggccccattctaggtgccaagaacacaatgcacatcaaagggagccgggggtccctgttctaatagagctcactcttgtggtggagtggggggtgtgatgaaccaaactgtgagtgttctttgcatccctgctactactggtggtctaagcttcctgacccctcatgtggatgacaacacattaagtgtttttcctaactttcttgccagccctccagaaaaacctgccagagaaattagatcacaagtcagatgagatccatctgttactcaaaacccttctgcgaccctccattgcacttggactcaaacccaaactcctctctatggctgacaaggccttgcaggatctgcccgcccccagccctagacatcacctcttccccatcttcacacagtcctctaggcttgaaatattcccctacctgatcacttgactggttcatctcaggtctcactcacgtcatttaaacaggacctctcggctgggcacagcggctgacacctgtaatctcagcactttgggaggccaaggtgggcggatcacttgagcccagttcaagaccagcctgggcaacatagcaaaaccctgtctctacaaaaaagtacaaaaaattagccaggtgtggcggtgcatgcctgtagtcctcagctactttggaggctgagtaggatcacctgggcccaggagttggcggctgcagtgagccatgattgtgcaactgcactccagcctggatgagagagaccttgtctcaaaaacaaaaaagaaaaggccgggcactgtggctcatggctgtaatcccagtactttgggaggccgaggtgggcgatcacgaggtcaagagatcgagaccatcctggccaacatggggaaaccccatgtctactaaaaatacaaaaattagctgggcgtggtggcacatgcctgtagtcccagctactcagggggctgaggcaggagaatggcgtgaacccgggaggctgaggttgcagtgagctcggattgtgccactgcactccagcctggcgacagtgcgagactctgtctcaataaaataaaataaagaaaaaagaaaaacaaaaaaagaggccctctctgggatgctattgtatctgtccacatcctccccctttctaaactgctggaaggcagaaacc

SEQ ID NO: 915819 - DNA, 4001 bp, Homo sapiens
cccatcctgcaggtgagaggccatcatagagcagcaaggtgaggccacctagcatacccaggcaggggacgggcccacgagagctgagctggccattaggcagggagctggattcatggtggattccagaaagtaccttccagagcttagtttccctcacccaccagctcaacagatcttcggctttggctcctttctggttcatgaggggcctcttcagcctgacatgacactaggacaagcttgcccctgtgccagagcatgaacaacccctaccttctccagcacgtggcagcctctgtaatcggccgagaagactgcaggctcctgcggcctggaggtgacccagtggtagcagatggagcagttgttgacatcaaatcggttcccaaattcatctgcagtgggggaaggggaggggccagggatgttgaagggtgcagggagaggttgctggggtctcggaaggagttcccactcagcagccaggagacctgggttcttgccttagctttgctattagtttgttgtgtggtcttgggcaagccccctcccctctctgctctcagtttccacagctgtaaggggatgggagggtcttaggatctttctagctagggttccctgctcacagcacacggcagcaggcaggcacgaagatgaggtggagaagggatacacagggtctcaggcactggcctgagtatttcacatcacttcttttaagcttagttatccacatcctgtggctgaggcagctgaggaagggagggtgcgtgagctttcttaggtgcacacaatgaggggcagaatgaggatttgaatcctgggctttgtagaaagatctgaacccatttcccaggttaactgtggctgctgcagttgcttggagacaccccctaggtgtccaccctgcttgttgccccagaacagcctgggcattccctgggtgtgggcatgtccccatgcccttgttccatgagcacggccaggttcatcttccccaccttgcagatgaggaaacagaggcttatgagtcaggtcagttgtccaaaatcatcccgtttagaagctgcagatccaaaccccagttctaaacccacaccaggccacgcctactaggtcctgctgctggaagtggtttatggaccctcagcctcagttttgactgagcgtggttagagatgcagagcctaggctgggtgcagtggctcacgcctataaccccagcactttgggaggctgaggcaggtggatcacctgaggtcaggagttcgagaccagcctgaccaatatcgtgaaactccatctctactaaaaatacaaaaagtagctgggcgtggtggcacacacctgtagtcccagctactaagaggctgaggcaggagaattgcttgaacctgggtggtggaggttgcagtgagctgagatcgtgccaactgcactcaagcctggagaacagattgaaagaagtgagactgtctcagaaaaaaaaaaaaaaaagaaaagaaatgcagaggcttggccctgccccaggtccactgaatcagaacctgcacctcaacaaggtggccaggtgtttcccatgcacactaacgtgggagaagctgccctgggtgatgattctcctccttgcccttttctgtggtgagggggtggggggctggacacccccaggctggagggaggcctctgttcttgctccttcaggggaagggtcccagctcccttctggcagcagcccgtggccagggaggcaggggccaggactctgccagcactcacccaccaccttgaagcggagagtctggcctggcctggggaacaccagcagctgcattcccttgatcccacagtcgtagctgtgccggaggcctgggaggccagggtcgggctggagccacctacccagccccagggtggcaaccagcagtagcagggccacagggtaaccccaggtcgtggctgagcctcctgccatgagacgccacagacacaccccctactccctcgccaccagagctgggcccaggccttttatggaggaggtggcaagtgggtgcctgtaagggcaaagggggcccacctggaggagcacccacctggccaccaggggctgtggtgaaactcctgttccaaaggcagcgggaggcagaaagctgcacgtggcccctcaccctggctttctgtctcacagctgtggctttggaagggaggagggagctttccagaaaactgaggttgcagatgggctgtgggaagggatccagggctaggaggtggcactgcagacctcaggccctccactgtctccctctcaccccagcctttctgcattcccttcctgccccaacaggctctccaggtcctccttcctgccttgaggcctcaggaccactgggagctgccggcctggttagtacagtcacagctcctcaggcagggctttaggggcattagagcaagaccaggaagacacagccctcagagctggcagcggaatggggactgcaggtgagtaaacagaccagtagcacctccaagggctctcctgaggattcagccggtcagtatgatgatgactatgactaataaaaaataacaaggacaactaaatgtaatgtggcatctggatgggatcgtggaacagaaaaaggcagtaaaagtgaagaaagtggattttagttaataataatgtgtccacatttgtttgttcattaattgtaataaatgtatcatactcaagtaagatcagttatggggtaaactgggcctgcggtgtatgggaactgtctgtactatcttctcagttctgtaaatctagaacagttctaagacataaaagtggctggaaacaacaagaatggcctgtggtctgccatgattacagtgccaggtcttgcttgtgttagatccttataccgcctgaccatcctctgaggaagggactgtcaccagccccacgtcctggcactaattcctgcaagtgattagcctagggcccagcagcgtttgagctcagcaaacattagaaaatgcagctattataattagcagctgctggaaggggagagcaagaggcttgatagctaagagcccggttctggtgaggttgcagagaaaaaggaatgcttatacgctcttggtgggggtgtaaattggtttgaccactgtgggagtgtggtgattcctcaaagagctgaaaacagaactatcatttgatgcagaaatcgcattactgggtatatatccaaaggaatataaattgttctatcataaagacactgaacctgcgtgcatatgttcagtgcagcatgattcacaatagccaagacatggaatcaaatgcccatcaatggtagactcaataaagaaaatctggtacatgctgagcacggtggctcacgcctgtaatcccagcactttgggaggccgaggcgggcggatcacgaggtcaggagatcgagaccatcctggctaacatggtgaaaccctgtctctactaaaaatacaaaaattagctgggtgtggtggcacgcacctgtagtcccagctactcaggaggctgaggcaggagaatcgcttgaacccaggagacggaggttgcagtgagccgagattgtgctgttgcactccagcctggccgacagagtgagactctgtctcaaaaaaaaaaaaaaaaaaagaaaaagaaaaaaaaaaaaggaaaatgtggtacacatacaccatggaatactatgcagccataaaaaagaatgagatcacatctcttgcaagaacatggatggagctggaggatattatccttagcaaacaaatgcaggaacagaaaccaataccacatgttctcacttataactgaaggctaaatgatgacaacatatggacacatagaggggaatggcacacactggggcctattgaagggtagagggtaagaggaaggagaagggtggaaataataactattgggtgctaggcttagtatctgggtgatgaaa

SEQ ID NO: 915820 - DNA, 4001 bp, Homo sapiens
gatgtagcaaacaagcctgaagttgacgggtggtgacaggtgagcctcctttttctcactcattcaaccatttagcccaggcactcatgccacgttagagatataatagtatatatatcagtcctctcatgggactccccaaccaattaaggagacaaataactaaagatgcagctataatatattacttctgtcataataaatataagatgcagtggaatactcaggaaacacagataacccaaggggattaggaaaggctcttcagaggtaatgttatattgtctgatgaggcctgaatatatactgagggagggaagtggaaaagacaataattataacatatgcaacattctagcagctccagcaccaccatatgcttacccagcaagtttccaacacttagtcagagactcttcagacacatgggacactctatataagcaattattccttgagctgctacaatcagaaaaccccagcttacccttcgtgcaggctggtcctgctccaggccagagatagcacgggtgatcaatccttcaacagtggtcagagcttgtgaacaagaacaaaagacaagtgtgacttagcctcagctctgctatcaagtccctgtatgaccctgggcaattcacttgaactctctgggtcttaatttcctcatctgtaaaatgagaaggccaggtgcaaggttccattcatgtctgataatagtgatgctaaaattctacaataaacacactatggtattaccattactttctaccatctcgagctgttttacctaagctttccactcatgattaactaatgaagatcacaatgattacatggtagaacccatacacaaaccactagacctggcaccagggggttttgcaagaaagagggtaagattctagctacatgcgaacagcccaaatactctgatcttaaacttacctcctttctggctaaaggcaggaatttcaaaatctagctcaggaatccttgtggcagcagagtcagtcttcaccacttctctgttcatgtcctgggaagaaaagaatacgttcagtacaaagagactgcagaacagcttctcctcaagtaataaccagaccgtccccttccatcagaccgcagcccagctgtctctccctctcgccactccacagggtccagactgctcctttcgaatagtacaggtggtgtgagccaggctgtccaaatggtgagaatactattcataacaactactgctcatttcataccctcagacaacatttacaaagcattttcacaaatcttatctcacttgagctgatgacaacaccagtaccattttacaaaagaaactaaggctaggagacatagggggatttatttaagatccgaccgcctggaccagagctctgaccccagtaccgaatctctctctagaatactgaggtacctgctctgaggtcctctcacctccagagccctgacagacaaagtgtagcgcactccctggtcctggatcctgcctgccgactggatctccgtgttgttccagccacagtgctcgcaggaaaaggagctcactattatttctctgaagaagggaatcttggtgagcaggaggcgcgtcatgccctggtgaagtagaaagtagctaaggaaaaaaatcaatgaaactccctttccccgccctactatctccgggcgctcctcggggtccccggccgggcccacctggctgggtctgacccccggctcgtcccggcacaagccctacccacccgccgctcgcggccgcgcccccgcctcacattgcagtaacagttcatgcatagcgactcgatctcggtgggctgctgctcctcgtcctcggcgctgatgggccggaacaggtgatcaggggcaggcggcggggccggggcgggcgacggggcgacggcagcccccgggggccctggttccacagccccgctggccgccatggccaccacgcgcaattcagacctcggcttcctacttccgccgctctcgcggccccacccctctcccgtcacttccgccagctgccaccaccccaaaaaaagccgcagactccgggcactcggggaacaatgtcgtcaagggctcccggttcccgggtttatatggctcgaaccttacatcgccagccggatccacctcaactcagccgtcacttcccctaagacgtcctcttagaaccagggcacttttttgctccttcacaatagctccaccgcacggggttctattggtccctacgtcggtctacaagagccttgacgacaaggggctggacttgtccctgaggaatccctgagaaggtgcgcccggagccgggctgcttggttccagtgttgggccacatactgcttgcgtgctaggtcgcccctccgggtggctcagcctcttcccctctctcacaatccctgaatccctctgtccctttctgttcttcccactccctattctgtcctcatcactaccttccccaatcccagcctcaagtacacagccctcattttcactcctacctcctcatccccatcatagcccttgacctatgcttttccagtttcctaacaacaacaaaaacaccttttattatttctacctttctagcacttcctctctccaggtgctgggtccacaacccagttctgttgccaacattgtcaaaatccacggtgtcagggaagaccagcctgcaggcatgatgagcctacatatgtgtggggtctgtgctatggggttggggagcaggcaggtgctgagaacccggggacagtaggctgagctgggaggaaagggggccggacagggaagtccaaagacaaggagctgtgtttaccctttccacgtcctccaccacaccccagtttcagttcccaggggatctatagggagcattggtgcccctgagtgaggggagtccccagaagagagtccggcataaaaagaggccattcaaactctagaacagcaggaacaaaggaggcagcccacctcaggaatcttaggtccaccagggccacagctcttccagacacagcctgcattccatgcacagtgtcctgtgggggagcaggctagtgaacagtgcaggtgcagaggaagggcccgtaacccaggccctcctgccaggtgtgacagacagccgttgtctagccaggatccctgaagcagagcccagccagaccccctttgacagacctggactgggagtgggtggatgagaaagagcagcaagggaatggagtgggtgatgggtgtgctttggggatagtggtgaggccactgctttcagacatggtccaaatgagagtcacgccaggcaaacttctatcataaacatctatttcatttgagccagaagtctaggcttcaacttgggaacccagagggaggggctggagatggggagagcacacagtatgctccccagagggtttaaggagctcccacagttgggagggttcagtcccttatttaggtgtagagctatgtcaggaaacatgggctctgccctctcctatcacagcccacacctttcgtacccaccagcatcagagccagcagggatattcacacaccatcacatgttctccccatgatattctctttctcccttctattcccctgatagctgccatggcagccctggggagacaagtgctcctctctgtggaccagctgtagcagtggccaccaggcagccagaagtgactagagccaaactccaggatgtagtggcacaggcttccagcatcacggcaaacaggcttgcagataatcacccacatgcatggtgcctctccctccctactccctcacccttgaatggagtaactcatgagcattcccaaatgagcactgggaggctgggtttgcaaagcctggtgaatgtaatgcatccagattggggagtcgcaggaggctggatgtgcaggagacagcagcccctttggtggcctccctgtcctgcacaggaccttcca

SEQ ID NO: 915821 - DNA, 4001 bp, Homo sapiens
ttcaaacgatcctcctgcctcagcctccagagtagctggggattacaggcgcacaccaccacgcctggctaattttgttaaattattattttgacagaggaataaatacatgaattaaaaaaaagaacaaattatgcttgccctcaaattcctacgtagtaaagatactatatacttgagcaacaagaatacaggactgaaatgtaatacagcaacaaagttacaaagccttccaggagcacaaatgagaaagagatcccctctccctgagggaagataaagatttttttttatgcaggagacatttgaaatggaacttgaaaaatgggtttgaaaaatactacaggtaaagatggaaaaatggcaacataagcaaaatatgggattaaaaaagggagggagagcagagaaagtaattctcaattggctgaagattcaagttggtaaaggaaactagtgaaagcaaagaaaggcatgttgggtccagaacacgcaggagctagggtcgcttgccatgctagagtaacttaaaaacctgtcctctttccatcacattaaacagtggtgaaaaatccgaaagccatattaaagaagagatgtcagggatatgactacttaaaattcaggaaactacttttgtaaaatcaagagctgttaggaagggttatacctgtgcccttatggtgtgtggcaaacttgctccctcgaaaccctacttgactcagatacacaaaattttaaatgaaagcaactgaagatgtggacaaatactggcaaggtaacaatatcagtacaaagcaaaactgtgtgtggctacgtgcttccagtttttgtatcaatctcaaggcagcaacgtttacgtaggtaccaatgacactcagcacagcttcatgtgcttgtagatgaagttttaaaaccacattaagaggccggagacggtggcttacacctgtaatcccagcactttgggaggccgaggcgggtggatcacctgaggtcaagagttcgagaccagtctggccaacatggtgaaactccgtctgtactaaaaatacaaaaaaaaaaaaaaaaaaattagccaggcgtggtggcacgcgcctgtaatctcagctactcgggaggctgaggcaggagaatcgcttgaacccgggaggcagaggtcgcggtgagccgagatcactccagcctgggcgacagagcaagactccatctcaaaagatagatagatacataaaaataaaaacatactgagggtttgggtttgttttttttttaatgtcggggaggagaaaggtgcaatcctccaggctattttattcatcaacaaatcaaggagtgggtggaggaaataaacactcatcgatggaagaaggggaagggggatcctgtcttttctattcctctcctgcgctcgctccctagcttcctcggagcttccagttgctcctcccgctctgctggtctcttcagtctccctcttcccgcggcacacccctccccaacataactccactctccagtgctctccagccaccgcctgttcgtccccacagtcccaggtctcctcgcctcctcagttcccaacccctgtgtgggctcccctccaagatccctcctcaatccacacattctgggcccctccactcctcattcagcccccacaactagatctccccaacaggccccactctgctggtccccactctgtctgcccttagcccctgactcctctctccagtcccttcacacaaggacccggagtccccttccagtcagcagacagctgccccgctctcaccttgatctcctccacccgccgggtcaggcggctgatccgggtccccagatcctccttttccagcctcccggagtgtgccaaaacttctgtcacgaacgaggccatggccaagacgggaaccaacgctgactgggtcactctcgtagccagcgccgcagctcccgtcccgccggccgtcttgacgcgaggcctgccgggaaacggagtctcgcgggcctcagaccgccgcccggaaggcgaggggcgcactacaactcccagcaggcaccgcgccaatcccgagatgggatttccacggtgtcccgtagttggcaaactgtaagcagacgcgttttcttccttagttgttttcaaagttcgttgcttcccgcccgtttttcactggaggaaattaaacgtttttaataaccaggtctaactgaacctttctaaacttcaaaaggcttacttgtaaaattatctaactgaaagagccaacgagcccatctcgatcttttttcctcaacttttattgggccgctgtggcaccagaatctacgaatggcgccctctagagttgtgtaaagaagtggcgtcacctcattataaataaaaggttgcttataattgcatctatgtacatatattacatctacgtgatacattacacatttacattacctacattacatatttatattacttagatatacataatattagtcctgtgtgaacaagatacttagtactttctgtcatattataaatatataaatgtgtcaaaagcttttaaaaatggtttcattattttaatgcattgcatacagaaagatgttcacaatattctatgtatactatgattcctttttaaaaacttaagtgtataaccattggtcagaaaacaaaaagtatgtaagtatgtatgtaaaggacagacatcaaattatcctatgggtggtggatttatggtatttattctcttctctgcccttgctttctctatttttctgcagtaaacatacacagtcctcccttggtatggggggattggttccagaaacctcccctgccccagtagcaaaatccgtggatgctcaagtctcttacataaaatgatgtaatgtttacaagtaaccagcacacatcctccccatacactttaaatcatctcttgattacttataagacctaatacaaatcaatctaaatgctatagagtcgttatattgtattttgatttgcattattttttgttgttgtattgttattttttattagttttttccagaatatttttgatctgtggttggttggatccgtggataccaagagccagatgtactgttttgattaaaaggtttttggttttttaaaaagatatattgtgagggttgaccccaagtaggcactgactctaagatccctgacaattgttaagtgtctttgagacaatctgcttatcccagtgaagcaagggccaattcacatgccatgagcaaaggaaacaaaactgggattgagagaggaagcactgaaaacagccaaaacatcctgagaaactcccttccttggaaaaccaaatcaatttctttttggtagacctgtcaactttgaattctaactgcaactaataataaatgcccaatgacaaagaatgactgatagatgaaaattctgaaactttgtactgcatatttattaagcaattatcacatagcagacattgtgctaggtctggggacccacaacatgtgaatatataatcacagaaaaatatgataattactaatttgtaggtagatgagggatggatctagatttagtggaacttaaatcttatacagttgcagggaggggaaggactctttaaagaaaagaatataaaataatgaatacaaaattagatgtcagccttagaaggggcttgtgcaagtaatgagctgtgaagtttaatctgcccctgaggaagatgcaaatggcagaggaaatattggaggaagagcacccagtctctgactgaattagaaaggtttcacaatgttaacatttacaggaggccatcactttggactgagttcctgcactaagcccaacagaccaaaccaaaatggagtcactcatgctaaagctctacttcgccaaaccaaaactaagctgtctgtctgaccttctgagaaatcaggagaatgagagataatcaccaaattcccaaacctgccagttt

SEQ ID NO: 915822 - DNA, 4001 bp, Homo sapiens
tacacacatacatacatacacacattcagcagccctgtgaaaattgtatggtaagcactcgcttccactccacagatatggaatctgagcctcaaagaaagtgagccattacttcacagtctcagttgtggtaagcagctaataaggtcttaagagtgttacctaaccatggatgtttgcattttaaatatttgcctttcagctcatgattagacaatggctccatccaaaaatggtcctctggtgattgactttagaccttggtaactcatgtgcagtacagaaactttctcagtaccctgacatgtaatttaagatcaaccctgtagtttttatacatttttgctcacagaactcctaaaataatttttggactctgtgcactccttacatattttcaagtaaacatatttttatcatgattttaagtaatagcaaaagatattatttttgatgatattttaaattaatacttagattacttttacaattttctcatgaataataaacactgtagtataagatacctactatcactatttaaaagtacattaaaaaattcttttaatggtctgatatttaatatctttctcttcttttttcctttttgaatttgaatttccatgccaattaccatacagaaatttatcctaaatttttatatttcaaaaaatgttgtgaattattcttacttctttattgtcaagcatctatacatatacgtatgtatacttatgttcacatatatacatatatgaatacatatacataaatacatatatatgtaacatatgtgggtaggtaaatttaactttaactcctcttttaaatagaatgtaaccataaatttataaatattaaacatttccttctgactgagctatgttcaaaaatacttgtatataactgatcaaaacaaaataaatacaaagtatgattcatacatattagatataaaattaaaatacttttgaagcacatctttaatgagaatgatgagctgttttttcccccagtgaatttatgcatccatggattgcaagaattaaacaacattaattctgttactatttttgttttgtgtagctataagtgctaagaagaatggctcacataaaagtaaataaatggcaggtaaaacaattgcatcattgttaccacttcttgcaacttctgcattacatgccaaaaatcacctagtactctattatcaagaatcccttctcatcactcatcagctggtatttccttcagttcctccttcagttgtgttgaaacaaagaattcatcaccacctcatctgcaaaaggatttctcttctgacattagagtcccttgctttttcaatatcaacaccagtatttcaaattgttcctttatttggcactctatagatttttatactccagggcattgttccatgtttggttgtgggagagaattgtctttatttttataaaatagaaaatggacccttgagaaagaggaaataagaaaagataaatagcatggtctcaagtagatcaatatgaatgtgaatatctaaaatttattcttttaaaaagctaaaaatttctgacaccccttaggaaggctttgcatattagagcttcagagagttggggaagaatgattaaaagtaagcaagtaatgagtaaactagatttgtaaaatctggaaggaatcttagagataagaagatgacagtatcataggaaagaaaaaggaatgatataaagaaaaatctgcaataaatgaaggactctaggttcatgcttcacgctctctgtgtggaactcacggttttccagagactgaggcgtctgtgggcaggaggaccaagaggagaagaaccagacttggatgaaggagtttgttcttccccatgttgcagaaagaaggagctggaggagaacagactgtattgtaccctactccctacaatccatctggtcccaaacacttcccaaagcaactgggctttatgctgctctgtgtgcaaacaggaagttccacccacacaagatctctaaacaaagttgaggtctctgaacattctctggaaaggtcattgatggcctatttatagtcaaggttaattcctggcgggctaaatagaatccctggagggctaaaactacattcccattcccgtaagagctcacttttaccgtacagcagctaataagcttttcaacctcttctctccctcactcccccacaactcctcacaacgccttttatggtgcttctcacatctcttgtatgaatagctggcaaggaaaactacaatttaagcaacactgggcaggctcaaaatagatatttcactacaagtcagtgtggctgcaagttctccattagatatgcctaacctaaatgtttgaagccacatcagaattcagtagtcctctttgaaaatggcacgaattaaaccagtagctttttgacattagggatattactgggttgcagatgaagagccaggccctggaagaatgatcatagaaaagagtttcctgttttaagaaagtgaaacaaagaaacgtgaagtaacaggacttcaaaaacaaattttgacctattgtgcctaacaaacttcccaattgcctttaccatcgactacacagacttccttactgccttccaaatatgatactcctctgcaaactttaagtcatataaatgatttcattaatccatccatccacccatgcatttattcatccatctattcatgtagctattcagttgctttgtaagtattttttgatcctactagggctagacatcatgcaagattctagagatagggtggtcaaataagtatgaaaacaggcacttaaagattttacattcttgttggggcaaaaacagacagaaaaacaactactgtataaaatacaatataacacctactgtataaaatacagtataaaatacaatataaaactactgtataaaatacagtagccaaacatattattgcagaagttcaggatgctctgggagcacataagagagcacataacccagacctggaaccttttaaaaaaattttgagggaaagcaaaatgtaaattaagctctgaagtatgagtagtggttgtctcgaagaacaaagagatgaaaagagctttctaagcataacgaatgacagatgcaaaggagggagaagaatcacggcacatgcatgaaatgaaaactatttggtatggaggaaatattcctttctgatacttcaaatcagaaaggaatttgtcaacaatattaaggtattcagaggagtactcagtggattgacttcaggtttgtttcctggaaagcttgctcttattgaaatttgaaagggcagctagaaagaggtgatccaggatgcaggaagaccagatgggagctggtgtaataatataggtgaaagctgatggcattttgaactatggaatttgtggtggtattgaaaagagcttgcagatttatatcatatttaagaggtaattatagtgctcagtgaatatatcaatgtgaggaataaaggaaaatgtgtctttccattttcctggctcgtcacggagtgaattgtgttgcctttagctgggtgagtgaaacagaagaaacacagattggtgggagcagaaggaggacagaagggctgagggttgggaagatggagtaagtgcttgtgggatattcacgtattaatattcacaggagtttgacatttgaatcttgagcttacagcagtgtggtctactagaaatagaatgtgatcgccctgtgtaattttaaattttaaattttctagtaaccacataaagagaaacattaaattaattttaatagtgtattttatttaatccaatatatccaaaatatgatcatttcaacatttagccaatataaaattgttaatgatatcttaaagacttttttttcataatttgttttcacaagctggtgtgaattttatacttacaacatagatcaatttaggctagcca

SEQ ID NO: 915823 - DNA, 4001 bp, Homo sapiens
cgagatcgcaccattgcactccagcctgggcaacaagaggaaagctctgtctataaaaaataaaaaaaatagacagggtctcgctctgcagccttgaactcctgggctcaagcgatacacctgcttcagccttccgactagctgggactacaggtatgcatcaccacactcaactaatttttttttttttttttgagacagagtctcactctgtcactcaggctggagtgtaatggtgtgttctttgctcactgcaacctccgtctcctgggttcatgcaattctcctgcctcagcctcccaagtagctgggattgcaggcatccaccaccatgcttggctaatttttgtatttttagtagagacacggtttcaccaggctggtcttgaactcctagcatcaggtgatccacccacctcggcctcccaaagtgctgcacacccagctaattaaaaatttttttgtacagacaggatcttgctatgttgtccaggctggtcttgaacccttgacctaaagaaatccctctgccttggcctcccaaagcactgggattacaggagtgagccactgcacctcagccagcatgacttcttaaaataaaaagtaggagagagatggatttcaacacaaaccccaaacactaaagatataaatataatacaacatccaacgtcaacactatcttctttccctgacttgtcttgtttccaaccgcagcacacacaagatctttctctatgcccaacttttatcttcacccttctccgctatcattttacctgattgtcaaagcacatctcgactgagaactgaattttgtcagctacaacacctccactgggaaaaatggcatagatcaccagggaaggatcaggggccagtctcgaagtgaaggtcagtgagagagagaaggaggctttcagtcctgaaagagaagagggaatatacaggaaaatcagaatgcacattcacctgccaacggcatctaaccatatgtacttttcactgagccagtgcaggcaccatggtgcaagttacttctcatttttctcttctcctgtgataactgttagtgctccaattccattacttctgtggataagaatttttttattttattttattttattttatttatttttttttttttttgagacggagtctcgctctgtcgcccaggctggagcgcagtggcatgatctcggctcactgcaagctccgcctcccgggttcacgccattctcctgcctcagcctcccgagtagctgggactacaggggcccgccccgacgtccggctaatttttttttgtatttttagtagagacggggtttcaccatgttagccaagatggtctcgatctcccgacatcgtgatccgcccacctcggcctcccaaagtgctgggattacaggcatgagccaccgcgcctggccaagaattgttttctggaatttaaaaatatcctgtttgcttccgggaaaagcatgtacactcacctttcttcttagagttcaggtgtttctgcccctccatcaccaaacttcctttccctattaactaaagaagaaaagaaaagaatcaactgcacagaagttacagtaatttcaccttggaccaacttccagagcatctctgcatcccttcatgaggagaggttcctttcacagttcagagtccgggtcaatacctcacccagcatccactagcttgacaaatgcaggatgctgccaacgggtcctggtggctcctcctgcagttggaggtctggctgagaaccacgcaggtggatgggaggagtctgacagcatagaaattgttcctcaccatagataactgtctgccatttcttgaagatctccaaattttattttcttataatctttgtaacagaaagtcagcgaaaatctatcctcataagtgttttttaattacagctcaatttaaaattcagtggaaataatttcatcctaaaccaccctgagcccttctgacattgaaccctctagaggagaaatctcctcttctaactcccccttcccgtccactctcacttgaaacagaactcggtgatcttgtttgcaagcaggctctcatcccacgctcctgcagggctccaaggtcggttccttggacgcctgcccagcattagccattccacgtggctcggccctaacttcacttttgtcctacacctccccacacttcggtcctgaagacagagcccgctttatcactggacttgttattttccacctatcttttctcttttcgttgtattaggatgattttttttttttcacttaacgacaacactgaaaccatggaagctactgcaatgatccagaggggagaaagtctctcatagactgacaggaggataacggaacaaagaggctccgagccatcaaacctgaggtttccattctacttcctgactgtcaccaaggtgacaggaaagctgcttatccttatacattgctttcaggctaccaagttatgattttatttccccaatgaggctgctatcgatgtgaatttaaccccatatcatctatttgataatattgaccaatggaacacagaatgaaatgtatcctggctgggctcggtggctcatgcctgcagtcccagcactttgggaggccaaggtgggcagatcacctgaggtcaggagttcaagaccagcctggccaacatggcgaaaccctgtctcatataaattaaaaaaaaaaaaaaagtatcctgagtcccatccctccccactctccctcccaaccacccagctggttttgtttttgtttttgttttttttggtcctggccagcactattttctcaggtaattcctcattttattttcccacacaattttcctgtgttcctgctcagaatctctttcttcccccaatgttttccatctcttacacctatactgggccatgcagtatctcatagccacataggaatattgaatacttgaggccgggcgcggtggctcatgcctgtaatcccagcactctgggagactgaggcaggtggatcacgaggtcaggagatcgagaccatcctagttaacatggtgaaaccccgtctctactaaaaatacaaaaaaaattagctgggcgtggtggcgggcgcctgtagtcccagctacttgggaggctgagacaggagaatggcgtgaacctgggaggtggagcttgcagtgagccaagaacacaccactgcactccagcctgggcaactgagcgagactgtgtctcaaaaaaaaaaaaaaagaaaaaaaaaggaatattgaatacttgaaatgtgctcagtccaaactgagatacgctttaagtgtaaaatacatactgagtttcaaagacaccgttgaaacaagaatgtaaaatatctattaaaactttttatatggctttcgtgttaaaatgttaatattttggatataatgggttaaataaaaaatacatttaaaattaatgtcaactgttcttttacttttttagtgtggctttaaaattgtttttaattagatgtgcatctgcaattcagatagcctaggtgcaccctctggctgactcttctcattctctttccttcccagcatactctcacccgtccccgtttcccggtctcacatagtaggagaagctgatctcttggtcagggcttgcatcggccgggtcgatgtaataatccaccagcacttcctggggctggccacatttcaaggggccgtttagccggtggatgccaaggaagctgcgggttgtgctgtagaagggtcgcaggtgcaggtaggcattttggtagtaacgtggcacttgttccggattatatactaagtcttccatttgaaactttccctgagaataaaagagagagagagaattttagcatgtgctccaaccatggaaaccccacggacttgttacggttttcaaatagagctctttctctcaaatcttcactgcctgagaatggcatgtgggtatt

SEQ ID NO: 915824 - DNA, 4001 bp, Homo sapiens
tacagtcaacaataatttattgcacatttaaaaattactaagagagtataattggattgtttgtaatacaaggaaatgataaatgcttgaggtgatggatacacatgtaccctgatgtaatgattacacattgtgtgtgtgtataaaaatatctcatctaccccataaatatatatacaccagctatgtacccacaaaaattttaaataaaaaaataaaaaaaacccaaacatagtttcttttcagggtgcctgactttgaaatctcagaatgaagtgcccctgtaaggacgaatgaacaaatacaaaaaaaaaaaaaaaaaaaaaaaaaaaccccagtagctcaagccaaatgccctcagtgctttcttagccatttacaagcagtttgttgtaaggcccagcaacccagttatacttgccaaattctattccagaagaaatgtgtacttttgttttagatacacaaactcagtagcaacccccacctacttctcttgcttgtgtagcgcagcatgtattcaacacttgcactacttaatccccccagattttcctctcctctgcactcctttttttccaaagcctactgtcaaaccacaaatcccctctttacccctgtgcacagcggtttccccaggttttagtcgaaccccaaatatgtgactcttaccttgctgccctggggtgtagagaggtttgtcagtctgtacaaaggtgccgttcccctgcctctgaattagaacctttttcttctcctcaaagctgatgttatttccaactcccgacacccggattgtggccacttcttctgtgccaccagcaggaggtggtacctgaccaagaaaggggacttctggggaggggtaagggattgggggaacagaatcaactggtctcaacccaacagtgagttaaaggaaagagctgagttagatgggggtagcaaggatagagacataaaacaaattaccacgaggaagaattaaggtcaggaactaaagggagaaatcctaggtcgaggaaaccgtgggtgagttatagccggggattgaggttaagttgagaaaaaataggtttagaggccgtggcaaaagataacagaaattatacttaaagtagattatagtgagcctagggaggagaataggcaagtaagggattcgagtgagggctgagtctgtgcttacaagaaaggagatacaatgtaagtgcctcttcttcagtccagagtattctagcaacttctgggtcttgtccttggtctccagagtaaccgtgaatttaacatcactgtacccagggctcaggtccaaacaaaccttctgaacggaggggaaatttagccgggctggtaatgtcaccaggtagtttctattaaaggagcagaaggatttcagggcaataatgattcattcactcgaaaaatccagcactctcctaagcgctcagcaagtagcagtgaattagacagaccaagcccctgccttccttatgcacctcattttctacaagaagcagaggggcaacgactcagtgcacagtcttcaacttccgccatcaggaggccctcaccgagcacacatgcctagagcaccaaggaggaaattaggcctatttcagaaaacagggcacattttaatatttatcttttttaaagcttcctcttcatgcgtcagcctccctctctgggtaaaggatcagtggaaccaaagaagagaaaaaaggaggaggaaattaagataaaccaaagttgatctccccatctccatataaatgtttgagaaagttaggcgaagaagccgctgccctaataaaccaattctgacaccaagcactcacggaagttcttctgcaatggctggtgatagggccaacattcctagaaggagctgagcccacatctttgtgggtgagacagatttttccagggtcaggggcagagatcgctccgcgtagctttatatactaattccaggtagggtgtgcagtgatgactgatgctatagtcagtcacctcctggcacctggaacacaggaggactgtgttcctccttctgtaaccaccaggttaggtggtggaccagggtagggccactattcacttctttaaagttgtttctgcctggaacatccatactggttcagccagttttgggggaaaaccagagctgagtattcataatggtaaagctctcagaacatattttgaactcctccctttttttctggtctcattccaattcctgttctcatttaatgtccttattttcttttattattcaattaaggtgtagttgggaacacgggtatgagaacagtttcaatagaaaagcagtaaacttggccggtcacagtggctcacgcctgtaatcccagcactttggggggttgaggtgggcagatcaccaggtcaggagttcaagaccagcctggccaacatagtgaaaccctgtctctactaaaaatacaaagaaaaaaaaatcagctgggcatagtggtgggtgcctatagtcccagctacttgggaggctgaggcaggagaatcgcttgaacccgggaggtggaggttgcagtgagccgagatcatgccactttactccagcgtgggtgacacaacgagactctgtctcaaaaaaaaaaaaaattaatactactcagtattgttgtgactgtatggaaatagggacacacacagtcctagagaaaatagaatgtggataactttctcatggcaattttgtaatacacaccaaagcctttgagatttgcatattctttcactcagcaactcctactctggaaatgtttcttaatgaggaaaaaaaggacagcatgcatgtatgcacaagtgtaacactgagttttttcacactgttctttcttttttttcttttctttattttttatttttttgaagtagagtctcactttatcacccaggctggagtgcagtggcacaatctcagcccactgcagctttgacctcctgggctcaagcgatcctcccacctccacctcctgagtagctgggaccacaggtaggcaccaacactcctggctaattgttttgtatttttaatagagacagggtttcaccatgttgcccaggctagtctcgaactcctgagctccagggaccacctcagcctcccaaagtgctgggattacaggtatgagccaccgtgcccagcccacagtgttctttatgatggtaatacttagaagtcacctaaaatataaattagtctaagtgcagtggctcatgcctataatcccagcttttgggagtcagaagctggaggattgcttgagcccaagagtttgagaccagcctgggcaacatagtgagaccccgttttgtaaccacccaatggattcaccttgcttgctgcctagacagagccgatttatcaagacaggggaactgcaatggcaaaagagtaattcacgcagagccggctgtgtgggagactggagttttattattacttaaatccttgagccttcgtggatcagagtttttaaagataatttggcaggtaggggcttgggaagtggggagtgctgattgctcaggttggagatggaatcatagagggtcgaagttagattttcttaatgtcttctgttcctgggtgagatggcagaactggttgggccagatgactggtctgtgtggtgtcagctgatcccatggagtgcagggcctgcaaaataactcaattactgatcttaggttttacagcagtgatgttatccccaggagcaatttggggaggttcagactcttggagccagaggctgcatgacctctaaactgtaatttctttttttttttttttgagacagagtctggctctaccgcccaggctgaagtgcaatggcgcgatctcggctcactgcaagctccgcctcccgggttcacgccattctcctgcctcagcctcccgagtagctgggactacaggcgcccgccaccacgcccggctaattttttgt

SEQ ID NO: 915825 - DNA, 4001 bp, Homo sapiens
tctcatctctactaaaatacaaaaagttagctgggcgtggtggcacatgcctatagtaccagctactcgggaggctgaggcaggggaactgcttgaaccagagaggcggaggctgcagtgagccgagatcgcacctctgcactccagcctggcaacacagcaagactccgtctcaaaaaaaaaaaaaaaaaaaaaaagaaaaagaaaatgagccgggcgcggtggctcacgcctgtaatcccagcactttgggaggccaaggcgggcacatcatctgaggtcggaagttcaagaccagcctgaccaacatggagaaaccctgtctctactaaaaatacaaaattagctgggcgtggtggcacatgcctgtaatcctagctactcgggagactgaggcagaagaatcgcttgaacctgggaggtggaagttgcagtgagctgagcacgccactgcactccagcctgggcaacaagagtgaaactccatctcaaaaaaaaaaaagaaaatgaaaccaggtagtgtagctccactcctacaagtgcaaagtggatgacctatgtaggagattattcagtgcaaccttatatctgatcttgctgagcttcaggtaaaagctcagaagtggtaatgccatgaggtgggggcagggagcaggttcacctaatcaagccagaaagcaaggcaagttactagagatgaaatggaagtactttttccatagtgttcctgggaagggcaaggaagggaacctgacatttattgagcatttgagttctataataaggactaaaaatttcatatgatttaggatatacagctctcgtggagacagcctgaataaaagtcttttgaagaacaccccaaggtaaaggggtgttgactcattttccaggatctgcagactgtgacccaggaaaccctttgccatgcctcaccaaatgttgatgcatctcttccacacttgctcccggtgatggatgaaggcagttcttgtgccatggtccagccttccaggggtctttaggggatcctttgtcagttgtaggacaggaagattgatccactatagcacaaaagtgaggagtgtgacggtgattcagtctcttcccaaatctttaattccgtgccatctccaacccaccgctgggctaagtataagagattccagaggtctgtttcccatttccacaaagctaacacttgtgagaatgggaaacaagtcttagctcccgtatctgtgcaactagaataatatttcatagggttgctgtgattatgaaaccatatgacatttttagaaaacacctgactcagcctctttcttacatagcaaacgctcaataaatgtcagtttcccttccttgtccttcccaggaacaccatggaaaaaagttccatgttgtatccttctgatcctccccagatactgtccccaacttttagatagttctcccgcatcctcacactccctagattctccctcattctctccattccctctaggcctcctccacagctccttaaccgttcccccgttatactccaatcccagtcctaaaacagattccagcccttctagcctcctgccggggccaagctgtttccactccgccagactctgtgaccctgcccctgtcacactgcctcctttccccagtagtccccgactccgcccccatgcctgtaggtcccctccctcctcgccctggccacctggccccggaagtcggggggcgggctctcatagctactgcccgtcaccagctcgttattgtgctcatatagggtgacttgaccccgaggcggtggaggagggaacaaccccagagagcacatcttgccggttcgcaggacgtctgcagtcggcaaactcctggccggaacggcacagaccgcactcccgcaactcggttcccgggctagattcgtatgcggacgggtaccgcaagggacaaacggcgaggcggaactcaacggaagtgaagaaaagactaacgggaaagaaggacgagtacgcggtcccgggacagacctccaaagcttcttcctgcgccccctggcggccggagggggagcagcgcggacacgtcccccggccaaccgttggttaccaggctggagtggggtttttttctgttgttttccatgagactactgtttttcccagctccgaattcccgaacaccttctcccactcactatcttagcgcttagaaagcccgaaataagccacattcagggaagtaccaaattaatcctcccaggcctgtggatcacccagaggaaaatacaggctatgtcacaggcagctggctggaaagctgagggaaaagcctcagagaggaggaacagtgctgcacccacacggttaggcgtcctggaaagggaggtggggacggttggaaaactaacatttcctgccaggcgcggtggctcacgcctgtaatcccagcactttgggaggtcgaggtgggtggatcatctgaaaggagttcgcagactagcctggccaacatgctgaaaaccccatctatactaaaaatacaaaaattagtcgggcgtggtggcgggcacctgtaatcccagctaatcgggaggctgaggcaggagaatctcttgaactccggagggggaggttgcagtgagccaagatcgcaccattgcactccagcctgggtaacaagagggaaacttcgtctcaaaaaggaaaactttattttattttatttttttgagagacagggtctcgctctattgcccaggatgaaggcagtggtgctatctcagctcactgcaacctctgcctccccggttcaagcgattatcctgcctcaacctctggagtagctgggattacaggcatgcttcaccacgcccagctaagtttgtatttttagtagagacgaggttttaccatgttggccaggctggtctcaaactcctgacctcaagtgatctgcctgctttggcctcccaaattgctgggattacaggcctgagccaccttgccgggctgcaaaactatttcctgagcacttgttacgataagtgcttttataatctttacaaccccataaggtgggtgctgttctgtcaccatgaggaaagtgagtcacagagagattggacctagatacacccaaaccagttattctcacttaagaataaaagtaaggctgggtgtggtagctcacacctgtaatcccagcactttgggaggccgaggctgatctcttgagcccaggagttcaagaccagcttgggcaaaatagcaagaccctgtatctacaaaaaattcaaaagttagccagcgtggtggtggcaagcgtctttagtccagctactcagaaggctgagataggagaatccagactacaatgatccaagatagcaccactgcactccagcctgggtcaaagagcgagaccctgtcaagcaagccagagagaaagagccgggcgcggtggctcacgcctgtaatcccagcactttgggaagctgaggtgggctgatcccctgaggtcgggatttcgagaccagcctgaccaacatggagaaaccccatctctactaaaaaatacaaaaccagccaggcattgtggtgcatgcctgtaatcccagctactcgggaggctgaggcaggagaatcccttgaacctggaaggcggaggttgcagtgagcagagatcgcgccactgcactccatccaacctgggcaacaagagcgaaactccgtctcaaaaaaaaaaaaaaacaaaaaacaaaacaaaacaaaaaaaaatgggagggaagggagagggagaaagaaaggaaagaaagaaagagaatgggggcccctcttacagactttggaaaaaacattgaattctttgagtctcacttttctcatttgcagtgtcctaattatttcatatggttgttttccatacaaaataataaaatgaagctatttaataaattttaaagtgctaaacaaatgtcagaggttaatagctataac

SEQ ID NO: 915826 - DNA, 4001 bp, Homo sapiens
aatcaaggcaaggtgacacagaggaagaacataatcccacatggcagcctcctgcttcttccaggagtctccaggctgccctaatccaacacatactcatttaccaactgctgtccagaagcccctggggcaacagactacacctgtctccaagggagaggaagggaaggagaggaacagctctgggttagcctaggaaaatgactctgtggaagctccccactgctgtggagggcctggaagctgccaggcagccgtctgcaattttgtggtcaacaaggaaccactgagaacttctgagccaaggagtgacaaagtaagacctgtatgcttcaagattactctggcaaagcaagcaggatgcaaatggatggaaaagcaggaagcaggaaaaccaaccactgtttggtgaggaggaaaggaggccccagaacccctgacaaggggctgcaaaggaggagatgtgagcgacatggggctgtggcagaagacttctggtgccacaggtgactggggtgtccatccctgtgagcctgagcaagaacagtgacgccaccaacagaaacaagggagtccctgcgccagcggagggggtgaggaggggagaccatgagttaaaaatcccctaggaggccaggcgccgtggctcacacctgtaatcccagcactttgggaggccaaggcgatcggatcacctgaggtcaggagttcgagaccagcctgaccaacatggagaaactccgtctctactaaaaatacaaaattagccaggcgtggtggtgtatgcctgtaatcccagctactcgggaggctgaggcaggagaatcacttgaacccgggaggcggaggttgcagtgtgccgagatctcgccattgcactccagcctgggcaacgagagagaaactgtctcaaaaaaaaaaaaaaaaaatcccctaggaatacctaggggaggcagggtggaggggtggagctggtagttgggcaagccagctagagctcaggaagagcacccggagcggttaccccacggagaaggagcctttgccccacccgcaccgagagaggcagtttctgaggttcaaggtgatgggtggaaagagagtcttttactaggttctgtttgggggctgggagtgtagacacgtggacagggcctcctgcctgaccatcctgctaggtgctggcctccagcaggggcagctggagatgagggaggtcagggggacagagtgcacggcactggggactggcaagggacccccacaaacagaggaagagctgcaagtcaaaaaggccctatgtccgggggaagcccccacaggccggaggtcaagactccagggagcacctcacaggtaggaaagcctagcaaggggtcacacggtcaacaggcagctggccctcccgaggggtgacactcccggggagagggtgacccccacatgcagaggagacgctgcagagtcaggaagtgccaggaggtgctgtggaggggtgatgttccccaagactggggggaaccccgcagtcagaaggcctccccgccatcaagtggctcctccagccccagaagcgtgaaactagccatggggagaccacccaaccaccctgcacggctcccgcccatcccccgcaggcccggccgcgcgcccgactctcacccagcgccaggccgcaggcggcgcccacagccgcccggaagcggtccatctgcgtgttcttcttactgtcaggctcccacatcacctggcactccaggatctcctcccgaccggggcgctcctccttggacatggcggcggcgggcggccggggctgcgacgagggctggggaccaggggccggggctgaggcgagggccggggacctgggaccggaggaagcgacggtcaggagcgcctggcgggctgggtcagcgacggcggcggcggggaacaagggactgaacggccgccgccgcctcctgcgggccgcttggcccaggccccgccccgcaggccccgcctcgaatccccgcccccttccaggccccgccctcccgcctgtaaccctccgctgagtgcagcgccgctcaaaggagtgctcgcagccgccggctccagcgcccgcggccggggggcgtgggggtgaggggcgctcacgagccttggccccagctccccgacctcacctggagctggagggcgttagggcagccggagaagccaggcgtccgagcccgctgtttcctacacgtgtacatcattcattcgctatttcttcctgcaggtctttactgagagcctgcggcattcggaggactttgggagctttgcggatacagcagcgaacaaaacaaaattcttgttctctgtcaacaggagaggaggggtacaggtgtgaggaagacgggagacgattaacaaataagtacatcgtgtacatacacaagataatgtcatagtataatacaataatatacatagtatgccaatgggtatcaaaatacacatttgtgaaaggaaaataaatcttggggccccactactaagctaaagggaaaagaaaagctgggaactgcttagggctaacctgcctccattctattcaaagtcacccctctgctgagttaaatgcacacctgattgcctcctttgcagaggctaattgaaaactcaaaagaatgcagccatttgtcccttatctacctatgacctggaaggccccctccccgccttagctttttttttttttttgagtctcactcagtcgcccaggctggagtgcaatgtcccaatctcagctcactgtaacctctgcttcccaggttcaagcgattctcctgcctcagcctcctgagtagctgggattacaggcacacgccatcatgcccagctaatttttcgtgtttttttttttgttgttgttgttgtttgttttgtttttttgagacgaagtttcgctcttgttacccaggctggagtgcaattgcgagatctcggcacacggcaacctccatctcccaggttaaagcaattctcctgcctcagcctctcgagtacctgggattacaggcatgtgccaccacgcctggctaattttgtatttttagtacagacagggtttttccatgttggtcaggctggtctccaactcccggcctcaggtgatccgcccgcctcagcctcccaaagtgctggaattacaggcgtgagctaccgagcccggctcatttttgcatttttgtagagacgggatttcaccatgttggccaggctggtcttgaagtcctgacctcaggtgatccacccgcctcggcctcccaaagtgctgggattacaagagtgagcccaggtctgagagcaccccctccagagcctccctgatctcccaaaatttggtggagatctaaagtttattttgctgtacaactcttttctttgcagttttacttgcttccaacaaggaaggcaaggtttcctgcttccatgacaatggaaggcaggtaactcctttatggagtttgagctcgcttccaacagggaagatgaggtcttttttcctgcttctagaatggtagagagcagtctacagcctaagacccatccctaggtaagtaactgaattggggtttgtcttggctaaagttaaggttaacagccagctggtcttaatgtcagaggcatttgaaccagagcaactccatcttgagtgggggctgggtaaaatgaggctgagatctactaggctccattcccagacagtgaaggcattctaagtcacaggatgagacaggaggtcggcacaaaatacaagtcataaacaccttgctgataaaacacgctgcagtaaaaaagccggctaaatcctaccaaaaccaaggtggtgatgagagtgacctctgcttgacttcactactacactcccatcagcaccatgacagtttacaaatgccatggcaatgtcaggaagttactctatatggtctaaaaaggggaggcatgaatagtccaccccttgt

SEQ ID NO: 915827 - DNA, 4001 bp, Homo sapiens
gactcctagcagagtggactccagccccgggtcgggttacagtcctcggtggggacagttactccgttatttttaaagctactgggcagaagcgtgaccaccagccaaggctgcttagaggcctgtcaccgctctccaactgcctgactcagaggatgcgctgggctcggccaggtggagctggagggcaaattgtgagcacatgggtgacctgcttggcctgagggacaaggacaaggtggtggccagaataggccccacccagaaccggacaaggcccaggaagacaggggtggctcgccctgactccgtgcactaaagaatggcacaggataagcaagtggccttgtccccaccaggggtcttgtcaaaggcttttcttcccagggtaggagacattggttggggtatctctaggcatcagctgcagagaaggccagaagacgatagatagcagttattatgacgctgcaacagagaccctttgcagagaaggccaggagacaatagataaaagttattatgacactgcaacagagacccttcaccgggccctactatgtgcctggcacctcccaaagcagccaggcctccccacttccctgggaggaccctgtggtcatcagcttcgttttacagctggggagacagaagaggttaagtgacacgcagaaaaaggacgaaggcaggatggagacccgcatccagggtctccaggatggagactcgggggtcccctgtccaggctattcagggattgcaagaaaaggggccaaagaacttgggtggcccagtggcctcggttcacccctgacatggtgagctttttaccccggtgtgggcccagacccagataagcccattccattcgctgcgcagcaaagcactgactgacagaggcctgctgggtgggagggcctgactgtgggggtccctggctctggggcaggagcgggctgggtctgcgtgggtccatcctgatttcatccctgctgagcctctggcagcccacgtggggcccagcctcactctgggacttgagaagctgtctcaggtgctctcagctctaggagaggcagagaggcgcgaggtgccctccctccaagcctcctcttgtcacccggccctgcactatccggaaaaggggaatgggcagaggcggggatcctgtcagcccagcttaaagctgtctcagttaatgtcaggccgggggaggaggctttttttttttttccagaggcccagaaataaaagaggctcccctgggaacctacaggcctcactgccagcgtggatggcggggagcagcggcagcccactggcctgctgaggagactgagaaaagggctttgcccaggtcagcaggaacaggccagatcccccaggcttctgccaaagccctggtgctcaggatccctgggaagccctgacatggacagtgggagccctcagaaggcgcgccagccccgtcctgggggaacgacagccatcccaggatcctccaacacctcccacattttccaagaggcagcggcgccttgggggttaaaaaaaatggcaacattcgccctacgggcgcggaaaggatgctgcagggatgggggctgggagctgcggctgcgggctccgggagggctccagggaggctcccaccttcaaccgagatgcctattcccaccgaggcaggggtgcccagacgccccccaacgcgtgcctggcctggcaccctggcctggaaaggtcccaaaaccaggggtctagggtgccttgcccttacctgttacctggcaccaggtgagctctgggagggggcgcgcagcaggctcgggtctggggtgcagtttccgcgctgctcattgaagactgcgccggacgcggtcctcgctccgctcttcccgctgctcctccccgcctcccacccgcgctgcgccgctgcaaggtcggagctgagactggcgtgcgttgagacaggctgatggacggggcggggcctcagtgacggagggggcggggatcctggggcagggaccggcggagcctcccgggaggggcggggcctcaggaggagtgggcgggctttcctggacggggcggggcccccgaggagggggctggcgaagcctccgggtggggacgggcctcctgggggcggggccacagctggccacctgctcacctgtggcaaactcctcccacatctggccaaccaggccctccacactgcgtgctggcctccacctggagccacgggcccatcctgaggggacggaaatggtttcacctgaaggaggccagctttttaactggcctttttccctggagggacagccagccagtccaggagggtgggttatggtcctcattcattcacttattctttcattcgttcacccaacagatatttatccagtgcctacggcgtgccatatgcccttttaagcatttgaaattaaacaattaacaaaacaagatccttgcccttctggagctgacattctagtgagggtgtcagacaacacatataagcaaatgagatatattggaagggaatacattttacggagaaaattggtgcaagatcagggattcggggcattggagaggggaggcagcgatatgtcctcagtgactgccaggtgctgggaacacagctgtgtgtgaaaagacagaaaactcccagccttcatggcgtgaaggggacagaacatcagcaagtaagtgcataaggccattcaggtactggatgcagtaaaataaataaaattgtgtaagtgaaaggtgagaaggcgtgagccacggggagggaggaacatcctacgctaaggcctgcaagttcaaaggctctgaggtgggaaccaacttggccacttgaggaccagaaaagggtccatgtggcctgaaccgtgggaagtgggtgggggagtggacttacggcccagaggggcagcaggtggggctagaactgcccacatccctggatcctctgatcagaggctttgttttttcctgagacagagactccaggatggagtgcagtggcgagttctcagctcactgcagcctctgcttcccagcttcaagtgattctcctgcctcagcttcccaggtagatgggattacaggtgtccgctaccacgcctggctaatttttgtatttttagtagagatggggtttagccatgttggccaggctggtctcaaactcctgacctcaagtgatctgccctccttggccttccaaactgctgggattagagtcgtgagccatgtgtgcccagccctgaacagaggctttttggagcactctctgaattggaaatgtcctctgctacttggtgggacagcttctttagaggggaatttgttcagaacttacaacactatgtttttttttaacccagaaggaatttcctctacagatagacttgtgcaagggagctaaggtactagcttaaaggtagttactacagtagcaaaagtctggaaataacctaaatacccttccatagggaactggccaaataattagagaacacctgttcaacagaatactctgtagccagaaaaaaaaaaatagaagacatagagttatataaaggtatggaatgacctcctaaatgtattgagtaaaaaccaaggagagaataaagttgaaccatgttactattggtgcaaaaacaaaggcaaatatctaattgtacttgaagacgatatcttggatggactgtccaaaaagcaggagtcactcagagctgggctctgtcatttatgctgtgtgaccttaaagaggtgactttgcctatctgagcctgttttctcatcagagaaatggggtaataaagatatcgactgcatcaggtaaaggtaaaatgtgacaaggccagtgagggcagcccctggcatgtgataaactttcagtaaaggagaacaaggattatttttaggagagatgggatgactgaacctttatgtaactactagcatagtatagcaaaaatcaa

SEQ ID NO: 915828 - DNA, 4001 bp, Homo sapiens
ccccacttttgtcttgttttgttcttttttctcattttttgactgtagaaaaaaagccccacctacttcaagaacaaatgggggtttgggcttgaaatactgcaggaaagaatttctgtataggcagcagatgccccttttatttgaaatgaatattcatgtcttagttgttttcaatttattcatcattggaagattagttatatttaatatattctactagaacttatgctgtaaactcccataggcaagttctatgtctttttttgcaaccttatgattttcctagtacctgatagtttttaagattgatttatgatccttcactaattcaagcagccaatgtcataaatgaaaagtctgaattttttctatttccctttaacaatgtcccctcaaattctcttctattcaaataccctggtgccagcctctttgctggatgctagggatacaaaatggaatgtccctgttcttgctctcaaaaagttaaccagatgtcaataactggggaattattaattgtggaattacagttaaaaaatccatttttctacttttggccaaagggcgttcttcatggcctacaaataatactacataaacaaagactgatgtttctacatatggccattctggtctcaatatatttagcatctgtacatttgttcaacataactatgtaccaagaattatgttggcctgtgtatataccatatgatgagttctttaatcccccttagaataatgccaagcacatagtatcctctcaattgatatttgttaaatgaataaataaaagtgtatgaatgattttcaaacattcccttaaagtagatcattaaattttgctagttttcttaagaaaatgcatctgaaaactttttcacttatttaattggaaagataccatacatgaaaaaattgaacacaatcaactcaaaatagtggttgtctcctgtgaaaagataggaacgtaggatatggaaagagtcacaagaccaggaaatggtgtgcagagagaggtcctttcattcttatttctatattctttagatgagcgttggtaggctcaatggatatttattatattaatgtccatcattttaggtatcaaaatacttcataattttaaaaaagttaaagggtctgtttgggtaagttatacaaattattcataattgcccctaattatcagattttatacatatgtaaactgtaaaataatagacaaaactgtattgttaacttcttcccaaattctttgtgaatgtcctctttctacataaaacacaacctcatcactcccactgtaacttgcatgcttggcatcttccagttccccagacatgtcactcactatcttccccaccacctccaaagagtgagttgtttcagcaggttaatttgttcctgtgcttgtaaataggcttacaatgtggcatagtcatttctcatgactttaacacatctgccccactggactattccctgaaggcaagtactcttttattcattttccattccctttacctaacccaaagtaagtgctcaactaatgctgtagatctatctcatatatttctctttccttctttttaaaaaactgctgctgctacctgaaggccatgcctaagcaagcatgtgacctcaatttcacctacggaagatcacctgtcaaaaatatatgtttgaaaaacacaaaatacttgcttgttcgtttctcacagccatcagcttccatgttacagaaattaagtcaacattatcccaaatctcagccattagcgagatatataaacatcaaatggtataacataagatactagattacttaccaataaacaatattggaaaagtgataaacaacagaaagacatgagggaccaggttgagggcatccacaaagcaggaattttgtagtacaccatcgttgatattatatgaagaaatgttgttaccacaaaatgaaaggctcatttcttcttatatggtttactctaaaagggagagaaatgagaaagaaaaatcctcttattagtaaactcttgttcataaaattattaaagccttgaatagagggctatatcataaaattaatcccttttactttgatagctgaggaaataagaaactctgtgccaaagcaacttgaagctttcttataaaatacgtcctatgagatcttcttttccatagcttttacttccagagaaaaatgctttcatgtggaaaatgtattataattaatatctacctatagtagtacctcaaatgagtgtctgactaaaatgctttcaaagaacaaaaatggtcatatattaagaaaaaggagaaaaaaaattgaaccaatgactaaaaagtcaaaatggtataatttcaaatattttcccatactcactgaaaatgtactaataaacaacaaaagttgttcagtaaactgtgacagagtttgctgaaacatttcactagttgtgggaaatactaatatacagaaacaagtgtgcctgcagtaatggctaacagtaatcagtctttccctgaagaatattaaaaatcaaatgctcaagatgaattaaacctaactcaaatgacaagtcaacgaaactactcagattccatagttagaatattctcacaagaaatacactctacgcaagtttgaaacgcaggatgtcttttaactggaaattggtactccatgagtagaagtagatgagtttagagaggaaacagaggacaaggtcacactgtgctttgtaagtcattgtcaggattgcggcttctactcttagtgaagtgggccactggggattccggggcagaggagtgacgtgctctcacttacatgttaaatggttctctattaatgctgtgcccaaacagatgggagatgagcaaaggtctgctccatgaaaatactgctgtgaaattccaggaaaagctttgacattctgaaaacttattttataatgcctactacttatttaagttctgggcactttgcatatcttaaatcctcagaacaaccttgtaattcatcttttacaatggaggatactgaggtccagataagttcagtaacttgccaaccagtaaagcggtcatgtccacacccaaatatctgacttataaactatttctttccaccgtattacacaacctccaacctgctttttaaagaagctatcgtatctattctttaaaacaagtagcagtttaagattttaacctcactagacctagtttctatatttatgtcacaatggattctgagttgcattacaaaaggctggcaaaaattttattaactagcatagtaccttttctttctttcctttcattgataattgatttagcaatggtcacaaacaatacttttcctaggaaaaaacagtgttatacagaaaagattgtcaatggtaggtaaattattagagaaatcaaatttcaagcaaaggttttataaagcattatatgaatgcctcagctaaagagtctgtgtatttacaatcttagatacttatacagaatgcctctcacatattgttcctgataagctctttttataataaatagttgatatgctctctagttgagtctttccctcatctttttttaaaaagttgtatttttaaaacctcaaggtgaagttatacactgggtaaattctaacaagctattaaggtattaatctggataaaagaataaaagggacttgaagtttttaaaaaacagcaaaatggaagttattaatttataggtgtatgttagatgtatttctggcaaagacagacaaaaacaaaactaaaaactaatagctagtaatgaattttttagactacttcctttatttagtagaaatgataaaaagaaaacttaaagcccactcttaattgaaagacatatataaactttcctcgcacaaactagaaaatgatttttactttagcaacttttataatcttatccaaaattataatattccagttggccacatt

SEQ ID NO: 915829 - DNA, 4001 bp, Homo sapiens
agctagacaaaatttcatttcacttcctcttttcattttgtcaaagtacagtgctgaacatgaactaagagtagtagaaatgccattttgtgagacactctcctacgcttcttgggaatggggatgctccatattgatcagacatgcaaaattgttaaaaatgtcttctataagaaaccctggctcttcccccctcttggacaacaaaggaacaacaaagaatatcattctaaattttccatttcagtggaaatatgtttagtcttagtttctaaatatatattttcttctggtaggtgctttaggatgacctaccaagttgggatttaagttttaagaaaatgcgttagaaataattctgagcatatttgagtaactgaggctaagtagacttttttagagtgttgcaaattttattcttctgaaactttagaaaagtttgcaccctataatcctttaactggttacagttaaaaggggtaatgaagcatatattttaattcaggtttagatgtcagaggaatctaagacactaaagaagtgggtccatcgacaggacaacagatggtatctggcactgcagtggcaacttgaacagtttcacatttcacccatcaccttaatttctatcttaccttatgtcctctgtaaaaggcaatttcttctacattggctataattctcgagtgcacataccgcaaatagccttttctatgtgcttcctctgccaccagtttgccaaatttgggagaacaggcttttaacactttagcagtggcatacaccacaagtcctgctagtagggtgggcccaattgggcttgctcctctggatgtagcagtttgaatgagtgtataggaggtcagcattacatctaaaataggtttggtcagattggaatacaagtgagccacagattgggagaacatcataatatcctccgtaagagattggtcagggtttgccagcctcccatccatattgatcactttataataagtctgatttgtaaaataggtttcataggcgtggtctactaggcgagttctgaaggccaaagccaatttgcattccaggtaccttattgcactgttgacgaaggtagcagggatggcaatcataagccacttgattaatttgatgatgaaagtccgaggcttcttttccacaatgcttttcacgatttttccatccagaccagccacatagatagaaagaaaggttcttgagattagagccactgagtgcaggcagagccaccctgtttcagtggtcacaagttttggaaacaaaattttccgaagttctagtagctgtttgaagaaatctgcattcactccaggcgaaggtttttcacaaatggtctcggtgcaatgcagtatttctgtgttctctgcagcagggtaagctgctgcttttttcttcccgtggccagattgctttaaacgcttgccaatgatgggatagagggttttcagagcatatgccgcagccaccaggcaggcagccctcttagcagcactcgatctggtccatttcactcgatcagctgctgcatttagcatatgtgtcattttcccagttacccaaaccggcttccaaaagaattcgttttaaaagatcatgcttcacagaaatccccagcaaatgttttagaaagtcctacagcgtcccatagtctgcagcgtttctcttccactgttgtgtttttaattttgttctgctgtgacagatgcagcagagctcagactccgctgcatctaccgggaatgattctctcagaagctcaagctgcaccaagctcctccctcccaggcccctcattggctgtgagggcggtgggaccttggaatcctcgcagcttccctttgaaccttgaaaatgaggagagagcaaagcgaattacatccttccttaaacaggagttcagagagttaaaatgtctatttttggagaggtcgaatcaggccatctgctggcgaacaaaaccggctctagctactgagcatgctcagtgtcacttagaaacccacagaagtttcagaatatacatcacttcggtaagatttcagtagataccgcaaacagaagagcaagcagaaagggagatttccaagcgaacaaaaccggccctagctactgagcatgctcaatgtcacttagaaacccgcagaagtttcagaatatacatcacttcggtaagatttcagcagctaccgcaaacagaagagcaagcagaaagggagatttgcaagagttttaatgagacgaggagggagaaggaaccacgaaaatgagggaggagggacaagaggatcaacataaaatgaatatgaaaaggatatggaatgaatctgaaacggatcagaaaagaaagtgacaagtgggagggacaccggagaatgccaaatatcaaatacacttggatctgtttttcacagatccccccggcttttttgggggtctgatttcacaaaaggtctcagaacctaatagacaagttgtaatcgagggtttcccttgtaaataaataggataaaagtcttccgtgttacagaaaataattatttgctatgcctctagccattctccctttttcctctgcatcctacttgtccttatgctaaaaatcttccagccccataactggagatctgatgtactcatatttatttacaaggtgacgactattaaataaatgagagcaatgtttcatgtttactactcccatgtgttaggtagtttttacttggagtggggtagcacttatagtgaaagtttaaccatttgggaattcagctggtgttggatggtggaaatagcttctctaggaccttacttcatttttcaagaatgctttgtcttttgcaggtttctgctttgtttgttttgtttagctgtagagataatctactggctacttcctatttccatttggttatttgataaaaactaagagtcttaaaattcttcacatccataatggaggatttaaattgttcaacagtcaaggacaattctgcatatttttgaaaatgtaaaaagcttttttttttttttttttttttttttttatgagacagagtctctctctgtcacccaggctggagtgcagtggcacgatctcagctcactgcagcctccgcctcccaggttggtgcctcagcagcccgagtagctgggattacgagggtgcgcctaccatacttggctaatttctgtagttttagtagagatgggttttgccatgtttgccaggctggtctcaacctcctggcctcaagtgatccacctgccttagcctcccaaagtgctcggattatagacgtgggccaccacgcccagccaagagcattttttaagtcagggctgagtatatttttggatatggaaaaaccattttttttgctcttcactgtccccgccccccatctcattaaaattctcggaaatctccctttctgcttgctcttctgcttgtggtatctactgaaatcttacaaaagtgatatatattctgaaacttctggggatttctaagtgacactgagtatgctcagtagctacagccagttttgttcaccagcagctggcccccaacatacatacacatttccagtcaattaaaagcttaggaaaatatgcatcaagctagaacagaagttggcaaattacaactggtgggccaaatctagcctgccacttaattttatatgacccttaagctaggaatgatttttacatttttaaagtggttgaaaatacttcaaaacaagaatattttgtcctgtgaaaattatataaaattctcatttttgtgtttataaataaagttttattggaaaacagtcacacccattcatttactctctgtctatggcttctttcaagccacagtggtggatgcaacaaagactaaaatatgtactatttggccctttatagaagtttgcaaacctctgtgctagaatataaaacccatctcagcattaaatgatctt

SEQ ID NO: 915830 - DNA, 4001 bp, Homo sapiens
gataacaacaacatcaacaacaaagccactgactgcagccgctgggatagtcccacctgttatgaacctacaggcattcatttccaacaatcaaattgatggagacctttagagtgtttgagtttctgcttttcaggcatcactgggggaaggctggtttttcagttgtcagttacctgctgaatgaatgaatgaatgaatgggctgggtgtggtggctcatgcctgtaatcccagcactttgggagaccgaggatcgcttgagtccaggagttggagaccagcctgggcaatatggtgagattcccatttctataaaaaatttaaaaattagctaggtgtggtggtgcacacctgtagtcccagctacccaggagtgcactgaggtgggaggattgcttgagcccgggagtttgaggttgtagtgagctatgatcctaccagtacactcagctaacagagtgacagagtaagaccctgtctcaaaaaaaaaaaaaaaaaaaaaaaagaatgaatgaatcaatgtctcttcaggaggcagagagaactgcccctccctctagactaccatcatcacttgtggctcttgccagccttggctcattcagcttaaattataactaaacacaaggtcatcttccccaactaggctgaggtcttctagaaagtcagtttcatggcatcgagccctgtgcatgcagtagatgcacaaggaatgatttctttccttttttccttttttgagacaaggtctcgccctgtcacccaggctggagtgcagtgacgtgatctcagctcactgcaacctccacttcctgggttcaagagattctcccgcctcagccttccaagcagctgggattacaggcacacgcctgcatgcctggtgaatttttgtatttttagtagaaacggagtttcaccatgttggccaggctagtcttaaactcccgacctcaagtgatctgcctgccttggcctcccaaagtgctgggattacaggcatgagccactgtgcccagcctcaaggaatgattttgaaaggagggaaggaaggaaggaaggaaggaaggaaggaaggaaggaaggaaggaaggaaggaaggaaggaaggaaggaaggaaggaaagaaggaaggaaggatggaaggaaggaaggaaggaaggaaggaaggaaggaaggaaacttctgagaaggctcgtgtcttctccttttgtgcatagccacccttgaagctttggcatcagcaaacagcttgatcaaggtgggcacaggttgggaagggtgtggaccccacctgaactctgcactcctcagttacaaggagaaaatgcacattacctcatagtggggacgcgggtctcagcttcacctgtggtcagataagcctccagggacagggcccccaagctggcccggctgcccttccgggtagactcacgagatgagccagcaacagagtcctcgtcggaggagtagtcatcaaaagagcccaggatgaagttggtcatcagctgcctcttgatgtttgcctgcttcttgtcttctttggagggggagccagcttgctggccctggggcctggctgaggaggacaggccattggtatctgtggcctccagaccttgtgtcccagtcccgttggcttgaagctctggggagggtgctgcgtcactggaagaaagggggtttcttgggggcttctggtgggagggtggtagggagtttctccgccgaccggcatctttggggcctttgtgggaggctggctcggcctggctgggtgtcttgggcagagtgtggccctccccatttctctgcggtgtctcccctgagttatcagaggctggaaagggctcctggctcgggatgaggtttgcttctgatttactcttggtgatcggcttggagtccgtcattttcccccagatttttaaccaggaaaaggtcagacaggagaaaatcagacaagatagacaaagaagcaagaccattcagaaaatctgtaaggagaaaaggagagacattttaggatttacataatcaagtgatttctctcctaaagaagctagtggggcaggaggctgttggggtgctgtgtattcctgaaatactggacgaggggagagatggggttctcctccctgctctgcctgaaacaggcttggacatattccttcacccctctggatcttagtttcctgccaaggttcaaggaagaaccttgaaaactgctaagttaaagaagccaatcacaaaaggtcacatattatacgattccaagtatatgaagtgtgcagaacaggccaatcttgagagacagaaaacagattagtggttgccaggacctagtgggatggggatgatggctacagagtgtagggtttctgtttgggatgatgaaaatgttctaaagcagattgaggtgatggttgtacagctctgtgaatacagttaaaaaacattgacttgtcctttacatgagtggattgtatgccatgtgaattatctctcaataaagctggggtttttttgtttttttgttttgagatgcagtctccctttgttgcccaggctggagtgcagtgccgcaatctctgctcactgcaaactccgcctcctgggttcaagcaattctgcctcagcctcctgagtagcttgggctacaggcatgcaccaccatgcctagctaatttttgtatttttgtggagacagaatttcaccatgttgaccaggttgctctctaactcctgaccttggcttcccaaagtgctaggattacagacgtgacccaccgcgcccagccaaagctgttattttttttttttaaagactcttaattatattccactttataaatgaaagggaattgttgcttctgtcatcatcatcatcattctagtattattatcatatagtcagtcaccatcatggccctggagggaggaagggcgccatcatccccagtgtggggtatgcttacaactagcatagaagcccaacaagcctcgggagactgttttctgttgcagggtctagaccagtgcctggtatgcaatgagggcttacaagtgtgtattgaaagaatgaacccaggtattccaatctctaagccacacctctttctatcaccctaactctgccctactaatgagtagatcattgttatttgaaggaaatcttgttttaaaaatgagcccagtgcggtggctcatgcctgtaatcccagcactttgggaggctgaggcgggcagatcacctgaggttgggagtttgagaccagcctggccaacatggtgaagccctgtctgtactaaaaataaaaatacaaaaattagctgggcatggaggtgggtgcctgtaattccagctactcgggagtctgaggcatgagaatcacttgaacctggaggtggaggttgcagtgagctgagatcatgcaactgcattccagcccgggcaacagagtgagacttggtctcaaaaacaaaaaaaaaaagaaaaagaaaagaaaagcccaggaggcagaggttgaaatgagctaagatggcaccactgcactccagcctggacaacagagtgagaccctatttcaaaaaaaatttttaaatgggacctctctctatgtgttgaaatttctgaaccaattttgccacaattatatactagaagcattacaaaagtggaccacaaagctcagcaggtcaatttggtatctaaaaatcctttttttttttttgagtcagaatctgaccctgtcgcccaggtgggagcatagtggcgtaatctcagctcactgcaacctctgcctcctgggttcaagagattcttgagcctcagcctccctagtagctgggattacaggtgccccccaccatgcccggctaatttttgtattttttgtaaagatggggtttcaccatgttggctaggctggtgtctaactcctgacctcaagtgatccgcccacctctgcctcccaaagtgctaggattacaggcg

SEQ ID NO: 915831 - DNA, 4001 bp, Homo sapiens
ctctaaaaaaaaatacaaaaatcagctgggtgcagtgctgtgtgcctgtagtcccagctacttgggagactgaggcaggaagcttgaacccaggaagccgaggttgcagtgagccgagatggcaccactgcactccagcctgggcgacagagtgagactccgtctcaaaatacaaaaaaaaaaaaaggtttgtttggtaaagagataaagaatgttcgttctggattcagattgcctgaatttcagttccagctctgccactactacctgtgaaatcctgagccagttactcttcctccaagcctcaggttactcctctgtagaacagggacatagtaccagtttcataaagttgttgtgaccattgcatgacacaaggtatatgaaacactcaaattagtacctggcacatgttgaaatgttatctactatagtaatatactaaaaaagttcacaagaggtctcataggttttatgcatacagtatgtgtgtatggtttatgcactttcacataaccctgtgattcttcaacagggttatgttttctaaccccaaggagacatctggaaaggtccagagacattattggttgtcaccacctggggagaggtgctactgacatctagtgggtcaggccagggatgtttctaaacactctacaatgctcaggacaccccgcccccttgccaaaaacaaaaaagaataatcaggacccaaaatgttaatagtgcagagttgagaaaccctgatttaaacagggcatatggaaacgtatttcataggatgtagtcacaagatctatatacgcatgtatcttgtggtcatgtcatagtccagatacacacacatctagaacgcactatgtccacacacacacacatctagaatgtactatgtacttacatatgtatcattatacaatgtacctagagtagcatcctgtcatgtatgtgtcccatatgcattgattgtgtcagtatctacatacaaaagccactctgacatactggaaagaatgctgagcctcagaaaagctaatgttatctccatatacataattccatttcatcctcacaactgcatgaggacatgatatcatgccaactttatgcaatgactatactagttcaagactgcacaactgctgatgtaggtcaacctcatagtacggacaggaactgtgtttatcttatacgccaacgtatctcaagcatcccaagggtgtctagactctcagtaaacatttgtgaagtgacagggtggggaggaggaccccggtctaactgcagcactatgctcgtaaccagcagatcaccatcttttctctcttttttttgagacggagtttcgctcttgttgcccaggcgggagtgcactagcactatctcgactcactgcaacctccgcctcccgggttcaagcgattctcctgtctcagcctcccaagtagcttggactacagacgcgcgccaccaagcccggctaattttttgtatgttcagtagagacgaggtttcaccatgttggccaggttggtctcgaactgctgacctgaggtgattcgcccgcctaagcctctgggctgggattacaggcgtgagccaccgcgcccagccagatcgctatctgaacagcgatcgactctccactctctacggccccttagaaggaacttcacctctctgagcctcgttgtacctatctgtaaagtgggacagaaacaaaaccatccagactagggttagagacaggagtcaaacacaacaaaaggggcaaagttctgcatagcagatagctcggacaattcggagacctcgcggagccagggatcccgcgccgtcagccgaggtggattaggacgaggcctctggagcaagcagaggttaactcgcgactgtgcgaaaacctgcagctcagcctaagtgtggcaccccagcgcaagcaatctccacgacgtccttccgctccgacctcctcaaaattgcgtccggaagagcagtgggtgacccctgccacgccgcccaatcgctgtgcgcggtcctgcgcgcatgcgtaaaccgcaggtcagcgacggcggccgggaggcggaagtggaggttgttgtggctccgagggctgttcgaggagctgctgctgctgaggcggcggcaactgcattgaggtggtggcggcgctgccggccccgggccgctcggcctctcggctcgccttccagcctcgcctgagcccgccggggcccgcgccggccagcgcctgccctatgagtgtgtcactggttgttatccgattggagctcgcggaacactcgcctgtccccgccggcttcggcttcagcgccgcgggtgagtcccgcggcctcgccgcattccctgtagccgggtctgggcccggagggcttcccttcccaaagcactggcccgggaaaagcccgcggcgagggctgttgcccaggaagacacggagaggtaatcgggatccctctctttcccatccgcctttgagaggccttcccgtttgttatctcagggaagccctgccccgaacctccctccctgtgccgtctgagggcatttagtttatacctggcgcgtctccctctcgagatagtcgagtggtgtgtttgtctcacttgcttccctatgggcttcgtaaaggcagggactgggtccccagcaacgctggacggtccctgggttaattaaattgttcccttttggaacgatatccattgaagtgccccctaaccatagtcataactaaaatttggacacttcctatatcccagcactgtactaagcaccttttgtgtattgtattctttaattatctttgcaacagccctaagaggcagatggatgtgacatgtacctcttacacattgggaaactgaagcttagtgattaattgatttgcccaaggttatctgtaatgggtgaaactgggattctaactcagtgagctggacttgagtctgagctttttacaccattaacacaagtgaggaagctccttagtggggaatgcagctctggctctgttccttggtcctcagataattaactaacattcattcaagaaatacttggccgggcgcggtggctcacgcctgtaatcctcacactttgggaggccgaggcgggcgggtcacctgaggttgagagttcaagaccagcctggccaacatggtgaaaccctgtctgtactaaaaatacaaaaattagctgggcgtggtgacaggtgcctgtaatcccagctactggggaggctgaggcaggagaatcgcttgaacccgggaggtggaggttgcggtgagccaagattgtggcactgcactccagcctgggcgacaagagataaagtccatttcaaaaaaaaaaacaaaaaaaaaacttatgctcatatctgctggagccttccttgtgtgctgaatcagacagcgtctctgttttaatggcaccagcagtatcatggaggaaacagatgaattaaataagtgcagaatatgtgtagaattacaactgtggtaagtgctgtgaaggaaaggagaaacaatttgggaaagtattacaagaagatgtgtttggtttggagagagggatgggggcaggtagggatggtgtcattgggaacttcctgaggacgtgacctttgaagctgcaaattaaagattgaatatgactttatagcttatgagcacctttccaaaggctaaaagtggcttctgagttctgagagtcagctaaattgatattagccgcatatagacatctgcatgggtcagtcatgtagtcatttattcatcaaacatttagagggcttcctctgtgtgctcggcactgtggtataagggctgggaatacagtggtgggcaaaacaggccttgtccctgccctgacagagcatgtattagggatatttcagttaagtctccaaattccgtttcccttttcatgtgtttcattgatttaagacagtaatcacagatgttcatggcttggtt

SEQ ID NO: 915832 - DNA, 4001 bp, Homo sapiens
catggtgaaacgccgtctttactaaaaatacaaaagtagcggggcagagcagtgcacgcctataatcccagctacttgggaggctgaggcaggagaatcacttgaactcaggaggcagaggctgcagtgaggcgaggtcgcaccattgcactccagcctgagccacaagagtgaaactccgtctcaaaaaaataaataagaatagtaccttcacctcacaggaccgttgtgaggaacagatgagataacccatctcaagaacagtgcctagtgcatgccaaacaccctaaaggcactatttagaatgagcacagtggctggcacagtaagcaactgaccatccaccacatattactgttgtcccagaagttaagtcctggctactggccacaggctggacaagggaaacttccagagcattttctgggttccaggccctgctttggggttcctctaccagagtccgagtgccgctgactgtcactgccaccattcatccagtagcagagggcagaccactatcgtgggctgctgaggttgcactctcacctgagccgctgggaagagatgttccttatccacctgggctgcaatgggaaacaactccttctcggcaaagtcccggcatgtctggagcaacatctggtgtgtctcgggcagttccacagactggtagatggtgtgtaactgccgccaggccctaggacagagagctgccggcaagggcagaagtgagtggaaggaggaggcaggaggtctccaagaatcctagtgacccactaactcaccagggaggattttgccctccaagggacatctggcaatgtctggagccagttctagttgtcacaactagagcaggggaatactattggtacccagtggataggggtccgggatccctgctgaacatccaacaaggcagaggacagcccccacaacaaagaactgtcagcccaaaatgtccatggcggccactgaaaaccccatactaactgaatgcttagtacactcactagacatttccatacactacatccttcagtcctcagtataataccaacagtaataagacctcagctctgtgaccttaggcaagggttttaaacgtcagtgagcctccgtttctataacaagtggaggcgaatagtattccgctcctcggagtgcgaaagaaagactaactagcgcttaacacagttctcagtagcgttccccttgtaattcaggccaggcaaaggaagccgtggctatatgtgtcacggctgctacaactggagacacgtaagatgggaaaggtactgtattaaccagcaagaacgagcatttgtggaacacctgttacacgccaggcacgaagtgctttacataccctatgatttaatcctcccaacaactctgattttctctgtggacattttacacatgggccaaccgaggctgaggaggggctgtcttgcccaaggtcacagatgcgggtctggttcaatcccaggcctggctccggaagaaggacgcaccctgaacctctagtgggggtgaaatgaagggagggagatatgggaactgggaactgggctggtggctggggtcaatcggggggtaggggtctgtgcaggaaccagggacgcctgaagggccgggctgggtcggcgcaaggagcagcagaactggggcaaaggccgtgagcgctcccggagtggggctccgcctgccagcggctctgacagagccggccgccaggacctccgcccgctgggccagacgcgggctgaagccccgccgtacggatccccagcgcactcacctctgcgggcagggcccgaggcccgggcgagcagcgcggcggccatgggcgacagacacagtcccaggcttcgcgacctcccgctgcgagcgcgctgttccggagtgctggggggcgggacccgggacagaggccacgcccgtagggcctcgggagcggggccgaggtgcgctcgcggccagggggcggggcctccagtggtccctcccaaggcgaggaaccgacgctcgactgcgcgcgcggtcggtcagctggctgttcgtgcccacattcgttaatcaaaatgctaacaagagaaagctaaggatagagcttcgcagaaaggccagagaggtctttttaaagcataaataagatagcgatcttcgggttaaaactttgttggctttgtcggcgggcccatccctcctaaaatccaattctatggcttaaaaagccaagacctgccttgtctatcagggcccatgcccaccgttccctggttattgttgcttagctttacgaggcagctcttctctaagacccttagctggttcctgactcggggcctctgtgatcactgttccttttgtctggaatgccccctcttcgtttaggtctcatggatgcctgccctgaccacaccaagccgtttctccccctctggctctctatctttcgttctgtttattcaaggcactttgcatctgaaattatctgcttccccgactcgctccgagaagctcaaggacctgtcttgtgttggtgctcaatatttaggcccctggagttgggctgcaaggaaagctttcttttccccagaggctgtgaaggtgggtggagatgctacccccgttccacttcagtactgtgtctcattcccgattggggcagaacccagacacatatttgacccctagcatcctcatcaggacacctttgccccgcccaagaaactatgctgattttacttgtcccataagggtcttctcttgtgcaagtgtgattctgattcccatagcctcctgggcaccacccacgccctcccaggcacccacacatccctccaactgcctttctttcccagcactcagccaggcaggcatctgttcccagcattgacctatttgccaaaacttctgtctcttcctcttggaggaaagtggaaacctcggtcactacttcctagaagaaagccaatcaaaagatgcagcaaagtccttaatgtgttacctttctttttaaataatgcatttaaaagaacgcctctaaattctcagtactttaaagtcaaatgaatggctcccattggcaaatgctctaagggcttcctcacctttccgtcatcccacctgggaaccagccctgggtggaagaaacgatgaagaagcaggagaaaagggagaaataagtgagttgtgtttgtgagcaaaggccaataattgcttcaggtgccacagagcatctaaaccagactcttgagaatttgtgactgtaaatatgaacgttcaaatttcattttaaaagtatccaagttttccaatagagacagaatcagatagtggttgcaagaggcgaagtgggggaagtcacctggctgcaaacacaaggaactcaggaactttctgagtgggtacgatggaaatgtcctatatcatgattgtgatgggtaataaaagtattcatttgtcaaaatgcatcaatactcttaattgaggtaaattttactgtagttaaagtatttcttaataagcctacctttatggccagccacagtggctcacacctgtaatcccagaactttgggaggccaaggcgggttgatcacctgaggtcaggagttcaagaccagcctggccaacatggggaaaccctgtctctaccaaaaatacagaattagccgggcgtggtggcatgcacttgtaatcccagctacttgggaggctgaggcaggacaatcacttgaacccgggaggcgaagggtgcagtgagccaccatcatgccatcacatcccagcctgggaaaaaagagcgaaactccatctcaaaaaaaaaaaccctacctttaaaacatgcatgtaaactttcaatttacaaagccactcaccctgggaaaatataaagcaaaaatattaagcctaaagtccagtacaattcctcaatcaccctagaagccagctatactctagttcaactacttacagaagggccacat

SEQ ID NO: 915833 - DNA, 4001 bp, Homo sapiens
tccagcatgtcttatctctcagtttctaggcagggataaagggacatggtccctgctggaaccctctagacctgagaaagggtcccttcagaagatgaatctctgtttgtctgggccacatccctgccgtcacttttgcatttgactcaaaatcactgacctgttcgaagaaacgtaagggcttatctctttgcctcttcccatccctcttccctacttctttttgtttgggttttgggtttgttttttttgttttttttttttgagacggagtctcactctgtcacccaggctggagtgcagtggcgcgatctcggctcactgcaagccccacctcccgggttcacgccattctcctgcctcagtctctcgagtagctgggactacaggcgcctgccaccacgcccagctaattttttgtatttttagtagagacagagtttcaccgtgttagccaggatggtctcgatctcctgacctcatgatctgcctgcctcggcctcccaaagtgctgggattacaggcgtgagccaccgcactcgtccctgttgttgtttttttttgagacacagtcttgctctgccactcaggatagggtgcagtggcatgatctcggcttactgcaacctttgcctcccgggttcaagcaattctcctgcctcagcctcccgagtagctgggattacaggcgcccatcaccaagcccggctattttttttttttttttttgtatttttagtagaaacggggtttcaccatgttggccaggctggtctcgaactcctgacttcaggtgatctgcccatctcgggctcccaaagtgctgagattacaggcatgagccaccatgcccagtctcttctctacttttcttgcagtaacagaattgttcaatctgaatatccaaggtgagactgtattcatatataatctgggtaaatgactggcaaaatggcagggaaggaggagctaaggatgactctcctggaacccttcctcaactccccactgctgccgcctctcccttggccctggggcaccaaatccaacctttgtcctgggcctcaccttggcatagtagacgtggttggagcaacggtagtgagtgaactggcagaaagactcaaaccaggaggcataagggaggttggagcagacagcacctgagaaagggcaggggtggagaagatgaacccgtggggagcttggggtggggctgtgggcaatggactccacgccatggggagggtggagagtacgagctcatggtgtggtgccagccatgcccttccccgcctcacatgagcacaggggtttttgccctgaggtttgggtgaacactctgggtgcctcggtttcccccctagtctggccctcaccatcgggcactaagccgtggttttcatattggtccagctggacgagtgtgggattccggcagccgtgggttgcacggagacggcaggtagtctctgccttccaggttggagtcagcagtgcgaagaagcgttcgtattcggtaggagagagagggctgcctggagtggaggcctgagtcgaatcctgggctgcggcaggtgccagaggcaggagcagcactgcggagcgggcgaacggatgatggaaggaccgaaccccaaaacccgctccgagaccaggacagacagacccagactggcaaattaggaacggggtgagggttatccctgctgaccagggcggggggagtctagagacagaggcaaaggtccggccgcgggcggggggagatgggagtatcccaggacctagggagccgacccagcgcgaccaccatgaggaagcgatccagaaaccgtaaaagcagagctctcgggagggagaggactagcccggggagagtctgttggagcaggtgtaaacctctcacccttcaggagtgagggaaggaagccagcggctggcttcctcatggccggagaagatccgcccgcgtcccgtggacacaagccgcctctaacgggccaagccgcagagagagccgcaggcgcggggcggggcgcacgcgggcaccgcccacgcgtcacaaagagcgggccggggcggggcctcgacagccgggctctcagggccctaaagtggccagagcccatccagatggtaggaatggcaaacagctaccttcacttagcgtctttttcttttttttttgagacggagtcctactctgtcgcccaggctggagtgcagtggtgcgatctcggctcactacaacctcggcgtcccaggttcaagtgattctcctgcctcagcctcccgagtagctgggactataggtgcacgccaccacgcccagctaatttttgtatttttagtagagatggtatttcaccatgctggccagatggtctcgatctcttgaccttgtgatccgcccacctcggcctcccaaagtgctgggattacaggcgtgagccaccatgcccggcctaatttttgtatttttagtagagactgggtttcaccatgttggccaggctggtcttgaactcctgacttcaaatgatctgcccacctcggcctcccaaagtgctgggattacaggtgtgagccaccgtagccagccacttagcatctttacatgcactaccttacgtaattgccataggaatcccataaggtagatacactatcattcgttttacagatgagaaatcggggcttagggaagcaactcgcccaacaaacaggtcgtgaggtctagagctaagcgcaggcagagatagaatgtgcaaaaccaagtcaaggcctatctgggtaggaactagacagggcgcctccatgagcaaaatgggtccaaggggaaaacaagagggtggctcagtggtctacgaaagtggtttccaagggagaatcgagtaagacagtccactgaggtatgggaggagaacttttgcttttgtatctgttttgtgtttaaaatgagaaattccagcctgggcaacagggcgaaacctcgtctctacaaaaagtacaaaaaattagccaagcgtggtggcacgtgcctgtagtcccagtttcttggggggctgagatgggaggatcgcttgagcccatgaggccaaggctgcagtgaggtgcaatcgggccactgctctccagcctgggtgacaaagtgagaccctgtccccacccaaaagcaaaagtaaaaaagaaaaataaaacaagaaattgtcttgggccagacttggtggctcacgcctgtaatcccagcatttgggaagtcaaggcgggtggattccttgagcccaggagttccagaccagcctgggcaacatggcgaaaccctgtctctacaaaaaatacaaaaattgtcaggtgtggtggtgtgcgcctgttgtcccacttactacttggggaggctgaggtaggaggatcacctgagtcttcagaggtcaaggctgcagtgagctgagatctcaccactgtgctccagcctgggtgacaaagtgagaccctgtctcaaaaataaaataaaataaaataaattaataaaatagagaccaggcactgtggctcattcctggaattccagcactttgggaggccaaggagggtggatctcttgaggccaggagtttgagaccagcctggccaaaatggtgaaacttggccggtgcgatggctcatgcctgtaatcctagcactttgggagaccaaggcaggcagatcacgaggtcaggagatcaagaccatcctagctaacacggtgaaaccctgtctctactaaaaatacaaaaaattagccaggcgtggtggcatgtgcctgtagtcccagctactcgggaggctgaggcaggagaattgcttgaactcgggagatggaggttgcagtgagccgaaatcacgccactgcactccagcctgcatgacagagtgagactccatctcaaaaaaaaaaaaagggtgaaacccagtctctactaaaaatacaaaaattatggctggtctcagcacagtgc

SEQ ID NO: 915834 - DNA, 4001 bp, Homo sapiens
ccccgagcagtaggtgggcatttgaccaaagttgggccaatcagaccttctctctctggactttttggttttctgagagaaatcaaaagatagaaaatggttggtacaaaacttgtctatgggttattcgtgcttacgcatgctcagagagctgtcctgattcctgtcctcattgagatggactctccagcttccagcccaattttgtgagctctcccatattccttgaataaatttctttcttgcttaaattagattctttcccatccaaataacctgaatggatctgctaagtttgactgggaagcagacatctctttgtaccctaaggctgaggtgtggttttcacaagtcacaaggagcagggtcgagggaggcatcaatttattgacttctagaggtaacttcttccccatcattctataaagtgagtcatctgtactgcaaaacctctttgccttatgtattacctggaaaaaaattactctcccttctttcccctatctggaatgcttcttttatcttctctggctggcaaatactttaaagccctgttgacatgtcagttcgtctgtgagcttttcttagacttctctttgtttctccactaacttctctgtgttccttcatcgttgtgctcatactccagatgactccaatttattatatgacagatgtgtctcttccctgtggatgtaacctctgtaaagatcagggactgggtttatgttctgttggacctgtgtggccttggataagtagcttagcttctatgaggtcaagttcctcatctgcaaacctcccaggttgttatggggatttggtgaaataatataggtcagtatttctcaatctttagtcatttaagtctcattgtttctgtcagctctgcctgcacctgcactattcttctttattttgtatacttcgctacatggactcactttttactttttacgtgtatacatttacttaagaaggaatatatatttaatcagcaccattattggacaattattaccacttgccaaaaaataggttattgaaaaataaatatgctgaaaacaaaactatgccattaaattttatctagagatgattagcttctacctgtggtctttattcaagagagtgtttagcaaatgataggtgctaaagacacaatggctttcaaggaaggctttccccctgtatttaacaggaagaattgattcaatgttatttaataccttgtctgtctagtacctaacatcatgttcccatccatggtcctgcagtgcattttgataagcactgcttggttaagtgtttagctcagtgcctggcatggggtgaggatcagtacacagagacctcatcctgaggctgcactgtaaacattgcataagggccgcttgctttattcttgtcaacctccaattctctcctcattactccaatgataactgtattcataaaatcaaaactcaatttgctactttttcgataagcctgtgaccaacttgaaaacaaagcactgttgcatggggcttggagaaaagagaaggaaaagaggcagaactctgtgaggaacgaccatggggatgggagatagagaaggctccagagccgcccagccatttgtggctgaggatctaagatcttccctggggagaggggagggcaattggaaaacaaacaaaggaaaccaagagggtgagagagtgcattggaattaagtggtagaccacagaacaaggaaatggaagactgagagataaggggacaccaagcatctactggaagcccatcgtcatataccttctccttttgggaccactggtccagcacatctgcagcaaagttaaagtttttaggcaatggcctgttacagcgatttatggcttcaaagtcagcaagagtcagaggcgtccaaagctggtgatctttgtgtaagcgccggccaggtggcttggtgagccagatgaatctaaatgtctggtagcggaaaaaaatcttcatggttcccaaaggactttgtctactgctatggacacagaagtactacagcctgtagggagagatggatagagagtatcagtttcttgatgctctgtggtgagactgggaggtggatttgtggctgtgtgtccctggcaagttggggaacacctgaaaaacacctcatccttcctcagagctgctgccttagccactgactggtctccctgccactggacccttcctcttcattctgtctgtgaccagatgagtctaaaaaaaccccttaactacagaattgtcagactcctgtcttctgttcctgtcttctccccaaccaaacaacagacaaatagaaacttcgctgtctggactggcattcagagcctcctttcgcctgctttatacactgttctgtgtctgctaactcctctacttgaatttcctcttccagtaaaggaggcccgttaacttgccatgaatgccccactaagagttggcctgtcatttccctggctcctgcttaccctgttctcctctccccttcaacttcccattgtgattgcttggaaacctgggtttaagtcctggttcagccactttccggctgtaggactttggacaagttacttatcttcctgcacctcaattttctcatctgtaaaataggggaaaatatagtacctccctcctacagttattgtgaggatttaataagataatgtgtataaaatgcctagctcgtaaaaggtgacttcaaagtgttaattactactgttgtttttttgtttttctgtttgtttgttgtttattaagaaacaaggtcttgctctttcacccaggttggcgcaatcacagcttactgaagcctcaaactcctaggcttaagcaatccccctgactaagcatcctgagcatctaggactacaggggccacaccaccatgccttgctaatttttttttttttttttttgtagagatatggcctcactatgtcacccaggctggcttgcctccaactcctagcctcaagtaatcttcctgccttggcctcccaaagtgctgggattgtaggtatgagccactgcacccaggcaaccactgctgttgttaagattattttccttaatattattgtggcatagttttattttaaaaaatcctaccatatgaaccagaagacttggattttatttctttttcaaaaactgcttttaatattggtaaaattgcctgctctttctggactaccatctgtaatctaattaattttttaaataattttgtgtttatttcttccctgggttttccgtaacatgcatttatgctattcatgtgacagttgtctactttgtattatcaatgatagtttttcatatatgtgccctgtctccctacccagccggtatgggttgaggctatgtaatgtgttcttagcactaagcatgactcacagaagatctgcaataataaaaggcagtttttaggttcttgatgtaggcaggcactttgcatttctgatgtcattcaatattcatgacaagcttgtgaggttggtgctattattatctctatcttacagatgaagacactgaggtttaagtacacttaaggatcttatccaaggtcattcagctcgagacaaaccatgtcttgcctctgccaccatgagctcaatgacgcaaccagaggcaaggtttgaacctctctggtctgacttcagaacttaacctactcagcttctctgctatttattctcccttgtgctgccttcttcgataaaggtttcttgttgatggtgaatgccttcaccctttttgcccttcaggcttgtgtagttgttttgaatggagtggaagaatctgcaaatgtaaagagtacctgagtctgcagcatggtgataacaaacaatagaaaggagggtgcagggtgtgccatccttcattgttgttgccaagtcctctgtgctgctcagagtgacttctggataagtggcaggtccatttggtgcaaacacaat

SEQ ID NO: 915835 - DNA, 4001 bp, Homo sapiens
agaactttgagaaacagtgatgcaataatctctgtgctttcatctgaggaatactaggagagtttcctgctcctaagataattatggtctgagaatacaaagagagctattcttcctctaacatgtatagggtctagtgtataaagacatagtcttcatcctttactaagttaagcctccaattatttccatatttgcatttcaggaaagtgaaacacagagagattaagtcacttgactgtgaacacacagtcagtaactgtgagaagccaaactcagaccaggtagtctggccccagagtccatgcttttaatctttatgacttctagaaagcagggactaggttttactcattgttgaacacccagtgtcttgttcactgtctggcacagaaaagaggaccgatcaaatactattgaaaaaataattgataggaaggggcaaggtgctcagattctaaagggaacaccatgtcatccccacacacttttgagaggactgggcatggtggagacacagaacaggctctagccaattccattccagatttcttgctctgaccacagagccattcgtccactgcaaacctgaccatatcattcccctcatctcattgctgagcagtgtttttcaaacttttacaggaaacatcctctctaatggctggcagatgagagcaatcacacccccagagggcagacacataaggagccacactctaagagtatcactgactgtgcttcaccctcagtatcttagcaagcttgatatttattctacaatgtgtctgcgtttgttgtaacgcaaaaaaaatcatgcttataacttcttataattccaactccaggtggaagactttactcctaccatgacttctaacatcacctggcctatatctatctgtattctttctgggtaccccatactgcagcttcatatacacaacaggcctatggatctgatccaagctacttagcacagtacataaatcccttccggacccagcccctgactcaccacttcccctcccacctctccagccaacacaatcattggcagtcactgtctcagtcacagttcaagctgttgttcacctctagaactttgataattagggccttgtcgacttcgagaagacatacccatccttccaaacccttatggggtgcgattttattgaagtcttttcttaaccctccctccccatagtaggaggatacttagttataattccctagtttcttgtaccgcttgctttgtttacctagtatctcccttactagactgtgcggtccctggaggcaggatcttgttttagttttcttactattcccactgccaaagcagaaccttgccagtcaggtaaatctcccgtttatgggacactgggttcacaataggtaacagggtctctcaagagcagaaggcaagagaactgactatgaaattgaaatgaaacacgaattgaggggtctgaacacatctccagtttcaattttctttcgtgatagaatgccagattccaggtcccagggaggtcctggcgcccaaaaagttaccagggatgggggatcagggttggcacagaagtcactcaccacctggtagagggcgagtgtttgttctccagcgttttggtccagggcttgtaccagctgatctgctcggcagctttgccccagaacctctcggggtcggtcaccgaggctgcgaagtgggtcttgtactcgctgccactgccggaggacagtgccctgcatccccggcccccgagaccgccccgcgggcccgggaccactaaagccctgagggccgcaccggctccccgggccggagaggacccaggcaagggccctccgagccccccggcgctggtgactttacgacactgcagccaagacggtttcatctcctccggccacccgcggtccccgagtgtgcgacaaatggtactcttgcaacttcctggggcctgagggaagggagtagggggcgggggcaaattccgaagtgagcccagagcccagaagtttggaagccacactagagtcgccgggaaaaaccgacctggagcgaccagagaagcaacaggctaaagtgggggccccgggacaggggtgtcacagcgccgttgcagcaggttagttgcgctgctgcacgagatccaaaccccaacatgcacttccaaccccgcagccttccgggaaaaatcgcgctcaaactccagaacgtccttccgatttcaacacacaagtactcctaggaggaggccaacggcccatctctcaattttcaatccagcagtttgtacacggctggtttaatctttggaaggtcgttggtggaggtggcatcgcctctgacctgcaggaaaccagcaactcggtgcgttgaggcaaggctctttgattgttatttattgattgattgatttttcaaaatcagctcagtccctggttactaaaaacacaagcagctccagggcaaggactgctccgggatttcctgaccactgagagggtaggaggagtggaaggaggttgtgccagacaaattgggaagtgcttcttggggtgattgacaggtcacagggaaggtgaccccactgggatgcggattcacctgctgaccagactccgcatgtgatctagacagagaacagataggacttgttgcattgcctcccttctaatttgcctgcttggagtttctgtggcttttctaatgagaaaacaaaacaaacaaataaacaaaaaacaaaaataggaagtaagtaaagatgaatcaaaagaggaaactgggaaaatgtaaaaagaaaggtggtatatagtactgtctaggtttaacattcgtcaagctccgctattattcatgctttagcgagattcagatgcaatcttttgccttaatattatgccaaacacattctgtcttggtgtgacagtatttgcagttttaaatgtaaagatacgtatttccaaatctgaggtgagaaatagtggcatgcccctgaccttgggaaggatcataacttgagaatccgtaaacaaatgattctgcaggaaaagaataatgtggagataaaggctaaacagaacagaggtaagtgcaatgcaaaacagagaatatttctttaaataaccacctccctttccactgagaggcaaggcactagacttttccctgacatctgcagtctactttagtccttccaaaggtctcaaatcaaataatgtcgaatggccaaagacacagtcaccatttaaatccagagaaagttacaaagccatttaacctcttcatccttccagaacgacagatttattattggcacctagcatgtgttcacattatactgggcactttaaacaaatgttagctcctgtaattctcatgaaagtaccaagaagtgggaatcataatcccatgtttacaaatggagctagtatagagatagatcgacttgcccaaggccacgcagctagcaagtgaaacagtcaggattcaaactttatggatgcccagtatttcaaagcccagatgctttgaattacagatatgccgtgatacaatttactgacacctcaaggtggagggctaggggaaaacccactctaatcctgtcactcactccaggatactgtgcaaatacgatcattttatctctgtgccacaacttgaacaaggaggggaatctgactccaaagtccaccattttaattccaggctgagtatcttctactttaaaaaaaaaaaaaaaatcttagaattccagtaaaatatgacaaattgaatagccacattcattcttctccttaaagaaactccactgaaagagaatcaaagagggcggttgtcgtggtaaaaatcctacaaggataaagagaacaggaaaagaaaagaaaccaaatgaaagaatagaaagaagatgaatctgtggaatatgatttaaaagtgggaggaggagcttgtggaggagaaaatagattttcctaaggag

SEQ ID NO: 915836 - DNA, 4001 bp, Homo sapiens
tggtggtgcgcaactgtagtcccagctacttgggaggctgaggcatgagaatggcttgaacccgggaggcagaggttgcagcgagccgagatcgtgccactgcactccagcctggacaagagagccagactccctctccaaaaaaaaaaaaaaaaattgctttgtcagctgggtgtagggctcacgcccctaataccagcactttgggaggccaacgcgggtagactgcttgaggccaggggctcgagaccggcctggccaacatgatgaaaccccgtctctaacaaaaatacaaaaaattcgctgggagtggtggtgcacgcctataatcccagctactctggaggctgaggcgggagaatcacttgaattcaggctgcagtgagctgagatcgcaccacggcactccagcctcggtgacaatgataatgatacacattgccaaaacgttttccagaaagattgtaacaatttacattcctactcagtttgatttccctctttcatttctgtttcaaaagaaatgaaaaagaaggaaaggagggaggaaggaaagaattttttttaatgctctgttaatttgataaaggaaaggcgtgtctttaggtttgcttatttattcaaacatatattttatgactatacatgttatgaatgccattgtattaacagtacttctgtttaattgaccttaccaactaggtcggccagtaggccaaagtcttcaaagcctctagatcctaagaccgtgatttttagacttttggagggtcatagaaccctttgagaatctaatgaaacctataatcttgtacccaggaaaatccgcatacacccaaacaccgtgcccatagtttccaaaggctgatgaactttacggacccttctgtcaggaacgcatctctataagcctattttctttggctatttcctgttacgaaataaaacatatatcccacttccggggcctcgcagcccaaaactaaaaccaaaatcaatttcaattcaaagcatcacaatcacccacccagctccaaccagggaatccctctggctaagtcagggccgcgcgggggtgtctgcagttcattgatgtccggagatgaaacgtagcacatgaaaccactaggcgtatatatcttgtccctcggagaaagaaagtacttacgacacattttcatggctgtaaccgattttggcgttgtaagctccattatccagcactaaggtcgtcatctcaccaccaaccacaccgcagccgtagttgttttccctttccgacccctctgctcgagctttttccggtactctatggtttgttgggcggagcgttaggacgcgcctctggtcaccttagcaacggaggacgccggaagtcggagatgctaagcagcaccgaatgttaggggctgtgcttccaaacttaacctgtttatgtggtggcgagatttgactactatgtgctttctcgctcatttcgtatttgtttttaactacgcagattaattcgcgcaagttttttctaatcctgtagagaaccggctgcgtgtgtgtgtgtgtgtgtgtgtgtgtgtgtgtcttccaatcgcattcttcagacggtgacattctttgaagaaaaaagtgcaaaacttgctcttggactcacattcatactctcctcttccccagcccacttgctcttcaggacgaagctgagtgagtctttctcatccaaaaaaggcttttgggccggacgcggtggctcacgcctgtaatcccagcactttaggagaccaaggcaagcagatcacttgaggtcaggagcttgagaccagcctgaccaacacggcgaaaccccgtctctattaaaaatacaaaaagtagccgggcgaggtggcgggcgcctgtaatcccaagtactcgggaggctgaggcgggagaattgcttgaaccggggaggcggaggttgcagtgagccgagatggctccactacactccagcctgggcgacagagcgagactccggcagggcggggacttggcaggtgcgggaggcaggacctggcttccggggcgtcgcgggggcaacggccagcgggcgggggcaagggccagcgggctaggacaactgccaacgggcttggaggggggcgttctacaaattccaggccactttgagcgcctgagagaggagcggggcggcgggaagggggcaccgcgggggcagggagcgcagcagccgcagcgcgaaggcgcgggggccggggaacaaacggttggcgcgcaggcagccataccggggccggaacccgggcagaggagggcagcgacggcgatggggaggctgcagagcccggggcgggtaccgcgcgggaaccagcgcgactgcgtggctaccgcagccgtcggttcgtgttggacgggcgccgctgctgcctctgctacttcaagaacccccacgacccgctgcccctcggccacctggacatagcagaagcctgcttcagctaccagcgcgccgacgaggcggcggagcagcctgcgcacttccaggtgcgcagcgcgggagccgccacggtgcttgaggtgggaactcgcgccctgcaagcgcctgggcccttctgtcggcgctccttgcctcccctgggggcctgccccatccaccctcctttctccaaggcctcctcgcaccctgccaacgtcggcctgcctttccccacttctccacatcccgtcctcgttcctatctcctcccctccacctgggcttaggcccgggtggctggggctacccagcccagtctccttcctcagacactttgacccattatctccctctgctccttccctctgacccctctctagtgtcttctcacccccagcatcccgtggatgtccggtgcagccctcccaagcattcataaccgtaggcttctgccccaggggcctcctttagaactctgctaggaccttggtacatcagttaaccgctctgcccttcagcgtcctctaaaatgagatagcagtagtatctatatcatggggtgttgagattaaactaattatactctaaactgctcagtaaatgttagtacatttattttatttttatttatttgttctttttgccataggatctcgctctgttgtgcagactgaagtgcagtggtgtgatttcagctaactgcagcctcatgcctgggctcaagtgatcctcccacctgagcctcccacctgagcctcccaagtatccgggaccacaggtgcaggcccacgcctggctaatttaaaaaatggtttttgtgtgtgtgtgtgtgtgtgtgtgtgtgtgtgtgtgtgtgtgtgtgtgtagatgggggtctcgctatgttgctcaggctagtctcgaactcctgggctcaaaccatcctccccacccatcttcctgggattccagacgtgagccacagtgcatttagcactatagacaaaaagagtcagaaatggcagggcccttagagatattccactacatttcctccgagagtgggcagggatgctccagctaaggtcacacagccagtaagtggcagaccctcttttcttgctccttgttttgtccaggagaggtgggagggggtcacttcagccagttaggccttgctctttgaggctcttttaatcctccagcgaagagacataatgggaaaaataatgcagaagcaggagagtagagtgaggagtcctggtgctgagaggcctcccctttccttgggagtccttagcgggctagactctgtcacctccgaggggtccacctgcttcgagcacatagagggatctgggcccaggcctggagcccagtatcctttctccaggctgtgctccctgcctggctcctgtgaacctccaccttctctctcattcctcttccgcgctgcaggctcggctttctccagggcagcagggttgggctgggatgtatgaaagcactctcaaagctggccacgcggagagcagagtaggcaggctcttggcctt

SEQ ID NO: 915837 - DNA, 4001 bp, Homo sapiens
ggatttaaagatttatacatacacacataaaatgacaaacctagaggttcaatctccctttttttttttttttactacccagtagagaacattatgttacacattccaaaaacatggcccttaataaggcccgacgaacatccttattcatgcaaatcattatctcaccacaaatgtcaagctctgttcatacaccttcaccatgtttctcaaaccccacagcacagatacctaagccacagagcagtgaggccgaagaacacacacgaggtgcttaggagaagcattagcccgtgaacaaagaccccgctgcacaggctccaccactgggaacaaatatcaaagccggagataatgaacttgtttttgagattccaaagtggcatggtgtcttttcttgactgtctggtttattaaagacgactgaacccacctgagaatcattatttttagtgtaagagaagagagccacagaacacactttatctcccattgctggaaggttaggggctgctgagaagtcaaagcatcaggctttgtacgtcaggagcgaatacaatcctgatcatctctcccagatccatctgtgggtcaataatcgcttcaatataactgccaaatataaccttcatctgctaccccaaggccaaaacacattcgccaagactctcttaaatgaaatattttagggtttcatctgctcttctcagcccccaaagcctcaaaaacaacacagccagcgaagtgtcccgcaaaaaggtacccgcttctacagagaggagagtgggggggtggtataaggcgagccgcagactgtggggattgggaggtaaggggtgtgtgagggtgggcgggctgggaagaggcatcgtgtaggaaggtaaataagtactgaccaagggccgggaatacagtccagtggtgggatctttaaataatcttgggggtttggagacaggttccaggatttcacctgaaaggcatccacaaagtgattaactgaatgggccccccggggtagggtgggggaggcgaggaggaaagcaaatacacctagattcacatcaacccttggggaactcggttccatagggttagggattccaaagccaggctccaaaaaggtttaggggcctgttcgtcccacttcctccaaatagcctccacggggcatgagtgccggagggcggaggggggattgccccactgaactcaagggattgagtgaaggggaaatgtgactccctttcccagaacattagggaggcagtggagggaggggaagaaacacgccaagtgcaggacctgaaggaaaggttagagaccccttcccctacagtctgaggtgcgcggactctcaacatcaggttccctcggagaggctaagaccccaccgcccgaaccccacagtcttggcgggagaaagacgccccccaggagcacctggagggagggaagaaagccccccgcccctggacacggtgaagggcagaaaccacggacctccaaatcttggagctggaggctcagactcccctctctggaacacgagggcgctgggagcgcgacccctgagaactgcccgaatccagttccgcctggaacagggctcgggtccccaggggcccggcgtgagctccgtcgccgccgggcggctgcgcctcggagatcggggaagctgactgggggtcaccccgactcctctgcgccccccacccggccatattgtgctcgtggggagggggcgcgctgtagtccagcggccgcggctcgaggcctcgcccttgccgggccctctccatcccggcccccgccccccgtcccaggactcaccctggaccccccggggcccggacccgccgctgccggcgagcaggaggacaacaagggggaagaaggaggaggctccggccgactccgccatagtaaccaccgccgccgccgccgccgccgcagcccagcagcgcccagcgcgcgcgcgcgcgcccccggcgcctcccctcctcccgcggcccggctcccgcctccctctcctccgcccggcgcctgcacgtgcgctcccggcggagccggcgccgcggccgccgcgcgcgcccccgaagggcggggccggggcgcgcgcgggcgcccgccttaaaggggagtgtccctgttaaaggggtgggcggggctcacgcctcggccaacttcgcggatcggtgccgagcccggcgcggaggaggccggagccgaacgtgcagtctcctccctctcctgcaccccacgcagtgcagaattatcttatcagagtcgatcccccgcccccgtcgaatattctacgaatcccgtgcgtgttccagttcctccatccctgcgcctagcctcaagcccccagcgcgtcccctgggatcatcgccgcggtctcctaactggtttccctgcctcgcctcgccccctgccatcctctggacgcggcagcctgtgtgatggaatcgcggcacgcgccttttcagaacatagcaaagctctttattgatgacagtatgggtgagggtgccgtgtgaggcactctgattgggctggtaggtagaacccttttggtaaacaattggcattatgcatcaaatgccttaaaatcttcatatccatttacccagtattgtcccctgtcctcaagaaataataagaggacagatgtttatgaaaaatgttaactgtatatttatcattgtaaaaaaggtagaaactaagtagacaataatagaaaatgttaaattatggcccatccatatgatggaacattatttagtaatttaaaatcctgtttacaaaaactattgacatgagaaaatgcttacaagataatgttaaattaaaaaagcaaaatgcaacactgtttacagtattattcaaattgtactgataatatgtgtttataggaaaaaaagactggaaggatatttacccaatagtaacagtagttattgccataatttttttacttttaacatttcaataatttctaaatatttttcaaataaatgttactttcaaatctagaagaaatgcttaagaaagtaaacaaatcactccgtatctttctgaaaagaggtcagtttctttagcttgagaaagaacttgatataaaggaaagggcagaatttttgcagccagagaattctggatctgaattctgcttcctactaactagctgtgaaaacttgggcaaggtttgaacctctctaagcacagcttcaccatctgagatctaggggtggaaaggatggccaagagatagggagaacagttgcttaaatggaattctcaccttctaagtttcaccaacctgaagaactcccatcgtcatatccggaaaaaataaagctgaagacacactcgccagacacagtgtacacacaatcacataaagtcatggggaggcattgtctacaagttggtcagtgtagctggatgagtaaataacttattctcctctccctcatctcccccaaataggcacaccccacccagtccgtctaagtggtttccaatccatgctctatccaccaagctgtggtgcacacagtgctaggttactgtgttagtttcctactaccaaactgggtagcttaaaatacaaatgtattctctcactgttctggaggctagaaatctgaaaccatggtgttggcagggccatgtgctctctgaaggctctagggaagaatccttccttgcctcttctagcttctggtggttcccaggatccttggtgttgtttggtttgcggaagcataaccccatgtcttcacatggttatcttccctctgcatctacatctctgtccacattcctctcttcttataaggataccagtcattggattagggcccaccctaatccagtatgagtgcaaatgatcttaattggttacatctgctgctaagatcctcgttccaagtaagattacattcgcaggttcctggtagacacgaattttgggtggacactattcaacccag

SEQ ID NO: 915838 - DNA, 4001 bp, Homo sapiens
tattttggtagcaaggttacaattagctcaccggtggagaataaacctatttataacacagcagtccacctgaaagacataatcatctaaaaaggttcttagaggaaaataagtgcaggttcttcctgtactgattgcagattcccaaggtccttttggataaagtcctcagtctaaccttcctgtgttcacagtcaccattctggccacttctcagcctccatgttcttatgtaacatttacatagtgccataaacatacccagagttgcgtaagaattaaaacgttgccaaaccaataaagcctaaagcaggtcactccctccagactgtctttgattagcacaggtatgctgcctagtcgacgatgtaagagcctgccagagacagaaattaacttgaggaaatctgaaaggggtctacaaaaaagcacaaaaagaaaaccacactgtgacatgctgtacgtctatcaatcacagagtatgtttttctgctccttaagataaaaaagtaacccagcattgcttattcactgaagtcagaaactgtgtctaaaaatacctccccgccaactggctatcagtaagtcagtctcacaaatgtcccaataagagtgacacaaaatatttccttatttttacagagggaaaactgaggcagtcacagaaaggttaagttacttgttcaaggacaacttgtaaggcagctaagttctagggctgaaaaccagcctcctccctccatctggctttaacctttaaccagagtagccattttaatatgttttatcacatctgttccaggagctgtttaaacaaaactaatcagaggtctctacaagactgcacttccactgtacttaaaatccatgtccactcaacaaaattacaaggcttggcttgaaattagatttttagtccgctcacaaaatttcaaaatgttcctatgagaatgtcaaatatctctcttgttgcttttgtcttgagaaatgaatgtcatgttctcctgctactaactcaattttacatttttaaatgtgaaaattccaaagccaggccttaaaacatgtacacctatcaaacggatgctatttctaactgaaactcattctccttatcactggccttttactaagtcctagttaattcattaattaatagaaacacctatcccttactgcccctcacatcaagtccaagtatcaggcatcagagctgtctggctctgtcactcctccagcccacgtaggggagcactatataggaaatgcaggggaggggaaaaaaatcaacttcttgttatcccacagcctctattttcccagaactgacgttttactttaagccctttgcagcagtggtctccatagcatacactattggcaactagacgtgtcctggaaaaaactgtagtgtctggccaagaagtttaaaggccctggagaatgtttgctggacacacaacctaatttccaatttaccaaaaaaagaaacgaactccctattttactcacccaccttaacccccacaaacatccattttaggaaggttacaaaaaaatgaactctgccccattcagaaccacttggattatcaaacattcttaactaggctcacaaccagaaaaaccccacaaacactacatcaaatcagcagggaaatgactgttaaaaatcctggatatattaggggcaggataaaaattcctatatgaggatttaaagatttatacatacacacataaaatgacaaacctagaggttcaatctccctttttttttttttttactacccagtagagaacattatgttacacattccaaaaacatggcccttaataaggcccgacgaacatccttattcatgcaaatcattatctcaccacaaatgtcaagctctgttcatacaccttcaccatgtttctcaaaccccacagcacagatacctaagccacagagcagtgaggccgaagaacacacacgaggtgcttaggagaagcattagcccgtgaacaaagaccccgctgcacaggctccaccactgggaacaaatatcaaagccggagataatgaacttgtttttgagattccaaagtggcatggtgtcttttcttgactgtctggtttattaaagacgactgaacccacctgagaatcattatttttagtgtaagagaagagagccacagaacacactttatctcccattgctggaaggttaggggctgctgagaagtcaaagcatcaggctttgtacgtcaggagcgaatacaatcctgatcatctctcccagatccatctgtgggtcaataatcgcttcaatataactgccaaatataaccttcatctgctaccccaaggccaaaacacattcgccaagactctcttaaatgaaatattttagggtttcatctgctcttctcagcccccaaagcctcaaaaacaacacagccagcgaagtgtcccgcaaaaaggtacccgcttctacagagaggagagtgggggggtggtataaggcgagccgcagactgtggggattgggaggtaaggggtgtgtgagggtgggcgggctgggaagaggcatcgtgtaggaaggtaaataagtactgaccaagggccgggaatacagtccagtggtgggatctttaaataatcttgggggtttggagacaggttccaggatttcacctgaaaggcatccacaaagtgattaactgaatgggccccccggggtagggtgggggaggcgaggaggaaagcaaatacacctagattcacatcaacccttggggaactcggttccatagggttagggattccaaagccaggctccaaaaaggtttaggggcctgttcgtcccacttcctccaaatagcctccacggggcatgagtgccggagggcggaggggggattgccccactgaactcaagggattgagtgaaggggaaatgtgactccctttcccagaacattagggaggcagtggagggaggggaagaaacacgccaagtgcaggacctgaaggaaaggttagagaccccttcccctacagtctgaggtgcgcggactctcaacatcaggttccctcggagaggctaagaccccaccgcccgaaccccacagtcttggcgggagaaagacgccccccaggagcacctggagggagggaagaaagccccccgcccctggacacggtgaagggcagaaaccacggacctccaaatcttggagctggaggctcagactcccctctctggaacacgagggcgctgggagcgcgacccctgagaactgcccgaatccagttccgcctggaacagggctcgggtccccaggggcccggcgtgagctccgtcgccgccgggcggctgcgcctcggagatcggggaagctgactgggggtcaccccgactcctctgcgccccccacccggccatattgtgctcgtggggagggggcgcgctgtagtccagcggccgcggctcgaggcctcgcccttgccgggccctctccatcccggcccccgccccccgtcccaggactcaccctggaccccccggggcccggacccgccgctgccggcgagcaggaggacaacaagggggaagaaggaggaggctccggccgactccgccatagtaaccaccgccgccgccgccgccgccgcagcccagcagcgcccagcgcgcgcgcgcgcgcccccggcgcctcccctcctcccgcggcccggctcccgcctccctctcctccgcccggcgcctgcacgtgcgctcccggcggagccggcgccgcggccgccgcgcgcgcccccgaagggcggggccggggcgcgcgcgggcgcccgccttaaaggggagtgtccctgttaaaggggtgggcggggctcacgcctcggccaacttcgcggatcggtgccgagcccggcgcggaggaggccggagccgaacgtgcagtctcctccctctcctgcaccccacgcagtgcagaattatcttatcaga

SEQ ID NO: 915839 - DNA, 4001 bp, Homo sapiens
gggctcaagtgatcctcccacctcagcctcccaagtcccaagggactacaggggtgcagcaccatgcccagttttatttttagtagagatagggtctcactatgttgacccaggcaacaaaggtggtgttgctgcccagaaatcatctgtttgccataggcttagtcaaagtctgagcctcaggtggggagagccagagtagtggtatgcccgaaaggtgcttatcaatgtttttctccctagcacacctgaaggattgataaaacctactcccatcaacggcagtggctcagcacagcagtgatcttcacagggctggagaagcgccatatcaagcacaaccttctggactcactctgcacttcagtaggccttaccccaacagcagaggagcagacccagctgttcatattgggttgcccttacgattcatccatgtgatttattagcccttcacagcggggtgatgcagtggaacatccaggtgatgcctggattttcaggtctcaggcagaccatggaggcagcacagtgtagcacagaggttagggtgtgggctctggagcatggagacctgggttcaaatcctgcctttgccacttagaggtatgaaatttgagacgttacttaaactttctgaggcttaggcttcccatcatatgtaaagtgggaataataatagtgttatctcataggtaaaatgtagtacaattatttagcagagtataagtagtacacagtaagcactgaaatgttatcaagaccccaaccatgccattcaccccaccatccaaggagttttggacaagtcccatattcatgtctgtttccttttctgtaggaaggggatagtaacccctcttccactaggttgcggccaggattacatgagaaaaaatatatatatctaagtgtctacatagttagtactcaatcaatggtagctatttctaacaaaccaatgaaatggggggacaggtgagaggacaggtattaggacagaccctgactcagccagaagctggccatacatagagagagtgagagcaactgtccattatgcccctgtccttggagaaggaaagaggagctggggcagccagcccagccatgggtttcacagcactggcctccatggaaaaatctggggtcccagcctggggggagactgggatcccctttggcctggatcctgaaggaaggtcgtggcaaggaggtgactgaccatgcgcgcctagggtgagactcctaggttggagtgatagtgtcagattcctcaagcaacagctggaaggactgatctgggaaaggtgagctctgctgggaggctcaacagctgtggaagtaggcattcactccaggtccacccagcggcctggaggacgtgtgatcccttctatgtgagtagagcaagacaggaatcccactgcccattttatgaagagggtaggagaacagagaagtgaagtcactgaccccaggtcacccgactagaaccaagtttctgatttccagtccagtctcgtccattcccctccaagtctcaggtagggtcatgggagctgtgcgtggtcagccaggagcagcttgcctttctaatgagctgggactgagcctcccgcgaccactctgcggtgactctggggtccgcccgaaggaagggcccactgaagcgggggtcaggccgcccgccacccggtcccgtccgcggacctcgactcacctctgggcccgctctgcgggtggcggggcgctagccttcggcggaccggggccacctcccctccaccgcgcggccgcagttgcaccgccagcgctggacggcgggctggggtccgggcgcggccccggaccgggctggagccggggaggggctcgctcggcgcagctggcgcggcagcctcccgggactgggatgggggctggagcaaaaatgtttcttattccagcgtcttcctgcctggcccagctccaccactccctcctaataaaccgtttccttattgcccagctcgccgactggccgccgctcgcccctcgctggggctgcaggaccgggacccacccccgcgccgctcccagcccctcagggcggcctcccctcccagccgcccgcagctcccgggtcgctggcccgcacccgggccgggcctcccacatccgcctccccgagggggcgggccttggactcaggccgtgggggtcctgtgggggtcccataggggtcccgtggggtccggacccacagccgtgggagacagagccgagactgtaggcaacgtctggcggccggagtagtgggtgggggtagagggggatcggctggcagcagcggaggggccgcctggaatcggggcgccgggaaggggccaccgaggaagggacaggcgggggtgggacggggagggacactacctatccttaccccaccctcagcccgggggtcctcggtctaggaggcttgcagcaatgagggcagagtttggggctagcaaaatccagatgcgttttgactccgccctcgggaactcccgacttggcccaaatccttcagtcccctccctcgggccccttcgtcccccatttgtcccctcctgtcttcagcagcctctcccgatccgcactcagcacaggggtatacaggcccagaggacggccttgggttagccctgaggatggtttgagcccttcctggccgttgtgcagctgggtgacaaagacacccccgccccgccagggacagtcaggatggagggacacgctgggagcagccttggaccttccccttccaggcagggcccccaccccagcaaatggagctttagatagaggtggggaatggagcctccctggaactctgctgacacaaggcagctggggagggaagcagaatggcttcataccggcaggggagggggacacagactcttcctgatgctcctgcacaggctgggagcactgacctcactgccctgctttgctccaaccatctaagtacctgcaggactctggtcttagtcctagcctcctggttatccacagagactctgaagtcaaactacctactaggaatgcaggctggttgtgttaccgtaggctagtgacacctctccatgcttcagtcccccatctgctaaataggcatagtaaaccgtgccagcctcatagggtggttgtgagaatagacggaaatgatgcttatctcagctcatagcaaagatgctggctggctgagcctgactcagaggaggccctcaatgaaggcgttcgttaattaaatgaataaatgaaaaggctggggagggggtggcctcagagacacttggaaagacgtgggtattagaagcaggagtagacctctaaggtgtcttactctaatatggggattctacaagatgagccagggacccctcctcctgccccgccccaccttttgacaggaatagaggctgggggagataatggctaaaagctcagacaggcatcaattattgactgacctcacttcctctgctgaaaccctccccatcccccaccccacagctgcttcacaagttgtgagcgttgtgaattcccagaaccctgacacacccaaatttcagtgtcaggacagaactgtgtcctgcagccaataggaagtactatgggattacgatatctgctctttcagattatagcggccacttgggccctctacgagctggagaactgggagcctggccgcgggtctgtctttcacactctctctccctgctccgctatggcttctggtcaaccttttcctcccccaacccctggatctctgtcctgagaagcgagagtcggggcttcccaaaggaagcctttagtctgagaggcacactgagcacagaaacttcgagatggacaaaagctgagagtcacttctaacagtcagtgggggatggaagactatctggaccagcgttcgtgaaacagataaaaatagagtacattttgggagctggaagagaggacccagg

SEQ ID NO: 915840 - DNA, 4001 bp, Homo sapiens
cccagacccttaggtttaacttaatccagacccaaacccagtggcaggccacccccagctgcctctcgttccaccccggtcctgcagaaagaagaacctagccctggcccgtctccagcccactccctgcccagcagaattccaattctgacccaggcctggcaccgcctgtgattccagtagccaaaaactccctcacccctccaggctcatgagagcccttggtcctcatccaccgggctcacccactgctcacccacacactccaccaaggcaacctgccgtgccactgtcctctgcaccaggaaggggagccctgagccactccctgtggtgcagtcactgtccaggaggtcctgggggtacggagaggccactgagaggctgccacaaccagccacagcccccttctctatcctcgacctgggacctgctgggtcactgcaagctcctcactcgcccagctccccaccggctctaatctctgggtgacccctctgattctgcagttcctatctgcccctcctacaccctgtgtcccaggtccccaggcccatacccccaacatgctgtcgccctgctcagatgctttcaggatgagactggactctcccagctcgctgtgcaggccacgctgcttctcctgcctccgtcggacatgccacaggcccaggacacccagggccaccagggccagcaaggccagcacggggcccaggatcagggccagctggccatctgttcccggctgctccgaaggaggttgggtggctgagggagggggacactgaggctcagcttccactaggtcagctccccccacctcgggccagaccactctgccagttagatcccagagtcctgcccacccgctcccccgcccccagcccctttattggccagagcatgagaggaaaggagggaagggagggcaggggccaagaagatggggagggagtgctagggcagctggacgtaccctccagcaccagggacacgttgtggttgcagaggtggctgtcgcagcagtagtggttgacgaactcggtggggcgccccctgcagagctccctgtgcaagttcccgcagccccgatgttcctgggggtgcctcccctcctcccgcaccagcactactgtgcaccaggccccccggcaggtaggccccttgcaatgtgggctctcacacgtgcaggtcaccagcgggccccgagacggcttcacagggtctcctggaagacacaccggaagctcagccactgtggtcccagctcccccaggctgagcccgacacccatttctgtcctactgtccctctcgtctgacccctcagacaaacaccttgaagctttggtctcttactttcatcctcagtcatccttccctcagaaccctcccctcagagcagctgacactctgaaaagcaggcttttgtcccctcctggctcctaggtcctcccctcccagttctaggctgggctgggcccccagccccagccctgagtgctctcccaggcttggcctgccaacacctgctctccctccaccccacatataggcttccaccctagtctgacagagctccagcctgcaggtctggatcaagaggagagcaaaggagggctggggtagctggggactgagtctaatggagcctcactgtcctccactctccagtcaagctcctacattctccccagcttctcaagttcagccccaggcagagctgatctgggcccagatagccctttctgtatccaggttcctgtttcctaactgctcccccagtactcaccctgggtcaccaaggccatcagcagcatcagaaggcctttcctgggggagcccaaggtcatggtccctgcagagaggagcaagagaggtggagtaagagccatgaagtgtgacagccgctggccgtggctccctcctgcccagaggaaatcacagagttttttttggaggggaggcagggaggccgcctccctactccctgccgcctggctttggggcggggcctgcaggggaagtcctggttcacttccccatggaaaccatcctgttagaggtgaagggtggagagcaatgtttaagtgactgagagcttggggaaaccctagctctgcactcctgctgctgagctcagactgcaggcaggttgggagagccgcagggagcacccaattggggtagaaggagcatctctccagcagctccccttctgttctgtgtctctttcccactccctcacagcttccacccctgcctaccctttctcaatgcccccccagccctggctgcctcaaacataaacaggctcctgtcttcgcttcctgccattcagggtcctgccaagccaggaacaggaatcaagattgtttagattggggtctggatagaacaggcaggagtcacgcacagcagggaactgagggcatattttcagggtgggctgcagcagccacaaggtctggaggggctttttaaatatgcccttagttccttgctacccttagttccttgtgcctgggacacccacatgacagaattctaggtggacatcctgtgaatcacaaaatccagctccttgttttacagaagagaggagtaaggctcatacagggaagaagacttgtcccgggtcagacaggactcactggcaccagcaggcgtacatcccaggtttccagactcctaatcaagtgctctcttcgctctgtccctatccagtggtggcagcccatgtctgagccctcagggctataacaaccatgcaaagctcggacggggcagggtcatgccaggtgtagagaaacctctctgcaagctcaccagagtataagctgccctctcggagctgttccctggcccccttctttccccttgccatctaggaaagggtgggtggagggccagtgatgtggcaggggaagtgaaacacacttagacactgaatgtttgaccttccatggctgactagggttgaacttttccagaagtttgttggagagtgttagggggagtaattctggtctatgatagtccccaatccaggtcccacaccaactagtgcttctgaagccacccagtcttcatttctcacaggtttagaaccagaagatattggctaaagctgcagcaagaaggaccctggtcagacagcaacaggactttctgaatggtggagcatgtgcaggtgtgtgtctggggactggatcctcaggcagggcacaaggcagggagactgtcctttggcatgacatggtgagcctgacagggctgggcacatggccacagaggcttcagaaagcccatagtctaagaatggtgccaaatgaagacccaagatgctgaggctctgagggcagtatggctaggggtggggtaggggggcttcataggcctctctggctggtggcaggcctggccttcctgcctgggcttcctctgccccagaggcccaggctgggggaggaaacagagccctgggctgctgcagctgtgtccccagcctctgcctgacctcctgcctcttgcccctcccgcagccagtgaggactctggctagcactgtgcggcaggactgacggtgggatgggatggagagagcaccctagaggagctgaatctgcccactggggtactagcaggaagccatccttggcagcctttgctagcccagaaagctgcaaaggagagggtttgaggtggaaaggaaaaagtggctaacaataaggctaaaatccggcattcctctaggatcctctgtccgtacctctacttctctggccgtgccccagtccaccctccttctactttatcacgcatcagaatcacctgaagtgctcactgagaaaagcatattcactggtttcaccctcactccagactctgattcagtcctggaatcagcaagaaacatgcattttttaaaagttccccagggagttctgatcagtttgtgtgggcacaacgctaagtctggttcctctgctttcattt

SEQ ID NO: 915841 - DNA, 4001 bp, Homo sapiens
ttctaaaaatatctttgaacaccttccagaagtatcttttgtaaaagtatgtatctgctaaacaaaagctagatacttaggaactgtagaatcctgtaaccaaattcctagttcttgttttttcttgaatatgtatttgtcagaggagttactgatggagtgagcctatatatgttttaaaacaactgtccttaccctggggttccatgaacttggatggaaaaaaggtacatctttattttcactaacctctgatactgagcatttccttcaagtatgaaggtaggtgaaaccacagacactgtggctttatcaccaataaaatgatacttttatatcacattatggttggtgtagctatgtgtcaactgattaccaccacaaaaatataacagacataaccaatagatctctgtaggtagactgttttcaagtatgatgcattttaaacagattcaacctcttccctactctacttcacaggccatccccataccatcaacaaaatgaacttttcctattctgaccttgccagtgggagccatttcattttatgtatattcattctcctttccttctatcaaattccagaaacaaacttatctaagtaaatccgggggattctgcctcaataggaccacgaaagggtacatctgagtcaaacagcctgccctccattcggaaaacacactccattgtaacagtggtcccacaggccactccctgatcaccactccagggatgatgaaagagcatctttcatcagcgttgcacagagggtcggttttgcccagcaggcagagacctgctcatcctgccaccagagccttccgaaggagttgcctctggcttggtgttaatccttcttgtagcccaacctgaactccagggtcatcagccaccaactcgaaaacccaaggccccgttcgctgaatgtagcccttgcctggatcccaagaaaatgccaagggacccgaggacactcaccaggcctccgcataagctgacgacggccttgtaatcctcctgtgagttgacctggccgcggtagaagcagtggcgcaggtccgagggccctgcgtcgctctcccaggccccgcgctccggggttcccaagtgcacctcggtgtagccggcggccagaaaggatgcatcggcggtcaggttcagctggaagagctgcccgtaggcagtgaagcgatagtgggttcggaacggcatgggttccagcgcctcggagctgcgtttctgccggctgaagtggtggctctgagggaacacttctccaaactcattgacccgctcggggatcactacttcgtaggaggtcagtgtcctcaccagggcttctgcaacaacagcgacaggaccagtgagctcccacgcgttcctcattgtccaactctaaacttcttccaccaaacgtccccgctaaaggtcccaggtcccagtacagccaggggcaagacaaatgcacacatgctgatgcgcacgcacacacacacacgtgcactgggacggttagtgctctgctttcccacacccccaacttgccctaccctccccaagcaaagaccctaccactaatggccctaagcaacccacttccttccccagtacctcctaacctccccgcagcccccaactcgttccctccgggtgcaagcgaccccctgccccttgcgcccccgccgtgtggtcctgggagtgcgatgcgtcttaggcgcgcgcgattcctcgaaacccggcgcagtcgcgacctctccggctgactggtccgggagtcccgggagctccagcagggccagcgttccccaacgggctgagccgctcgtccccgcgacctgcatgtcccactcgggccccgcgcccccacttagccgctgaaggcgtctcgcggtgactttaccttgcctggggtggaagtcaacttcccaagacctggtgatgaagagcgagagatggtagagcagcccagtcagccacttggccacccacatggttccaccctggggaccccgatcggggaggcccaccagagccgccggcagccaagccggcttccctcgcgctccgatccctctcctccctctcgcccgccgctctccgcgcctcagcagcctagggaacagcagcgcgggccctgggccggctggtccagccacaccgcctgtctccgctcgctgagccgctgcttcatcgcactgcagcctcaccccccttcctgcgcccgcgctgccctcagaaactctctgctcaggttcagctcggcgcggggaagcaactcgacctagcaggaatggtgccaatatagccaccccggaccggcgagcgccgcggagagcccgcccctatgggctgttcccggccaatcagcgggaggcgcggcccctgctcgcttttccccgcgcagccccctcccttctccactcagccgcaaggggactgcggtacccttctgctgccccagtgggcgcgcgacttgctgagtagccccaaggcccggctgggcaccaattccggacctatgaaaccgagcgagatgcaagcacccgcgtacgtgaaaggtgcctagggttttgagctcttagatgaaatgacaagcatcagatagaacgtttctgttttttatgttttacggtacttttaggcttctcaaacaaaataaaataagctacaacggaagttcttgtaggcagaggatgctaccaatgaagctcagtgaccgggcctcacttgcatgggcccctgtgtgtgctgggagttgccgggagttgagtgccataggtggggcgaggaagccgagtttgcacacgagcacttctgacaattgccgaaataaattcagaaaaggatctgagtctccaaagttttagtaacttactgtggtttatttttcttcttttaatattcatatttgtacttaattttgtatcaagagccctccaaaattatataaacgtcaagagccacaaaacttggatctgccctgcctgcgagagtttttgccgttagttccacagtattcatatacactttgtttataatatacaaataatcccgtatattcacaattatcctcctctacaattactgtggctctgaatccagttgtctccaggtgtctgttaaattgaatacaccacagtggtagccgaaagcaattattttagtacgatttctcatttctcaaatccacctgtttgatttgcaggttacataattacttttctctatatccagtatgaaagcaaagggggtgggagtagtcagattgtcttgaaatccaaccaggggagagaaagaatataagaaaaaaaggaaaggagtatatgagtaaatcttcacacacacaatggaaaacacttttaatttagttcctgactgctctacctcctctgagctctcaacaatggaaatgctgcactctttgaattgacctctgatggcatgcctcttcacttttatatcatacacttggtcatctgttgttcaccacaaatgtggaacaatcttgttcaatgaaagagggtttaatcttacatctcccaggaaatcacccagcttggtgatagtaattcttccataatcattcccattcttttgtactcttttctcacaatgaatgaaatggtgacatttcattcaccaaagaattatagacttctggtgggatttttttcctaagctaaacatagtattaggatttttttcctaagctaaacatagtattattctcaacaaaacaaaaatggactttactcacacctgtctatttagtggttaccttcagtacattataattgagtcattttaattacattgcagctctgaatgtgtcttcacattaggagccataccttctctcctacaaataccggaaaatagaactgcacctgtttaattggcgatctcattgctgactacagggaaaatttgatatttcatttccatcactgaatgtttgtaactcagggcagtatttacaatcaagcatttga

SEQ ID NO: 915842 - DNA, 4001 bp, Homo sapiens
agatcaccacctagagctgctcttcagggatagcaccagcgcctcagtctctggtgtcaacttgcctgctgagatgctaaggcctggacacagcctgcactgccttttcagccccacggtggccctggggctatataccacacccctgcctccagccccacattctgtctctacagactgcactatttcagcgggctaaagagccggagactggggcccatggtgacagagttcaggcttgggtcctggggccctccctcccctcagcagtgtcctctaccccagatcccacatggaggcagacccctcaaccctagcctcccacctcctgctcctcctcccagatacagccagacatccctgcacccagcttccacccatgactcacccgcccttcctcactaagcccccacctgcttatgaggtgagaaattccccacctgctgccctccatccctacctccctggccacctacctgcttccagaggaaggcatcaccacggttaagttgccaggccaagatcaaatgcaaggtggagaggcccaggccgctgaggacggcagcccgcatgcggatggggaggagcgtgtaggcgatgtagacaaagaacacagggcaccagaggcccgcagaggggctgcgcgggtctgctgcgagagcgcccccgacctgcactgccgccaggatgcccagcaccacgtagctcaccacccacatggagtcctggcggaagctatgccggttacacaccaccatgagccccacgaacagggcggcggcacaggccaacagtgccacataggcaggctgagggcgggcgggtgcggcgtggaaagccagcagcaccgctgtgagcagcaccagcaccgccatcagcagcgtcaggctgctctggttcatctggaagaagtaccgctggtacaggcgctccagcttggccgaacggaactgcttcgactggaacacctgcaccagacggcgccagcaggatcgcccactcctgggcaccgcgtcgggcgccacctcagccgtcccgcccgctgtcgttgtcacctcggtatcctcgaagcccagggccactgcccgcagccccagctccttgcccttgcctgggccgcccctccggatgaaggcgtcatcctgccaggggcaccgaggggggcccgcaggggtggggctgggtggctctgcatcccggaggcagctcatatagcggggcgtgcagaagccacctgcccgagtgccacggcgccgcgaacgcttctgcccattgcgttcaccccaggctgttttccgttcatccactttagggaccaggaggccactaaaccatgacatgttgctggtagggaaggaaggagatagtattagagaccatccagtaggagtggtattaataccaccatcacagccactgccaccactagtagctcattacctaagcacttcccactgacaagctatgagtttcatcctcataaaattacttggaggtaggcaacaagggtatccccaatcaacaggtgagaacccaagacacagtcaggacaagaaacttgcccaaaaccaggcacagtggcttacacctgtaatcccagcactttgtgaggccgagataggaggatggcttaaggctaggaatgtgagagcaacctgggcaatacagcaagaccctgcctctattaaaatttcaaaaaattagcctgggccaggcgtggtggctcacgtccgtaatcccagcactttggaaggccctggcaggtagatcacaaggtcaggagttcaagaccagcctggccaagatggtgaaacctcgtctctactaaaaatacaaaaattagccgggcgtggtggcgggcgcctgtaatcccagctactcaggagctgaggcaggagaattgcttgaacccgggtggcagaggttgcagtgagcaaagatcgcgccattgcactccagcctgggtgacagagtgagactccgtctcaaaaaaaaaaaaattagcctggtgtggtggtatgcacctatagaccgggccattcaggaggctaaggcaggaggattgcttgggccctggtggtggaggctgcagtgagccaggattgtgcaccactgaactctagcctgggcaatagccatagcctgaaaaaaaaaaaaaaaaggaaggaaggaaaaaaggagggagggagggagagagggaaggaagggagggaagggagggaaataaaataaaataaaataaaataaaatacaaagaaaagaaaagaagaaagagttgcccaaagatccagcagccacataagtgagagaaccacgattctaaaccagatttgtctgaccccaaagccagtatacttgaaaatttccctaaaaggcactgtttgttggtggtcacaaactcaagtgcccaagtcaatgagtgaagcagcttatggttcagaactgggaggaaaagagttcataccctgtgcatggggcaggcaccacccagcagctgtagactgttgccactgggtcccagtgggtcccgatctgatttttctcaacagaagcagaagaaaaaatctggagtttttttttttttttttttttttttgagacggagtctcactctgtcacccaggctggagtgcagtggcacgatcttggctcactgcaagctccgcctcccgggttcacaccattcagcctcccaaatagctgggactacaggcgcctgccaccatgcccagggaaattttttctattttttagtagagacggagtttcactgtgttagctaggatggtctcgatctcctgacctcatgatctgccaccagctaacagtgataatcctaaggctcttcagcttcctcactgcaccccagtcacaagaacctctttgctgtttcccaacacaccccgcacaggccagcctgggacctcagtgcctgctgttccctctgtctggaacaagagctcctccaggtcacatcccaaatgtccccttatcagtgaggctccctctgaccaccctattaaaatagcaaccccctttcctggagctctctatctttttcccagctttatgctttttctccatagctctaatcagcaactgccattctatatatttttcttatgtgttcattttctgtctctcctgactggaatgtcagccttatgaaggcaaggattttgacctgctgtgctcactgctgtatccacaacccttagaaggacctaaacaagtgttcattgaggccaggtatggtggcccacacttgtaatcccagcactttgggaagccgaggtgagtggatcacctgaggtcaggagttcgagaccagccggaccaacatggtgaaaccccatttctactaaaaacacaaaattagccaggcatggtggcgcatgcctgtaatcccagctattcgggaggctgaggtgagagaatcacttaaatccaggaggcagaggttgcagtgagctgagatcacaccattgcgctccagcttgggcaataagagcgaaactccatctcaaaaaataaaataataataataaatgttcattgagtagatggatgactggatggatggacgaatgatactccatgcactttctctatgctttaaactgttcaagatcttttcacatccctaattccatctgatcttcaccaaaaccctgagaaactggtcctgttgccccctggggcacaagacaaatttgaaaggaaaaatatatataaacaaaaactgaggtccatggcagttttatatggctggcccaagttatagagatcatggtaaccaaatcagtcccagatcccacatttcctggaggaaatgtcatgaactgaggtgggaggactccatgatgatacctttaatgtgactcctggctgagcccaggtcagaataagatgaggctgacagcactgtcatccatgcatgcctgtgtccccaccagggccacactcctctatgctcacagagtaccctgaggggtcccttg

SEQ ID NO: 915843 - DNA, 4001 bp, Homo sapiens
agatgaggaaatcatgagcaagaacacacgtctttctagccagtcagatgcctggttctatcagtccctgtgtccttggctgtcagtccccagagctgctggagacagagcccagagtgagcaggtttcccaccaccatccaccacccacaacattttgcttcagcctcctccattcaccagtccccttccctgttcttatctcccccaacacaccacccccaccagcactggcccggacctgttcccaaaggactagtttctggccatgttccaagccccctggaaacacatcctagcatctggctcatactcacagagaaaggggcaaatgctatccaggagaatgcatgaccctcccaggaacactctgaccccccccaaggggatagcttcagagctatgtaattgtccaaccaactgcaaccatcccaccctgggctccactccaggcactgcccatcccgcagaacttgccggcctcccaacatttctggcaccccatgccagactggtatggcaggaaacagggtagagcactgttccaagccacaaaatttctctatatggtcccccaacccactttgtccagcaacccatcactatgagccctgggagcacagaccacctccctcctccccagagtcaggctcctaagccttgtgcctctaccttctcctcccctgagtgttggtccatttgcactctcacagatctgctgttcttcataccaccggctcccacagccacagccatgtcccattcagcctggcaggcccaggctcagtgcctcccagacctcaagtccctcccaaaccctgatcaggctgagaccagagtttggaaccagccaaggccaaggcccagccctaaggatggctctgcccactgccttgccaagccttcctggccacctcctgtctatcccatccccagggcccatctgcccctgccctccttggcaaaaggaggctccaggggattaaaaacgacttcagaaagttcatggtaagaggcactgcccaggcggggcccagcagtgccagcaccacccaccatactcggacatgggcctcaattcttcaattctgggcctttccagatgtagaggagcctacccagggcctgtatctgtcggtccagtgcccgctgccgccttctcccatccccagtcctcactctccctaaagattacagagggctcccacatcaccctttactatgcaacccccaccaggtccctccagctcacaggggtaatctggtaaggagaggatatgggcaaagaggctcccacgcctgattccacctctagcctttcagtcgagccccagagtctgctttgaataaagtcagctcccctgcccaccctgcggcaggccttgggggatgtggggagccgaccccacccctttcattcccaaggttttgggtgaggggaaggagagggactcccgcagacagagggcatccctccctctgcccaggccggttcctctcccctaaatggaatctcccccaaactcggagacaccccacagccccgcagcaaaaaactcaggccagcccctcccccagtacgtgccagatcctcctggcctccgggccagcctggaactcgccccgtggagggaggcaggcggcgggcgacgggggtggcgagcgccggacctaggagtcctcgatcccactgcctccatgacttccctttgccaaccccaactccctcgggcaacactgccgagacgacccgtccaaggcttcggcgcccccacccacaaactcttgtcgagagccgctcgggtgcgttccaatcctggcgcaccgggagcccgagcggccacttcccctagccctcagcgcgctcacctgccggcccggctccgcgcctgccctgggcccccgccccgccgcccccgcgggctccggccggccggccggccgtcccgcggtcctccgagcccgcgcgtcctggccgtcccgcccgccgtccgccgtccgccgtccgcccggccctcgccccctcccgagctgtccagcgcagccgccctctaccccggatccagaagtcccctccccgctggctcccggactccccgccttaaaggcacaagctccttttgtctgggcatccccctccccctccccagaagtgggggccgagttgcccactccccttcctagcagcggggtaggggcggaggaggccaaataatgggacccctccctccgcgcgccccctcctctcctccggccgcttcctcccccagtcctgggaagacaagcagctactgttctgggatcaagaccccgcggggaggggacctcgcagcccggtccccttcccttcaccccggccgcctcctccggcattcctctcccgccctcaccccgggggtccccgagcgcgcccgcaaacccacccctcacggctacatcccccgccccgcccaccgagggtcgccttccttcctgtcagggtcccaggggttgggccggcgccccgcgcccactcttcatccccaattcctccctgcccctgccccagccccagcccccacctagccattcccgccctgcctgtcacggccctgcgccctcccgcgggaactcagtttaataattaattaagctctcattccacaaggcgccaggtgtgtgcggcctgcttgcccgcacaccacttctttcctcttccccccagtctctggggcagcggccccgaggcgaacctcggggcccagtggagggacccagggaaggggcactctccctgccgcccccacaaccccccgccctactctctgggagcccctcccccgcacctgccaacttgcagcctcacccccaggcatcttttacccaaagggctgtgcttctctgctgggggttggaggggctactggggtgcattgctaagtgcacgaactgagaaactgggtctttagttatttccagcacggagcagctgcccaagttacctgggagatgggaaaatcgtgtgaaagctggttaaccctttgaggattagagtaatggtggaagcagaaaggagaaggagtttcactccaggatgtacgtaggtgagtgtgactttagagggggtgccattctggagctgggaagaaggcagcctgcctggcttccttttgaggccccctctccattccctcagtcagacctctagctcctccttccaattcagcccttccccaagcagcctattccccacccaagatcccaagacctaggtatctgaagatgcttcctcctcaggaccagccctccctgcagtcctgtccttcaagactcaagtcttgtccactccaaatcaccactgggattcctaagtccaggacagagcttcaggcaaggaaaagaagagttgggaaagccagtttccaacatttatcagccacgtgtacctgcaaactatataccttgggtaaatcatcaatctcttgaaatgggaataaaaccatctgccttgtctttcttacagggttttcagaatcagatagagaaatgtttgttataatgtttgaaaatgggaaagtggtactttctcatttctcagttgtgcaggcctggcctgcaatttgatctttggggcctctttgcctgacttctcacttcaaaatttccttaaaaattgtttttgctggccgggcgcggtggctcacgcctgtaatcccagcactttgggaggccgaggcgggtggatcacaaggtcaagaaatcgagaccattctggccaacatggtgaaaccccgtctctattaaaaattagctgggcgtggtggcgggcacctgtagtcccagctactcgagaggctgaggcaggagaatcgcttgaacccgggaggcggaggttgcagtgagccgagatcacgccattgcactccagcctgggagacagagcgagacgccgtctcaaaaaaaaaaaattgtttttgctatcaaaatttcctcttcaaaatacctgaatcaggttatctacca

SEQ ID NO: 915844 - DNA, 4001 bp, Homo sapiens
ccgggtttaaacgattctcctgcctcagcctcccgggcagctgggataacaagagtgcgccaccacacccggctaatttttgtagttttaatagggacggggtttcaccatgttggccaagctggtctcaaactcctgatctcaggttatctgcccgcctcgacctcccaaagtgctgggattaccagcgtgagcgatcgcaccaggcctaatcaaatctttatttacaaaaagaggcaactggcaggactgggcctgcaggctttaaaatctgtcaatccctgaaataaagaataaaacaaaattattttcattttaggaaacaaaatgtgatttatactaaaaaaaaaaagtgcaccagctaaattgatactattgatagaaaaaaccatttatttataaattcatacaaggagcctagggatagaaaaaaaaaacaaactctcttttaggctctggaaatcctactcccattcctagtgtcaagtgaaaagaggaaatctgctaagcagaccaaagtctagataggaacgtatactggaggacagacagttacaatcagaagttaaaagaaatatgcctttcacatttaatttgcaattttttcaaatttcataattcaccaacaagcagctgccacatgtgtggaaatctttactgatgaaataattttagttgcagatcatcacaatcaacactctgacaacaaatttatcagaacggatgaaaacatctaggaattacctaagagtcgtttaaggagacataagggtggcctttgataagaggtcacttcaaactttcagaactgacaagacgtatagcctccccccaaaaaataatgctatgggtagatggatgcttttttctgaaggaatttttagcatttcatttggaaaagttctgtgatcaaataatgctaaatgttatgacagctttcttggcgtttaaagggattctctgggtgaggggaaggggtgataaaaaaaaaaaaagtctgcttttggaacagaaatgggggacaataaccaaggctcagaaacccagagtcaaaaaattaaaagaacatcttattttaaaaaaaaagtcaacaacctgcaatgaagtcaccgtacccccataaaatcccaactgtgcatttaaatctttctaccaaaattcacttttggaccatcttatgaagttgtcaaaatttcagaggcaaacgcttaaatcaagatcaaaagccaggaggaaaaaagagctaacagtttccaacccaaactctctccgagccccctaaaaactgatttataaccctgtcatcggtaattttagaagaagcgaacactgacggacgggggcttgggaaaacaggactccaggtaccaagcaggctgcctgacgcgccacctgaaaaaggtgagggaactcttccccaccccagtcactgtgaaagtagcgctgagagagcccatcccaagcctccaccaaacaaattcctagaagtgataaaaacagacaagagacgaagaggggcgggcagatcctctccgcgggcagggagctggagcaactgcacccgaaggtgagcagagggcagcaggctccgaccctccgccgcgaaaggcgaggcgaggggaacagcgggcgccggactcctccgacagcggtcgcaaggagggcggctccaggtccccacacggccgaccctcaggccaaggcgcgccgggcggcaggtcagagttaggaatcaagttgcgggccgggccgagagcgcgctctcccgcccgcgccagggacattcgcccctcagctctcacctccccccgaccccaagctctccctctgcgcccaggaaacggcgcccacactccagagaccctcacccggagcccgtcgccgcctcaccgcgtgtctcggacttcttgggagccaccgctgaggggaggggggaggaggggggaacggaggagggagggggccaagcccggtgtagccgccgccgctgccgccgccgcgatgccgcttctggaatcgcgctctcgccgccgcgacagcgaccgccgccgccgcgtctccccgcccccacgaccgcacgtcgccgtgacgcgcatcgcacgaggcggttcgagccaataagaccacacgccgtgcgcagccgcgctgtcctaaaccggaagccgcccctctgaccgctctaaaacctgggtgcatcgtgggagctgtggttcggccaggaacttagcgaaaactatactgggtgttgagggccggaggagcgtgcgctccttaggcgctcacacaactcctcggagttttttctcccaccgaaaaaggaagcaatttggagctgaggaggagggggccgccccggctcgcggatgcttttcgcagtctctatggatactggctacacactttgggcaagagccagaatttgaggatttaggctggatcgtgtgtctctgccaagggctgataggatgctgagcgtcgtctgtgaagactgcggaaagaaatccaaaagcattagcccagttttgcccagagcaatagtgtttgccttttattaccttattaaagattatgatttatgctctaccacttctattttttttaaaacccagtcactcttaaaatacatataattcagagcgatttttaaaatgatgttaatgtaatggtatatcagaacctacttaagcactaaatacctgcgtccatttacccagaatgagtaagtaattttccacaagtcatctttacgttgagttctaacttcttagaagccaagaacagatttggttacgtacttattctataagaaaagtgaatataagagttagtctgcgtagaaaaatagttctttacattcagtaggagggggaatttatcacattcttaaggcgtaaatgccttaactatcaaaattcttgttattgactaaaggaaatccatacgatttagggaaagtctgtgcccacggcttactgtccttacctttggaccacagcaagagataacaaagggtgcagggaaaagctgacaggtcttgagggagctggagtcggatatatgacgaaaaaaacaaaaatacagaagtcttcattatggaaatgtaagttttaaaaagtaaagctactaaaatcacaaagaacatgattaagatggcaataatacagaactaaggcccactcatttaagcttgaaagagataaaactagtagaaattaaaattaggaaataaatgttaaaggaactaatttcctccaaggagtggtttacattgaaaatataatttttttaagtttacataatttgtgaaagacataataataatgacttctatgttcccaggtaaagatgtaaagcttttgaggttgaaatcaaggaagacaattgtacacctcctcagcacatcagaaacaatacaggcatttctggattgtgaatttgacccgttataccaactcacatagaacagagataagaagtataagattcttaggcttaataaagagtctactaaaggtgacagaactagagcgaaaaagataattttcttaaaaagagattcttcaaagatctccaatctttcctgcatccctttctcttaaagactggtttccaggccaagcgtggtggctcacacctgtaatcctagcactttgggaggccgagatgggcagatcacttgaggtcaggagttcaaaaccagcctggccaacatggcgaaaccccgtctctacaaaaatacaaaaaattagccaagcatggtcgcgcgtgcctgtaatcccaggtactctggaggctgaggcaggagaatcacttgaacctgagaggcagaggttgcagtgagctgagaccgtgccactgcactccagcctgtgtgacagagcaagactctgtctcaaaaaaaaaaaaaaaaaagattctggtttgacaaaacgaagggctttaagaagctacctctggaacagttcaccgtgtgctgaaccagatgaaagacagacttacca

SEQ ID NO: 915845 - DNA, 4001 bp, Homo sapiens
agatattttcttaactagacgttaatgtcaaacagaatctaatgccagattttcaaaatatccaggactctgtattacttgtagcattaaatactaaggtgttcgtttttaatcaattaatcagaattcctagaactttagaatattaaactcttaaatgaaaatcactatcgaccactaaaatttccattgctatacttttctggagagcatgtttaaaaaaaatgtgattgtcaaaacatagatggtcaaaataaacgctaatacactttagaagtggcataatatgcatgtgattctcgtttttttaaaagtacattaaaaaccaactaacccaaacagatcaaaagtaatgataagacaattgaaacatacactatcacactttttaaatgttctgaaaaaatgcgcatttttgtcactctccagttacttctaacaagctttagtaagaaaaataatactcattccttccgagacctctccaatgcatgactttaaatattatcatttaaaatcatgactctcatgttgaaacattactataaagccgcaaactacgttgtaccttcaagactgtattttgttacgattccaactctctgattccgcaaagttatcttaaaaggccatcaattcactattcttttccacaaccatttatacgtgtttaaaactttttcccagatatgctcccaaaacaaatagaaaagattgttaaaatcacgttggagaccacatgactgactacaaatgagggatttgggaggcaatgatttaatataaaagaacagtcctttttttgtttaagtagagaaaagtgatagctggggtctctcccatggacaaggaagttctgttaaatccaggcgagaccagccatattggaaacacttgtcaattgtagttctgacaagtgttcccgaacacggttggaagaagctaaccttgagtaccgacgtgtgtacatcaaggccctcttctgctccgccagaggatctgggcccgtttggggactgtttccgagttagagccgtcctgaggtccgtgaggagcgaagcgccgaggggaaagagggcggggaaaggagagttgggggggaacggtttgagagttggaagccgcgatgcgctgcgagaggggcgcggcggcgacggcgagagatttccgagttgagagtctgggggaggggccgaggattcggggagcagggggatcgcggcaaaacgtcgccttggtccccctctgaggggcccgggagttcaagaggaggaagggaaggggaaacgcttcagagcactgacctgtcctccgagtccatgcggctcaggggttccccatccgacgacatctccaagctgccccgccggcccccggaggtcgcgctgcttccgcctcccccagtcccgtagccctcgtcgccgccgctggagactacgctgctgctactgctgccgcccccgccgccgccctggctgccccgcggtcccttgggctcctccaggccctccttgccgtccccatccccgctgctgctgctggcggcgccggggctcaacgagcgggtctcgtcgctgctgctcccgccgctgctgcccaccaggctctcggcgctactctcctcctcacccccgccgctgctgctgctctcatcttcctcctcctcgtcgtcctcctcctcgtcttcgtcctccccggcctggctggcgctctcggggctcggctccgacatcgtctctgcctcgccgccccccactcctccgccgccgcctccgccgcccccaccgctgccgccgttcagcagcagcgccgccaccgcctcggcctccgcctcctcttcctcctcctcctcttcctcctcctcctcggggggctcagcccggccccgcgccgccgaacccgggctgccggggggcagagggctcaggcgggagagctcctccaggtcggccatgtcggtgatagcggcggccatggcggcgcctgctcctcctcctcctcctcctccccaccgccgcctccctctctcgactctctctccctcgcccccctcccaaacgcccaaaactccgccgacgccgctgcagagcaggaggagggcccgcgagctgcgtcagcctgcacacgcgctacggagcccgcgcggggacaggcgcgcgactacgcgcactcacacggagactgctgcgcgcctgcgcggcggcacgaggcagcacctcccccggctgcgggttctgcgcccccgcccccgcccggcgcccgccccgctgcccagtgcccgcccccgcccccgccccggcgcctgcaagtgctcagcgtttcctcggggccttcccacgccctgccgggcttcgaagcccagggacacgcggactgaaaactccaacgctggccggggattttagcagccttccgagttctcacgataaactcattcattccgggggtgtttgaggagtgtcccctctgtacaggagctgagccaggaatagaacgagcctacagtctacgaagagagcggtttaaaatgggcaaaaattaaaacactacggtgtaaggtactaaatttttatgcgcaacacagggcgacaggttttaatacaccctatgtttgaatacccctggagatgttgacatcctgaacccagagcaaacatcttggttcagggtcctcaaactttttacttcatgagccttctaaaacaatttcgtaaagctgtgtatgttcttatacagtttagaatgacagctacatttttccggcttataaatatttcatctgtcgcattgtttaaatactgtatagccaatggattctaaataccatagggatttaacacccactaatatccatttttttaaaatacagtttggaaaatacaatttccaaatattgttttctggaactcatattgacgttgcatatctcctctagaattttatcctagtaatatattttatatttgaactattttgatcgtcttacttgtaataaaaatgtgaacataaattgaagtatctgggttgttttttatattttctgtgatcataaagctcttatttcaaccgatcaaaacaaatctatttcaaatgtttgtaagtactaaacacaaaagcaaaattttattggcaatgcatcttgcagaaatgaacttgggtggacttttttctaatatacattatgaccttcagtggatggatttttttgagaaatagttcagcatcagttctattccaagttttcaattccatggatataagtgttgagaaaacttgttcgcataaaaaaagcagatgagaatgaatggagttttgttatagtaatgccacacaattctttgaatgcctttcgcattatatgcccaaaaatcgcataaagatctaacaaagaaaaaatacttttaatgatctgtcagctgacaactctgattaggttctctttcaacttgttgaaagcaagcaactgaaaaccacctgacttgtgaaaggatgtgttaccccattcttattcaccagtcaattgtgcctttctttggtgtcctggaggtttttgcataaccgggtattgcaccttactaagatttagcatgaggaagaattatgcctttcttttgtaaagtagggaagaggtcattggaagaaaggagactggaaaagagcccacattacaccctgacccaaggacacattttcaggccaattttagggatgcttctactcaaggaaaatgaggatagaactgactgcctgaaaacagagcctccatgctcatttcccatttgggaaagtcgtcatataccgtgagtacccagtattacatcctctgccttaggcctttggacaactgttatataaaatgttgcctctaagggaatgcaaaaataataacatgggacatcatttacagataccttcagaggcacatacaatgtaaggtattaacttccaacattttaaacctcaaaggcaatcttagataaggaatgtattaaagtgaaata

SEQ ID NO: 915846 - DNA, 4001 bp, Homo sapiens
tctgaaataagatgtaaaaattatatactcaagtaaatatctcattaatgtcaaataaaagccacaactccacttcctaaatgtacttaaccaataattcgtctcctgaagtgatgtagtaaatggacactaactaaaaacaaaactctgacacatatcacttggtttttttttgagacggagtctcgctctgtcgcccaggctggagtgcagtggcaccatctcagctcactgcaacctctgcctcccgggttcaagcgattctcctgcctcagcctcccgagtagctgggaacacaggcgcgcgccaccactctcgggtaatttttgtatttttaatgtagataaggtttcactatgttggccaggctgatctcaaactcccaactcaggtgatccgcccacctcggcctcccaaagtcctggggttaacaggcctgagccaccgcgcccggcctcaacttatttaaggcgaattattttaactcttcagtggaaataataggggacttgagaacctttgctcatatccagcccaccatttccatgctgtatttactgtcctgagtaagatactcaacttgcttcttcatctgttaaacagaagtcaaaataatacctatcttgcaccatagttgtgggaatgaaatggaagacatctaatttgtacagtggtaggcaagcataatacgtgtatactgagtaaatgaaaaacgctgattttataaactaatgtcaactttcagatatgtaatggtatcagaggagcataaaatggtaaaaatagcacatgcttcattgtgcagtttacatcaatttttaattttcttgaagacattctccttcctacccatgcctacacagttcaacacaatttttctaaggtttatacagtctactttacccgaagatattttcttaactagacgttaatgtcaaacagaatctaatgccagattttcaaaatatccaggactctgtattacttgtagcattaaatactaaggtgttcgtttttaatcaattaatcagaattcctagaactttagaatattaaactcttaaatgaaaatcactatcgaccactaaaatttccattgctatacttttctggagagcatgtttaaaaaaaatgtgattgtcaaaacatagatggtcaaaataaacgctaatacactttagaagtggcataatatgcatgtgattctcgtttttttaaaagtacattaaaaaccaactaacccaaacagatcaaaagtaatgataagacaattgaaacatacactatcacactttttaaatgttctgaaaaaatgcgcatttttgtcactctccagttacttctaacaagctttagtaagaaaaataatactcattccttccgagacctctccaatgcatgactttaaatattatcatttaaaatcatgactctcatgttgaaacattactataaagccgcaaactacgttgtaccttcaagactgtattttgttacgattccaactctctgattccgcaaagttatcttaaaaggccatcaattcactattcttttccacaaccatttatacgtgtttaaaactttttcccagatatgctcccaaaacaaatagaaaagattgttaaaatcacgttggagaccacatgactgactacaaatgagggatttgggaggcaatgatttaatataaaagaacagtcctttttttgtttaagtagagaaaagtgatagctggggtctctcccatggacaaggaagttctgttaaatccaggcgagaccagccatattggaaacacttgtcaattgtagttctgacaagtgttcccgaacacggttggaagaagctaaccttgagtaccgacgtgtgtacatcaaggccctcttctgctccgccagaggatctgggcccgtttggggactgtttccgagttagagccgtcctgaggtccgtgaggagcgaagcgccgaggggaaagagggcggggaaaggagagttgggggggaacggtttgagagttggaagccgcgatgcgctgcgagaggggcgcggcggcgacggcgagagatttccgagttgagagtctgggggaggggccgaggattcggggagcagggggatcgcggcaaaacgtcgccttggtccccctctgaggggcccgggagttcaagaggaggaagggaaggggaaacgcttcagagcactgacctgtcctccgagtccatgcggctcaggggttccccatccgacgacatctccaagctgccccgccggcccccggaggtcgcgctgcttccgcctcccccagtcccgtagccctcgtcgccgccgctggagactacgctgctgctactgctgccgcccccgccgccgccctggctgccccgcggtcccttgggctcctccaggccctccttgccgtccccatccccgctgctgctgctggcggcgccggggctcaacgagcgggtctcgtcgctgctgctcccgccgctgctgcccaccaggctctcggcgctactctcctcctcacccccgccgctgctgctgctctcatcttcctcctcctcgtcgtcctcctcctcgtcttcgtcctccccggcctggctggcgctctcggggctcggctccgacatcgtctctgcctcgccgccccccactcctccgccgccgcctccgccgcccccaccgctgccgccgttcagcagcagcgccgccaccgcctcggcctccgcctcctcttcctcctcctcctcttcctcctcctcctcggggggctcagcccggccccgcgccgccgaacccgggctgccggggggcagagggctcaggcgggagagctcctccaggtcggccatgtcggtgatagcggcggccatggcggcgcctgctcctcctcctcctcctcctccccaccgccgcctccctctctcgactctctctccctcgcccccctcccaaacgcccaaaactccgccgacgccgctgcagagcaggaggagggcccgcgagctgcgtcagcctgcacacgcgctacggagcccgcgcggggacaggcgcgcgactacgcgcactcacacggagactgctgcgcgcctgcgcggcggcacgaggcagcacctcccccggctgcgggttctgcgcccccgcccccgcccggcgcccgccccgctgcccagtgcccgcccccgcccccgccccggcgcctgcaagtgctcagcgtttcctcggggccttcccacgccctgccgggcttcgaagcccagggacacgcggactgaaaactccaacgctggccggggattttagcagccttccgagttctcacgataaactcattcattccgggggtgtttgaggagtgtcccctctgtacaggagctgagccaggaatagaacgagcctacagtctacgaagagagcggtttaaaatgggcaaaaattaaaacactacggtgtaaggtactaaatttttatgcgcaacacagggcgacaggttttaatacaccctatgtttgaatacccctggagatgttgacatcctgaacccagagcaaacatcttggttcagggtcctcaaactttttacttcatgagccttctaaaacaatttcgtaaagctgtgtatgttcttatacagtttagaatgacagctacatttttccggcttataaatatttcatctgtcgcattgtttaaatactgtatagccaatggattctaaataccatagggatttaacacccactaatatccatttttttaaaatacagtttggaaaatacaatttccaaatattgttttctggaactcatattgacgttgcatatctcctctagaattttatcctagtaatatattttatatttgaactattttgatcgtcttacttgtaataaaaatgtgaacataaattgaagtatctgggttgttttttatattttctgtgatcataaagctcttatttcaaccgatcaaaacaaatctatttcaaatgt

SEQ ID NO: 915847 - DNA, 4001 bp, Homo sapiens
cccgggagtgtgagccgaaccaagagtctcctgcctatctcctccagtaggaaaatagtaataataatagacaccctgcccccgtaaaaaacactaccttccccgtaccgcctcccaagtctcccggggtacggattgcctttgcagcagttccgccccacctgactcactccagggtcagccccgggtgggtttcaatgcggctctggggagggggtgggcagtgggggaagtgaggcttcctatccgccccctctcacttcacatttaaatattctgcacgttccagcccccgcggactcgcgtaccgcccaatccgccttcaccgcacgaaaaacatcactagcctgctctcagcccaggggacgactagtccctggcgagaagctgcctgcaaggtcactgtcatgccacctgccccaagtgctcaggggaaactgaggcttcctcatccccttcaccttcaacgtcgctctaaacacggcaaagccccgtttccatgctcccagagttcagctgaggctggaagtggggtcctgggcttctctgggagcaattttctagtcactctgatcaaggacgttactttcccagaaagctctgaggctgagtccctctgaaatcaagtcctttctcctgtcgcacaatgtagctactcgccccgcttcaggactcctattctttgccccaatccttgacagaggggtgagcttggttcatccgcccaccccagagaaaagcttccctagtttcctggacctcgctcctccaccccaagctgagcattccaggtacccttccctccctgttctcaagccctgactcaactcactaggggaagcgcggagctcggcgcccagcagctccctggacccgctgccagaagacaggctggggggtccgggaaggggcccggagccaggaggccctcctgtgctcttggtgaagatgccgctgataaacttgagcatcttgcggtcacgagtggatgctcggcccccctcccggccccgtttcagccccggagctggaggctccagagtgattggaggtgcaggcccggggggctgcgcggaagcagcggtgacagcagtggctggactcggagttggtgggagggttagcggaggaggagagccggcaggcggtcccggatgcaagtcactgttgtccaaggtcttactcttgcctttccgaggggacaacttccctcgggctccagccccagccccgaccccaccagaggtcgaagctgtagagccccctcccccggcggcggcggcggtggcggcggcagagaccgaagctccagtcccggcgctgctctttgaccccttgaccctgggcttgccctcgctttcgggccatgacaggcggctacccgcgcccttgcccccgccggctttggctccactcgtggtcacggtcttgcaaggcttgggagccggcggaggaggcgccaccttgagcctccggctgccggtgccagggtgcggagaggatgagccagggatgccgccgcccgcccggccttcgggctccgggccgccccagctcgggctgctgagcagggggcgccgggaggaggtgggggcgcccccaggcttggggtcggggctcagtcccccggagagcgggggtcccggagggacggcccagagggagaggcggcggccgggagcgggggagactgggcgggccggactggccggagccggggacagggctgggggctccgcgcccccggtgcccgcgctgctcgtgctgatccacagcgcatcctgccggtggaagagacgttcgtgccgcttcttgcccggctcctccgcgcctcgggggctgccaggatccccagtctcggagcctctggcaccggcggcgccggccgcggccgcagacggagaaggcggcggcggaggcaccgactcgagcttaaccagggtcagcgagatgaggtaggtcgttgtccggcgctgaagcgcgcccgcgccccggctcatggggcccggagacccccgagctggggaggggaggggactcccccggactgcctcaggggggcccggccatggggccgccctgctcgctgcccccagcccccggaccccgctgagcccccggcccggctccgctgtcgccgccgcctccgccgcctccgcttgcgcccccctcccatcacatggggcgccccctccccatgctccccgccctgcgcccccaccctcttggagccccgggaccttggtgctgctccagggaggcgcgccggaccgtccaccccggcctgggtgggggcgctgagatgggtgggggagggcggggaggacagtagtgggggcaaatgggggagagagaggaaaagggagcagaaaaggggaccggaggctaggggaaacgaacctgtgcgggggaggcaggggcggggaattgggactcaagggacaggggccgcggatgcggtcggaaagagggtctagaggagggtgggaagctagtggggctggccgtgcgggggattcgcaggggcgcggggaggatgctggggatggagatacaggaggcggcgggggaggaaagagggaacgggaggtgggtgggaacccacgggtctggggtctgggaggggaggggcgtgagatccgggcgaagagtccgggggcctcgcctgggctcggcttggtccggatgcgcgctgtgtccgggcgctcccctcacattgaggaggaggcggcccccaggcccccccaccctatctcccccccaccttttctccaccagcaccgatgtctgcgagggcggtgcaaaatccagggctggatttctctcccaaatcctgggctggatttcctgggacttggactcacctcctccaacaacctagccccctcctctcgcgcaccaaggttaggaagcgcgattgtgaggtatggcatttagggataagggtgaaaatcgatctattgggtggacaggggccgcggtaaacagagcaaacccagggtcactgccaattctggggaagatgaagtgggaaagtgggggccctgaaatcccttcccccaggatctcttgtctcccccaggtacctggacggttcccgttctcatgacccagctccctttcccactcacaccaccacatttaatactttgacggggccaagacttgagctcgactgtcccaaagtgaacttggaaaatgttccccagggatggggacaaacatggaacttagcagggtaggagagaagggagagatctgagtgctggaggagcccaggccacagggtaagtcaaaggctccagctctaggaggagggagaaggatgtgtcttagactgatacccccccatgccaaaatgcatccagtctccatagcaaccgtagctccaagagtgcctcagaaacagcgggcagaagcagagaggaatccgtgtgtatggtgggtaggggaccaaccgcgggatgctgaattagtggaggcactgccctgacacctggctacccacaggtggaggatttcactccccaagtataaggacccttcagttgaggcagtgagagccggcctcttcagggttccctttcagtctcctgaggtttgctgagtgggattctttcagaagattaaagaggaggcaggcagagtgaatggaaaccgtctgctccgtgtcccccacccctctaggggtcttggagttcaaggctctctatcctccagccaggtgagaatcctgaagtggttaggccaaagtggaaaagaggttgagaccccttgggggtggggtaagatgggcgaaggaaggtctctctgcagccttggagaccccttcccgggacttggggagtcacagcagtcccctgatttggcgtcccaccctcctgacgcagctgagactataataagtgctgccgtgggcggctcttggaggcaggagcccgcagcgtgcttggcctggtggggggctgagggtgggggggctgagccaggatgccaggagc

SEQ ID NO: 915848 - DNA, 4001 bp, Homo sapiens
gggcggctcttggaggcaggagcccgcagcgtgcttggcctggtggggggctgagggtgggggggctgagccaggatgccaggagccctttgttctcccagaggcctgtatccaatccctccaatgttctgtcctggggctcagcagtttctccctccctccctacagaaccaagatgacaccatccccaggacaggagacccttcagtagtgttttttgatggagagggtgaaggagaattgttggctctggcttaaacttccctcctttgatggcctcggttttcctttatgttcaatgggaacagaatactaattcttagagaaggagtaaaacaaatcacttatgaggagtgaagccttctcagggatttccacctccacccctcctcaccctcctccctctccagagctaagcacagcttttctgcctggcctaaaccgctcttctcctttattattattatcattattatttttgagaggggtggggcttagagtttctccctaggaggccccatggcccactcccccttggtctgcctttccaaacactaaggctgtcaggggaagcttcaggtgtagttcctggcaaagggtatgggacaggaggtgagaggggcactagcctccgaagaacaatgggaaggggatcatcagactgtcccactaggcatccaaagcaagctgttccttccccaagttatactctggtgtactagcagagaggtctggcaggaggtgtccttgagggaaagaatgatctcttgacaaccacccaggtaggcaggtaacaatggagaagactgaaatggctggaagagatcaggatatgatggaagaagtgtttccaccagacacctttcatgagcaaagaaggctgcttttgttagctctttgctgcatcagaggtgaatggaatgacagcgagctggaacaacctccagttccaccagttcctcagtggtagggccttgtggatggagagaagctgttcctgccagggctccaccacaggactgaagcctggggtgggcaggaggatgtggcggatggtgttgccatggcagcatttcctccctgtgttgtcatcacttgctctaatggcactaaggaggtagagcggaaggtgtgtggggggaagacaggaacaggagcaaggggaggagaggggaccaagaagagttctggggacctatctgcactttggctctgcagagcatagtgtgtgagagttagtatgcgcttgggagcctgagattctctgcatggtgtacttcaatgtgcatgcgtgtgtgtgtgtgtgtatgtgtgtgcatgtgtttctctctacagctggagaacaagaggtcactgatcctttgtgggtcctgggaatgaactcattatccagtcccagaacctgctgccccagactgcttcctgctctggactccccaggcagggaacaagtctaccatgagtctgtcacagcctatcttccccatgctcacacatttcttcattgccaagaaggtcagctcaacagggacctgtattttgatctcctgggagaaggatcagagcagggaaagagaaagaatgatacctcccatgtctttttccatcctccctaaatgtattctttcccagagtcccatcttggggactaggaagtagctgactgggaattgatatatgatacagctaaaccttctatgcacctgctagtccctgatacacccaagttgagggctgacctttctcttacctcgaatgctgtccaatgaggcctggatgctgtcctggagttcggggtcgtccaccctctctgccagcttcctgaggcggtttagagcctgcttggccacctcatgtcgtctgacttctgctctcactgcagctacaacgaactgcctctgggcatgcatgttgcccagacctgtcttgccaggctaacaaccacctctggccctgaggcccatggccctacagcccccaaacctcagaaggccccttctgctgtgcccagaactccccgcccctgcccgcccttccgtctgtcgacctcacttcctgactggtgagtttcaaacccacagcctgggacagcactacctcctgcacctcccaccccctctagtgttggcccatcaaccctgccagccagtccctgctatgatttcccagccaggtggatggagaaatcttaacagtgtcccagggcctcctgtgggaggtggctaattaagatgggtgttggttctgggagaatatggcaagctaggtccgaggtgcaatcctaaactcttgatgacctgcggatttcaaactctcacaggaattcatgcacatttggtctgttaccctcacagccctgcattctagtatacacttgtacccattgccctctctacacatcccaatgagccctgtatccttatgtcttacgatgtaaccctttttcaggcagctacccactgaggccacctcctgtttaaaagggccaagtgaggccaggcgtggtggctcatgcctgtaatcccagcaccttgggaggctgaggcaggagaatcacttgaacccaggaggtggaggttgcagtgagccaagatcacgccactgcactccagcctgggtgactaagcgaaactccacgtcaaaaataaataaaataaataaataggccaagtgattatggggaaaatcagttatgaaggaggaaagtaacctataaaaagacaaaaactaccatgttccatgtccaatcgctttcataataattaacatgactataacacttaatagtttacaacatactttcatatatatattatcctcatgacagccctgaggagtaggattatttatccctatttgcataaaaggaaactaaggctcagagaagccattaagaggtgaaacaaagacatggatttaggtcttctgattttatttttacatttttatttttattttttaccaagcacataaagcccagattggttataattttgatacccttttcactacaccacacaaccaaaatgcttgtcaaccagttccccttctaatatcattgtcttgcccttgatttaggacctcaaagaaaagaaggtagatgaggaactgaaggagacaatgaagatgggacttggggtaggaaggggatggaggtggggagtgagggggtgggaggtaggaggtagcgggtagtttgacctaattactttgtttccaccggacgcctgtaatcgtagcactttgggaggccgaggcgggcagatcacctaaggtcaggagttcgccaccagcctggccaacatggcaaaaccccatctctactaaaaatacaaaaaaattagctgggtgtggtggcgggcacctgtaatccagctactcgggaggctgagccaggcaggagaattgtttgaacccgggaggtgaaggttgcagtgaactgagatcgcgccactacactccagcctgggcgacagagggagactctgtctcaaaataataataatgataataacttaattaccttgtttcaagacccaaacacctctctcgccctgtcaaacatctattctcctgcatacctttttggtattaatttctgtaagagtttatataaatactgtgtagttaaagataagggaattgaggttggaattgcccacaggaacctgtaaaatgacctgaaaagtaataactaacattgagtgtttactatatgccaggtactgttctaagtattctacatatattaactcatttaattcttacaacccaagaggtagggtgtgttgttatttatccccattttacagatgaggaaacacgcacagacagtttctaagtgcctggccaaaggttacgcagctaggaagtggcaatctgactgtggcagtaagtctatagaatctaagtacacacaaacttaaatcattctgttgagttgattggagggttttcttttttgttcctactgtttctttctcctggggaagagaaggatt

SEQ ID NO: 915849 - DNA, 4001 bp, Homo sapiens
ctttgaggcccagtgttaaacagattaagcatcatctcttaccaataaatccctcttatattaacttaccctcctgggctgtgtagatgagaaaggcagaggaatctacatctttttacatgcaccttggttggcggggtgtgtgtttgtgtgtgtgtgtgtgtgtgtgtgtgtgtgtgtgtgtgtgtgtgtggagagagagagagccttatcataaggaagaaaaagtgtcctggaagtatagataagaaggatgtggcatagataaaggactttgggtggatttttgggtcctactctacatgaaaatacaataagcctacactgtttctgtcacatgttaccagtcagagtgaaatgaattgcgtgatcctgacctgctagttaactttgttgatccattacttcccttctctggttaggggcctgtttccagctccctgttctcgtcatttctgtcctgagtaggaaggactttaccgagggagtgtttcaggcttgcaggctgacagctgctctggacagctgtgctccctgaggcagaaccctagctgcatccccagccgtgcaaaccagaaacaagcgggttaaaaataatcctgaccaagtcattttgccatcactaatgagctctacagatactgtcctccttaatgataatatatttcccttctgtcctgttgaatttcatcttttctccttttctgtctttctctgaatttcaactgctgattttacctttgctttccattttactttgaacaagtatttccaatggacccttcacaaggacctatagctcagacttgttttcaaaatctcagtgtaaactgaggagacatttgacattgtctgacctcaagaaaattttctgaagaacattaaatcctccattaaaaatctttattctgtatattggatgtgatggctcatgtctataattccagcactttaggaggcccaggcaggaggatcgcttgggccaggacttagagaccagcctcggctgggctaagaccctgtctctacaaaaaaatatatttttaaaaaatctttattctgtaatgtaagttctttataaaggagttaaattgaggtaaagtataaggattaggtgttattctcatacatccatagtaatcataaatgtaggaatagaataagttctatgacaataacctatcaaaaactgcacataaagacattatgaggaccttaaccaaattcacacctaagaggtaagttaagctacgtctgaacaaatggaaagattagttaatagtaaaagtgccattaactgcctaacaattgggcctttaacattaaataacttgcttgaatgaatttgtctccttataatggacacaatcatagtgactttcaagcaattaatttagaatgcttggcatttctaaaattacaaattttcttactatagctaaattatttcagtaacgcctccctaggaaagtgtgtcttcaagttgttttactgttgaatatttacaaaattattacgaaaattagcactaccgtttttagtacagtactgctattaccttttcatgatttgagtctctaaagatttgctatgttaatattattaccataaattagtttcaaccatggtacaaatctcaggacgaatcagtacattgtacgcactacttcttttgccacatgaaaaagagggaaatcaagagaagtctgaaacagaaagaattgggctgacagcgtataagatctgaatagaagaaaaggagacagatcaaaaaatatatatgcatattgatcaagctgatcttatcagtcagacagttacatgagagaaagggatagctaccagtctcattactcagatttgctctgagaggaaggccagtgcaatcacccacgagaagactgcctctttacctgtccatagtggtgtccagagtgtcttcttgcctccctgcaagtctcaggccagaaaaatctcacttcaattaatgatggttctctgtcttagtctgacagtgcattggcccttcacattcaaatttgagcttgcccttttgggctcctcccctgacagcatcacccccaccaggtaccccaacggccttgctcctgatttggatccagtgaagatgggtgggtggggctgtcataggcagagtcacacaggttaaaccattgagggcagctctgctttaatgtttaggttcctttggggctgctgctctaaaagcccagtccatgctccatagctagcaaagatcaggaggcagtaacagtagacacttcaattataatcatgataacacaaaataaaagcacaatgagaatagtaatatttatgtaaataccttaaagagcatttaaatagcttcttgggttattgtgttgaagagcctcagatagcctctaattcccccatattcccacagtctctctgaacctcagtacagacaggcactagcagctcctgctttgcagttaagcaaatgaactcagttatatagaatttagaacacaaaaattttgcctcccaaaccatggatttttttctttctgattgcattacaagaattgcttgaagactagatatttacaccaaagagtgatttttgcatgagccatcttttttagaaaaaaaaaaaatccttaatttggagtcagaagcagcagcagtcccccaaaatacaaaaatgcttgtttcaccagacagattcagtgtctaactggctgcactgaatttggaaaacaggctaagatcttcaaataaaagactttaattttgtgctctcatagaacttggtctattaaagattttatttctctctcctactgtagcccatatgcattctatttattcactgagtagatacttcatgcctactgttaatggaaactatgccaggtgctagggatgcaatgctaagcaatgcagctagggtctctgctctcttcctgcctcaagcctttgataccatctataccttgatgattttcaaatcaatagccctagcttggaccatgtattcgtctgttctcacactgctaataaagacatgcctgagactgggtaatttataaaggaaagaggtttagttgactcacagttccacatggctggggaggcctcacaatcatggcagaagagcaagggacatcttacatggtggtaggcaagagagagctcacgcagggggaaatccctttataaaaccatcagatcttgtgagacttattcactatcatgagaacagcatgggaaagacccacccccattgttcaactacctcccactgggtccctcccatgacatgtgggaattgtgggaactacaattcaagatgagatttgggtggggacacaggcaaatctatcagaccacttcttgaaactcaagacaagtgtatccagcttccctctcagaatctccatttggatgtctgagcacctccagcctgtctaaaacagaacccctgttctctgccttacctactcttcttgccgtctttcccatctcaataaacagcagtattcttccaattgcttggcaaaacctgggcagagtgtctctcagctcctctctttcttttaaattccatgcacactccattagcaaatcctgttatctctgcttccagaatatagccacaaactgaccacttctcactacctccaggtccaagcaacctggattattgcattttgcttcccaactggccttcctgcctcccccttcttcgattacagtctgttctccacatggcaactagagtattccttctggaatatttaaggtcatgtcactcccctgtcataaccctccatggcttcccattctctcagtataggccagcagcctgagatggcccacaagcccctctaccgtctgctctgcttcacccctctggctgcatctccttccactctctcccttgctcacgcaaagagcgcacactccttcctctgcccttgaggtccctctgctgaaatgttattttttgtgta

SEQ ID NO: 915850 - DNA, 4001 bp, Homo sapiens
gctgggattacaggcatgagccaccgcacctggcctcttcgtctttgaaataatggggcttgctgagctcctaaaatctcttccagctctaacattctatgattttgatacttcagtggtatttgaatagtactgcatggacctacatatagcactttacgggtgacaaagcatctttgcatccattacgccacccgattctcataataaccttttgaggtaccagggtaggttttatttaccctgttagacaagtgtagaaacttgtccaggtcacagctaacgaatgacaaaactggggatgggatctagtattctaggtgttaaaaatcggtgttctttcagttgggcacagtgactcatgcctgtaatcccagcacttttggaggccaaggtgagaggaggtcttgagcccaggaatttgagacaagcctgggcaatacagtaagaccccatctctgaaaaaaaaaaaagtcagtgttcttttaattacaccatgcaaccttgaaactagaactgagaacatgaggcagtgtttaacttagagattttaaattatataattggcagtgttatacaggagtaagcaggttgctgatgacagtcaggatctgttgatccgaacaaggaaagtatgttagtatccatattggtcccaaaatcaagtattagcaaattgtgttaagtgaacataggataaggccaagaaatatgacagtgtagcgttactactaagcttctccgatgaaattcaaggtttttttctctcttccaattcaatttgttaggcgacacttcagtaaacagtaggggcaagatagagtggaaacagccaagatttcaagcctagtaataagcaacttctacatccctactcatcacaggcctttttgtctatcccagaaacacatacttttcctgaaaaaacaaagcactggaaggattaccaagtctagaaagaacccgccctccccaaactaggtggttttctgataagcctaaggtatgtttcacaggatcactggttgccatctcctacccagcaatctggagaggttgaccagaataaagtattttaaaatccaagcgcttagtctaacctggaatttcctcagtttctagatggctctttgtagaacaatgcagattctcaaaggtgaccacagttaaagaaaaaattacaagccattgcgctagagagagccatctgcagtttctccttagacagatgttcagatggcacacatggccactaaatttgcataatatttcaggaagttcacagatttcccgaagcccactcatgaatcacacttctggttaagaactcctagattcatatgctagttggtgataagtgctttggtatataaacttaaaccaaaaattggtggaataattaccaccttggataggatggtcagagaagttttatccgaagaggtcacttttgagcagagacttgagctggtgcagacacctgagtgtgcattccaggaaacgcgaacagcaggcgcaagggtccctatgagagaatgtgcttggcgggctcgacgcacatttatttacttgggacacaccctattttggtttctcttctccacttttcccctcgttcttgtccccccttttctctctcctgggccctggatctcctgagcgcggagggctacgcctccttcttcctccggactcaccagggctgccagcttagcttacattttcagggaacaggaaactgagagtcaggaaaggtgagctcttctacctcgggtcttgccattttgcatgtcctgagtcagtcactggttaactctgaacttcaggttcctcggcaattagagattataaatagcctatacagcctattccagatctgagattccaacagccaaagtcttttcacttcctttcttccccctctccttcactttcccagctttcttcttaaccaacaatctacccgaaaccgtcgtttcttggttagcgcttgcgcagacaggcgagaaaggtaagttttgacccagcttagcagccgtagtcagccgggagtgctgtcgtgggggattgtgggaaaagatggcggctgccgcacaatcccgggttgtccgggtcctgtcaatgtcacgtaagtgttaccgggaacggcggcccctggtcgggattccgagacggggatttaaggttttggaagtggcaccgtgctgcagcggtcacgccaacttcctaggcacactctggtttctctaggtttggagctgcctcagtctggtttctcctttcgctttccgcttccccggctcacatattcaattgtgcaccaccttgggaggggacaaaagatcttaagcagctgtaagcgaagaggagaatgcgggggacacgttagggatcgagagaatcagaattctgatatggttgtaagggtttagggttatgagaaatatttgtatggggcggggggagaaatgtgtaagggagggaaaaaaggctagtggcgagaggttttcttagattgattttatgaccttgtgcaaacccttaatgggtctcaattcatatgagcacaatggaaatgataatattacaataccagggagtctctgataagattaaatgagctaatatttgtaaaagcatccttttacccaaaagcgtctctacggatgtagaatgtgttcggcaaagtgcgttggggtctgggggagagagtgatgtttgaggagagaagaatcaggagcttggtggaaaggaaagtgaagaatgaaggctatgttagaatttgttagcattatttagtttctcttctgttctgattggatctgctcccactcctcaaactgaaaacatacatttgtccttccactcactaaaaagcaaggaaattagaaatacggttacacttcatcattgtcctttcaccctctactcttccacaaacatattccaatcaaacccccaaagttgtatttttcttagtgtattttagtcgttacagaatatcatttgctttcaaaattggctcatgtcagaatcactcgtaaagctttataaaaattagaaatgaggactgagtgtagagctattgagtcagaatttgtgagattagctccttgcaccttaaatttttaaaagcaccacagataggcttgatgttcagcctgaggcaagaattaggagtgtttagaggatccttttttttttgttttccatcttgggtagaactcctgcataccactgggaaggtggtggtgcacatcacttatagtggatggttttgtagtcacaatgtctttgcaaagacatttgctggttcttgttaaactattacaattgtatgacgtaatgtagattgtgaatggtaatcactatttattgagtacctgctatctgcaatctccagttctaggtatttttattaattttcctcttttaacttactttcctctgactgacaccatagcttgtgttcttaaccactctgcgttattgtctggtaaagtaagtttttgagtaaattctgtagaggcaagtctagtatgtaacataatccacacactataggacagaactgtgtaagacaactatatatagttaagtgtggcaagactattaagtatcacaggaaatcataaaagggaaagattagtatcatttgaggtactgagggatgattggaagaccagtggagaattgtagtgctcccactggtctctttagggctgttatgatctggaaagtcctctggcaaagacaagtgggtgagaatggagtcatgaggtattcaagaggcagtgaaatgactacctgaatatctgggatagtggaaaaggaggttgaatgtgttagatgggatcagacaatggagacctttgaaagccaagcagagtttagatcggtagtctccaaagggagttgtgcaagaggacctaataagttgtggaaatataaattagaactcctaaaaattgctttctatagtaataatagctaacacttat

SEQ ID NO: 915851 - DNA, 4001 bp, Homo sapiens
tgtatggatggatataccacagcttgtttatcctgtcaccagctgaggacaatttatttccagtttttggcaattatgaataaaacctctagaaacatcaataaacaggtttctatgcgggcaaataaggtttcatttcttttgagtaaatacctaggagtgtgattccggggtcatatgataggtttatgtttaactacatataaaactgccaaacagttttccaaagtggctgtaccattttatatttccaccagccatgtatctgtttgattttgaataattcttataaaacacagtccagaacattttctacaggataaaacatcccacatttttcattcaccactcagtagcttcctttcgaccactgaggaaactgtcttcttcccagccatgagtatcactgcttttccatatgcacccctgcgtacagttagaccctgatcacgccagttcttccccacatccatagttttgtttatgccatttgccacctgagatgtttaccttttattactgaaatcttatgcaaaccgcactatcaaaatcttttcattctgcaagacttccttctggtcaccaaaaaagacaagtcagtgaaaggtgttgacagaggaggccaacaaaacaggctcaggcattgggcacagcccgttgctttctgtgctatccatctgggatcccatgtgccacgtggtgggggaagctaatgaggggtccaggagagcaggccaaagtcctagcagagcaggtcttccccacccccacccctcgttttataaaaggtgactatacctcaaagtaactagaactggttgcaaagagtaaaacgaattcttattatttggggttgtctgggatacagaaagcttttcctttgatgcaagtttgggccagtttttggtgctactcaagacttctctctgcctccaagttttttacatctgaatatatacatatgtacatatggctttggcatggccgagaaaaagaatcgataagcaaattcttttatgtacttcctataaaagatacgatacataagacagtttttattttttttttttctctctctctcttccctaaacagtcccgaggccccctgggtgctgaaggcagcaccgcagtgcaacgtgtcctctctcggttccatttctggaggagctgatgcaattccaaggcgcggggctgggccagagctcggttcttgtgctacagtagaatagtgttccagcgtggctgcctctgcagcgcctggcaattctagaaattttgccatctgcagctcagctcaggaatactgagcttgcagccatcagctttgagtgccattatctgaaccggccctgcgtgccagtctcgagcgcttacacctcccaggccgccaacgaggaccctattgacttgatactcccctcctccaggagacagtctcggttccatatggctccagctcttgaccagggatctcatgattgaagtgaaaaaggaaaggaagcagactctgtcctccttaccaagtgactgttcccaccttgccatcccagccagacttgacacgtccaaaaactgcatcctcagccccctcccggcagaagacaatggcctgcgtgccagttcccatccgggaccctccccaagccctcctctgaggtctctctgtttttgtttgtttgtttgtttgttttaaacgctgtcttggtgtttagcaaagtctaagcatcgctgctcatccccagccccaccgccccggccctcccgccccggagtctggaaaccaggacagggtgacagccgggacgctcgcccgggccggactcacccggccagtggagaagcgccggagcgcctggctgccccgccgcagcatgctggagaggagcgctagcactggcgacgcggcagcgcgggaggcaggcgggcggcgcagcctgggcgcggcctgggcgcggcctgcagtctggatgccccggactgcctggctcgcggctcgccgctctcggcctctgctagtccgcacccctcccaaagcccacagcccgcggcccgccccaccctaccagctgcaaggccccgccccctagctgtcaagaccccgcccccagctggaaggccccgccccgccagctggctgcgttcggacagccaacctggtgcgacccggcggagcgcgtgggcttcctggagcctgtgggccctgaccctggtgccaagagcgcacccagtcccagggaccgcgcctctccgctgcctggactttccgccaattccagccaaggtccaggtgctttctaactgtgggaccctctaccagttactcagccccgcagcagtgtatacggatctaccttattagtggtcaatctgacatcccaagtgctgtccatagcacagcccgtaaaaggcacgcctgtagacagataggtagtgggggcgccttcgctgtggagggatcctgatgcctacctcgtaggacggtaggccgggcgcggtggctcccgcctgtaatcccagcactttgggaggccgaggagggaagatggcctgagctcaggagttcgagaccagcctggccaccatggtgaaaccccgtctctactaaaaataaaaaataataaaataataaaataattagccgggcgtgatgtcgcatgcctgcagtcccagctactcgggaggctgaagcacgaggatcacttgagccggggaggcggaggttgcagtggagctgagatcatgccactgcacttcagcctggacaacagagcgagactctgtcttaaaaataaataaataaattggtgcaaaagtaattgtggtttttgccactgaaaataatggcaaacccgcaattacttttgcatcaacctaatagatacgtgcccttctccctcacctctctggaaaaaacgctcagacctgctttagctggacgtttatctcaagccagacttcttagcccagcattcagggccgtctgcaatttgccattttctcttatttctcactgctcttttgcatatgtaattctgcttgactgcagttcttgcctattccttcttggacaatgtttcccagaaaagcttgtcatctgtcacttgtaattatcttggcacgaccgtttcttttctgaaaggtaccgcttacatgctgcctcctggaggcgcttttttctgattcttttctctcttagtctccttattccccataaataattgttcactcctcttaacaggaaataatctttgtctatgcatctgttatggctgtctcaatctgctactggtatttgtatacctattaacgtctctgttggaagctccttgcaagctaagtccatgtctgattaatcaggatttacagtatctagcactaaccagagctttaaaaaaataataataaaataaaaaataacttgttaaaaaaaaacttgttgaaacggatgaatgtgtttaagagagtaaggagacaaaaaagaaccatcattaaaacttggagaattgcggttgggcgcggtggctcacgcctgtaatcccagcactttgggaggccgaggtgggcggatcacgaggtcaggagatcgagaccatcctagctaacacggtgaaaccctgtctctactaaaaatacaaaaaattagccgggcgtgtggcgggcgcctgtagtcccagctacttgggaggctgaggcaggagaatggcgtcaacccaggaggcagagctttcagtgagccgagatcgcgcccctgcactccagcctgggcgacagagggagactctgtttcaaaaaaaaaaaaacttggagaattgcaacaaacatccaaggttttgctttgagccctacatcttgccaattcaacccactttcctgactgcattttgtgacttcttgcttttttaaacttccaaatattgatattccctttatttattctgatctgtgtatactagaagggtgcataaggaggggttttttttttttttttttttttttcctga

SEQ ID NO: 915852 - DNA, 4001 bp, Homo sapiens
ctcggcctcccatatagctgggactacaggcatgtgccaccgcacctgactaatttacttttttagtagagactagacacagggtcttgctatgttgcccaggctggtctcgaaatcctaggctcaagggatcatcccacctcagcctcccatatagctgggactacaggcatgtgccaccgcacctaactaatttacttttttagtagagactagagacagggtcttgctatgttgcccaggctggtctcgaaatcctaggctcaacggatcatcccacctcggcctcccaaaatgctgggatttacaggcatgagctactgcacctggcctctgctagatcttttgatgctcaagtcttccaagcatgaacttgcacaggctgccaagggagccatagctgctgcctttttagcttgtgttatgcaaaagattttattttatccttttaaaaattcccttgcaaatgacctttgtaacatcccctaaaatcacacgcatgtgcctttacccatcacctatatccagatttgcagccacactcagggccagaccagcaggtgtgctgttgaaagcagctggctaggagccagctctacagcatcccaaatcagcaatagtcccagaggatcggtggtccctttgttcccacccagagtcacaacataccatggaatgttctggttaggggcttactcctggaagttcagctgtgaaccccaactatgccactgactttggtctttaggtgagtcactaaacctctttgtgactcagtctcttcatctgtaaaatggagaattacagtcccttcctactgaggctgttgtaaaaattaccttaaattgcaaaacaggtagacgcttagaacagtgctgcacaaaggctgtgcagacaggacaggagctgtgattaactatgaagtgactggttgatgagggcctgtgtgaacctaaccctcagagcgcctttccatttataggagaaaaagcttaagtcagagaaggcagccaacatgcactggcacaaacaaaacaaactctttcataaccaatttcagcctctgtgaagtctagaactttaaccaaactcaaagatcaaaacaaaaaatattccaaagtattactgattgagcaatcaataaatggaccacaggaatcagttttatcctggaaagctcctccttggtttggtcgaagccggcgttggaagccgcagacaccccttggggtcggccccctggggccgaaggtcctccaggattccctactcccagcaatggaagcagccgagcgtggcctcgcccatggtgaactggagaacgtggctgcaaatcacctctttcctggtttttccttttgaactccttggatgagggcatgagtcagggggtaaaggggatgactaaggaaaagacaggaaagttcctgcaaagagggacttggtcgcgtcttctgagtgggtgagggtggggaccctgcggagacccgaaagcaaggaccatggggagaacggaaccccgagagttggccctggaaaacagaccgaggctgggcgaagacggagagggggcccaagtcacggggaaatgggacggggactgtcagaggcggcgaaggggctaaaatgcttgcaggagaggagggggcagatgtgcttccaggtcagcctctgcaaacccctcgagccccagatgagtacactaaggcccacggcggcgcggggccttcctaggggcctgcgggggactcgggccggaaaacaaagcgcgagcccggccggtgggctcacctggttgcagaagacctcgggctgctggttgggggcaggcacggcctgggtggcggcggctgacaagaggcggcggcccaggcggggcccgaagcgggcggcagcgcgcaacatcgcagcgggctagcggacagcgagcggaccgagagcagagctagggtctcagggccactgagccgaccccgctccccgccccgcgcggcagccaatggaaaggcgggggcgggccgggggcggggctgcctctaccattcctcgggatggggcgcgcagctgatgcaagcgaagcgggtggcgctaggtacccccggcccgtggctgccccctggctcgcgcgacgcctccgcgcccgccaccgccctccgcctgtgcggaaagacccggccccgcgaacgcagctcgccttggttgagcccccaatgtgtgcctttgaccccaatgtgaacaggcccgagccagggcgaccctgaccttcccggctgatgctccaggtgaagagaccggccgtaaacccaaaagcgagatcatttcggaggtgaaggagatgaacgaggtgacatggatggggcagacggcactgcttttataagtaccatggtcaggaaatgacaagtgagacctgaatgatgacagggaacagcaagggcaaaggccaggagatgagaccacctggcacgtgttagagaaatggaaagaatgaatggagcccagttaacaaggagagaggcggccagggcaagggcagggacggtcttggaagcagcggttcagagtttagaacaggatgatttgcatgatttgcttattcttttttttttttttttttttgagacggagtctcactgtgtcgcctaggctggagtgcagtggcacgatctcggctcactgcaagctctgcctcccgggttcacaccagtctcctgcctccgcctccggagtagctgggaccacaggcgcctgccaccacgcccggctaattttttgtattttcagtagagacggggtttcaccgtgttagccaggatggtctcgatctcctcacctcatgatccgcctgcctcggcctcccaaagtgctgggattacaggcgtgagccaccgcgcccggcggtgggactctgatttcaacaccagattccaccaaagtcgccctgggggctcagcaccattccacacaaaccagaggaagaaaaggcatgggggtggcccatgggaggtttctgtgggctgagcctgctcgcctggctggatttcaatcacacaaccatgcctccatgcaaaagagtctgggaaatgagtggcccctgtgccaggaagaagggaaataggtttggagatcagctgcagagataatctgataaccaagactcccttccttctctgaattcagccatgcaggccccacttccccttcccaatggcgccttgctttttttttttagatggggtttcactcttgttgcccaggctggcaccatgtgggctcactgcaacttccacctcccaggttctagcgattctcctgtctcagcctcccaagtggctgggattacaggcgcatgccaccacacttggttaatttttgtatttttagtagagatggggtttcatcatattggtcaagctggtctcgaactcctgaccttaggtgatccgcccacctcggcctcccaaagttctgggattacaggcatgagccaccgtgccaggtactttttttcccttaatactgtgtgtggagatcgttttgtcacagcacacaaggactatgtccccattctcttcaacagtttcatggtattcctctggatacatgaggtagttttatttcatgaatttcctatgatggacatttaggttgtttccaatcttttgccactacaaacaatgccacaatgtatgctcttgatttgcttaagaaattaatagaaatgaggctggcaccatgactcgtgcctgtaatctcagcactctgggggggaagctgaggcgggtagatcacttgaggtgaggagttcgagaccagcctggccaacatggtgaaaccccatctctactaaacacacacacacacacacacacacacacacacacacacacacacacacacacacaattagccaggaatggtcgcagtgcctgtaatcccagctactccagaaggtgaggcaggagattgcttgaatctgggagacagaggttgcagtgagc

SEQ ID NO: 915853 - DNA, 4001 bp, Homo sapiens
tatacaaaaatacaaagttacaaagtgttaaagacatttttcaccaaatctcataaaactaattcattgtaattgtggacctgactacacataaacttgtaattaagtattttgaaacataccttgtttctgggttgtaccttgcagaaaagcaaatatagtaaatagaagttgccaacactgaagagaagattaacaaatctgagcatcccaatggagcagacaacatgttcagaccatccaaagatccaaatggcaggtttgatcactccaattgacaccaggtacaagccaggtaatgtagtaatcatgggatcccactttaaaatgaaagaaaatgaagtaaaagcaagaggtaataggaacaagacaggcacaaatatgtcaagcccaagtctcatctccagcaacaatcagaaattttgagaagttattctatgacaagattaagtaagtccttggcagaacaggattcgtttttcttattttttgcccccggaccagcttagtgatggttcaggtagcagcaaccaataaacaacaacaacttaaaatctatttctattttccaagaaatgttctttaaaagcctttattttgataaataaactgcaaatgttccagtttttaaaagcatggaaacattgtttgggactcttaagtttaggaaaacatttggaccacaggctccatgatgacagctaacataaactgagacagaaattgttgccaaaccctctgtattaacgttacaatatgccctatagtaaagattattgtcattttgcagatgagtaacctgaatttctgaaactcagaacatctccaagatcacaaaactagtaaatcacagcaccaagatttaagatcagatctttctctaaaacagactttatatttctagccagtaccctatattgtgtcaccagagaagcaggggatgcttattttgatatttatatgtacatacttgcacagtcaaatatatactcaaaaatgatgtgacttgactggttgccagtttatccagttaacagttcactaaaaatacccagggaaggaatttgtgattataaattgtcactttttggtagctgaagatccctccagtccaccctatcccacccctaaaatgcacagtgaggtgcttgacaggtgagctaaaggaaagttttctggtatttccaaggagcacccgaatgcctttaatcctaaaacaaggaaagacaaagtgggatcgatatcgtcagctgccaagaggagggctcagttccccgttgagtattctcccagatcactccttcctggaggacagatctgctgtttattcattcatttaataaatatttcacagatctcagagacaggaacaaaagactatacccagtttctttcatgttctgaggcttgagggggtggaacaggacgagtgaagtctaaggatgggaggacgtggggacgctgggacctctcaggcctctcctggggtggggacaggttggggaccccacctgggaaagggagaaatggccctcacagtagcgctgcgcctgaggcaggtggaagatctcgtccatgtagggctctcgcaacgcccggctgaaggcggagaagaggaggcaggatactaaaaaggtacagctcaaggcggccgagaaatagtaaccttccagctgcgccattccagctcccacagccactgcccaagaacctactcctggaaaattctgagcctggaaacccgagctggaaacttgggctcgaaatgggcgcgctaggcgggactagccagacggggccacataccggaaggcaaaggatgctgggagagcgcggatccggaaagatcgggtcgctgtttcccggagtgacgggtttagataacggaccggatgattaccctctcaatcgcattgcccggggcgcacaaagtgtcaaaacttccggaaggggcgggtctcggatttcgccagcgcgggaggtgcgtggcttgctgcttagaaaaaaaaaaaaaaaaaaaaaaaaaaaaaagccgcttcttagcttggatcttttttcctgctcacttccatcacttaccagaaggtggcgacgtttccccacgtttccaattccaagccctaaaatggacacattttttcccccgttatttctgttatttctctccagtgatccgaattaattaaaccctcaattccaagacatttcattccatcaactttggagtgtaggaagggtgcgttggttgtgatagcaaagactgagagttttagatgaaaacttgaagaaccagagacccgtcaatgccgaatgaacttcagtgagaggagtgtttgttcgtttgtttgtttaggttaaaagagaactctttcaaaatgtggatgctctcagaggatttagttaaattgacattcctagtgcactttcatagtcatattaccctgtaggatttggaaaatacatatatattttagaattcgggatgttttaggtgtgcctgtaaatttggttgttaatatctgtaaggcagccttctgtttttcctactaaatcataagcgtgaacatcttagtgggtggcattatacatcctttatgtttgtagtccccaaaatggctttcacacagtaggcacttaaatttgtggacttttataggctgtgtagacatcatcaaattcctgtattctgggattaggtgctgggggcaggagatgaggtaaataatttgaagaatgccgaagataaattatgtgttgtaattttgtcttgagcatggttggccatgttttgtagaaaaactatttctcaggtaacctcaatcaggttgcctttggcaggaatatatcagaatttaggcgggatttaaggttgcaaacctcagagttctcaattgagctctttttctgggttaaaactaattcagtatttctaaacttaagaaagtttcttaaattaagctgactgcctttccattctgtctctgcctgtttcctcaatgataagaggaagtagtggtgaatgagggctgggatgggaacatttacattactggaataaagtcatgtgaggatcctactctgatgtgatgcttagctttgttttaaccattatctcccattttattgttgagtccatgctgtacttatctgtttaagtcacttgtaacacatctccagatgattcagtcttcaagaggttgatgtgatctacaagtaattagctcctgacctgttgacctgctaaatcgtgttatatatactctgcagcttactgacccaccctagaaatagtgggtcgtttttaaagggagtagaacaagactagacatttatgctctccatttttcttcataacaattgccaccaatagtttatgttaaacatttgactcctatacatgctgcacacatccctttacataaaatggaaagtttcaaggaaatatggggttctagaatgggtagggatctttattaataatctacttgacttcatgttataaaagaagttggttttaaaaaaatgaatgatttacctaaaattacataaaaaattagtgtcagaaccaagtgtaggaattagaaaatcagaccaagagtaataaaataacttcatagccttataggttaaaataatctacaatgtatactgaactgaatgtttcactagtcccaataactttacatttacattccactctcctctgtttccatacaccaagttgaaatacaagtttcatcttttaaaaaaatgttcatgttacagactaattacatcaaaatctgctgggggaacattgtgaaaaactagattgtagagagccatctcaaatcactgaataataatcttcatatttggaaacgattgatgtaaaacatattacctgagaatgctaagaagctccatgggcccagtagagttctttgtagagtacttcactcgtttgttagttatttttactatctgcaaatcgatgaagctgttgtcacttttctactctt

SEQ ID NO: 915854 - DNA, 4001 bp, Homo sapiens
tatctctgtagtcccagtccccagcacatggaataagctcagtaagtatttattgaactggtttgactcacttaacaaatatttactttagagtttacaaataagttattcaagtatttaaatacaaatttattctaaaatggagatggagaatttaaatttacctttacataatatacaaaaaatacaaagttacaaagtgttaaagacatttttcaccaaatctcataaaactaattcattgtaattgtggacctgactacacataaacttgtaattaagtattttgaaacataccttgtttctgggttgtaccttgtggaaaagcaaatatagtaaatagaagttgccaacactgaagagaagattaacaaatctgagcatcccaatggagcagacaacatgttcagaccatgcaaagatccaaatggcaggtttgaccactccaactgacaccaggtacaagccaggtaatgtagtaatcatgggatcccactttaaaatgaaagaaaatgaagtaaaagcaagaggtaatacgaacaagacagacacaaatatgtcaagcccaagtctcatctccagcaacaatcagaaattttgagaagttagtctatgacaagattaagtaagtccttggcagaacaggattagtttttcttattttttgcccccggaccagcttagtgatggttcaggtagcagcaaccaataaacaacaacttaaaatctatttctattttccaagaaatgttctttaaaagcctttattttgataaataaactgcaaatgctccagtttttaaaagcatggaaacattgtttgggactctaagtttaggaaaacatttggaccacaggctccatgatgacagctgacataaactgagacagaaattgtgccaaaccctctgtattgtaacattacaatatgccctatagtaaagattattgtcattttgcagatgagtaacctgaatttctgaaactcagaacatctccaagatcacaaaactagtaaatcacagcaccaagatttaagatcagatctttctctaaaacagactttatatttctagccagtaccctatattgtgtcaccagaaaagcaggggatgtttattttgatatttatatgtacatacttgcacagtcaaatatatattcaaaaatgatgtgacttgactggttgccagtttatccagtcaacagatagttcactaaaaatacccagggaaggaatttgtgattataaattgtcactttttggtagccgaagatccctccagtccaccctatcccacccctaaaatgcacagtgaggtgcttaacaggtgagctaaagggaagttttctgatatttccaaggagcacccgaatgcctttaatcctgagacaaggaaaaacaaagtgggatcgatattgtcagctgccaagaggagcgctcagttccccactaagtattctcccagatcactcctccctggggatcagatctgctgtttattcattcatttaataaatatttcacagatctcagagacaggaacaaaagactatacccagtttctttcatgttctgaggctggggtggggtggaaagggacgagttaagtctaaagatgggagaaggagctggggacgctgggacctttcaggcctctcctggggtggggacaggttgggcaccccacctgggaaagggagaaatggccctcacagtagcgctgcgcctgaggcaggtggaagatctcgtccatgtagggctctcgcagcgcccggctgaaggcggagaagaggaggcaggacactaaaaaggtacagctcaaggcggccgagaaacagtaaccctctagctgcgccattcctgctcccacagccactgcccaagaacccactcctggaaaattctgagcccggaaacccgagctggaaacttgggctcgaaatgggcgcgctagacaggactagccagacggggccacataccggaaggcaaaggatgctgggagagcgcggatccggaaaacagcgggtcgctgtttcctggagtgacgggtttagataacggaccggatgattaccctctccatcacattactcggggcgcacagtgtcaaaacttccggaaagggcgggtctcggatttcgcgagcgcgggaggggcgtggcttgctgctttggaaaaaaaaaaaagccgcttcttagcttggatcttttttcctgctcatttccatcacttaccagaaggtggcgacgtttccccacgtttccaattccaagccctaaaattaacacatttttttcccccgttatttcttttctttctctccagtgatccgaattaattaaaccctcaattccaagacatttcattccatcaaccttggagtgtaggaagggggcgttggttgtgatagcaaagactgagactttcagatgaaaacttgaagaaccagagacccgtcaatgccgaatgaacttcagtgagaggagtgtttgttcgtttgtttgtttgtttaggttaagagagaactctttcaaaatgtggatgctctcagaggatttagtaaaattgacactcctagtgcactctcatagccatattaccctgtaggatttggaagaaaatatatattttagaatttgggatgttttaggtgtgcctgtaaattaggttgttaatatttataaggcagccttctgtttttcctactaaatcataagcgtgaacatcttagtgggtggcattatacatcctttatgtttgtagtcccccaaatggctttcacacagtaggcacttaaatttgtggacttttataggctgtgtagacatcatcaaattcctgtattctgggattaggtgttgggggcaggagatgtggtaaataatttgaagaatgccgaagataaattatgtgttggaattttgtcttgagcatggttggccatgttttgtagaaaaactttctctcaggtaacctcagtcaggttgcctttggcaggcatatatcagattgagtcgggatttaaggttgcaaacctcagagttctcaattgagctctttttctgggttaaaaataattcagtatttctgaacttaagaaagtttcttaaatcaagctgactgcctttccagtctgtctctgcctgtttcctcaatgataagaggaggtagtggtgaatgagggctgggacgggaatatttacattactggaataaaatcatgtcaggattctactctgatgtgatgcttagctttgctttaaccatcatctcccattttattattgattccatgctgtacttatctgtttaagtcacttgtaacacatctccagatgattcagtcttcaagaggttgatgtgatctacgagtaattagcccctgacctattgacctgctaaatcgtgttatatatactctgcagcttactgacccaccctagaaatagtgggccgtttttaaagggagtagaacaagactagacatttatgctctccatttttcttcataacaattgccaccaatagtttatgttaaacatttgactcctatacatgctgcacacatcgctttacataaaatggaaagtttcaaggaaatatagggttttaggatggctagggatctttattaataatctacttgacttcattttataaaagaagctgatttttaaaaaatgaataatttacctaaaattacataaaaaattagtgtcagaaccaagtgtaggaattagaacatcagaccaagagtaataaaataacttcacagccttataggttaaaataatctacaatatatactgaattgaatgtttcactagtcccaataactttacatttacattccactattctctgtttccatacaccaatttgaaatacaagtttcatcttttaaaaaaatgttcgtcttacagactaattacatcaaaatctgctgggggatcattgtgaaaaactagattctagagagccatctcaaatcact

SEQ ID NO: 915855 - DNA, 4001 bp, Homo sapiens
ctgggattacaggtgtgtaccaccgtgcctggcctgtgggctttcgttttttgttttgttttgttttgagacacagtctcactctgttgcccaggctggagtgcagtggtgcgatctcggctcactgcaacctctgcctcccggtttcaagtgattgtcctgcctcagcctctcaagtagctgggactacaggcatgcaccactacgcacagctcattttttgttgttgttgttgtattttagtagagatagggtttcaccatattggccaagctggtctcgaactcctgacctcaagtgattcgcccgtctcgggctcccaaagtgctgggattacaggcgcgagccaccacgcctagcttcctgtgggcttttctatgcctctctgccagatccttgtgtcctcattacaggatagaggtgtggttctcaacatgtgctccccagaccagcagcacctggactctccttagaaactaaactaaaccacaggggtagggtccagcaatccaagtcctgccaacagcaagtccaccaggtgatgctgagaaccactggtgtggagaaattacctggttatttgccatctctcctatgagaccagtgattctcaaaccctgactgcccatgagaatcacctggaagctttttaaacaaacaagtggtcagcctgcactcggagcgattctgattgaagtgctctgcagtagaacccagcacgtttttttactttgttttgtaaactttcccagaagatactcatcagtagccaaggagagattcactcgagtcatctgtcagctcctagtagacaggcaatccagtttctttcaagtttatgtcccaagcacctaaggggcttagcccagaggtgctcagagaatattggatgaatccattagtgaacccatcagtaaataatggatcctgagttcagatttctccaaacatacgatcattaattgcaccaaacaagccctcaatgcacacacacacacacacacacccctctgcttacctgtaaaatattctacttctttctccaactcttggaaaatctcatctgcctcagctttgccaaacaggactgtgtaactgcagtccaggccctcagcccgaatgtgccgccagctagggcctgctgagtggcctccattccctggggcctctctcctgggcctcttccttgtgctttctttgtctcctcccaacacagctggctcttctccagttggctcttgctcctcctgcttcctcaaaaggcccccttgagcccctttcaccaggaatctgtccatcctgtccccacaggaaagaagggacgtcagtggcgaggccaagacagaaattgctcaagttctatccccagtgcaaaaatctgtttgtccaaggggtctcacagcaacattcctagtttcacattttcattttaaagtttaaaaccatgtcctagaaaggaaacagaagatgttaaagccggaagggaccctagggacaatctgatccagggtctcccacgtccacctgtgcatcagaatcagctggctagcttgcaaaaacccagaggtctgcactccacgcctgagcacctgaatttttaaagaactacctcctgggaattcgcacgccacagctaaacttagaaactacaatccaaaccctcattttgcagaaggggaaactgttgcccacagaggcgaagaggtttgcccaaagtcaactgtccacccctttaaggaggaaggacccataactgacctcgctgccccccaccagtgttaaaatagatcagtctagtgatgctcaagtggatacgattcagaagcgagacgcaaagaggttaaacacgggtaaaccgcacgcaaaattctgatatcactgcaacacgtccgtggggtgggggtggcaagagtgctctagcatcgcagctccggcgcagatcggaatcccgcagtcaccctggtggcctcgtggtgggaaagacgcgccccagcgaatcggtcgcgtcacttccggagcacgctgggaactacggcaggctagggcgcaaagagagcagccgggcggccccctggtgccacctgctggcctcccgtgtgtggcaagcactgccgctttcccgttgatcacctgttgggccactgtcgagaatcacggctggggtgagaactgtggcttggcgtcacttctcagtgagggttactttggtgtccggaaagggcgttgggccaccagtatattgtcacgagtgggagcaggagttctgcagtcggatatcgtggattctgtttctgtctcctccgccctggctgtgtggcctcccacaggtcacttaacctctctggggttaagttgcctcatctgtgaagtgcggactacagcacctatgtcatgagagcgcctgaggagatgacaggatgcatgagaaatgctctgtcctctaaataaatgttggttccattattgctcgtttttctttgttttcttgttttttgatgttgttcttgtttgttttgtttttttgagacaggatctcactctgttgcccaagctggaatgcaatggcatgatcatagctcactgcagccttgaactcctgggttagagcgatcctcccgtctcagcctctggagtagctgggactacaggcacatcccaccccaccctaaataatttttttattatttttagtagagatagggccttgctatgttgcccaggctggtctcaagctcctgggctcaagtgatcctcccacctgggcctcccaaattgttgggattacaggcgtgagccaccacgaccggctcctaatttttatttactctgtctcccctcaatggaacgaaagctccatgagatcagaggctttgttttgacagatttcaacaaatgtacaatattgtatgatcaccaccacaatcaagatctaagacagttccgtccctccataaaactgctccagcctcttaatcaacttcgcccatcacccagcatcagcaaccactgatctgtcttctctccctatagttttgccttttccagaatttcatatacagggaattgccgtggtttgaatatctgttcctccaaaatccgcgttgaaatttaatcctcagtgtggcagtattgagaggtggggccttgaagaggtgattgggacatgagagctctgtcataatgtcctcataaatgaattaatagattaatgggctcaggggttaatgggttaatgggttaccgtgggagtgggactggtggctttataaaaggaagaagagagacctgagctagcacactcaggcccctcgcgatgtgatgccctacacggcttcaggactcaacagagtccccaccagcaagagggttttcaccagatgcagcccctcaacctcggacctctcagcctctatgagaaatgcctttgtgggacttctttcacttaagcatattgcttttaagattcatttatgcgcccccccacctccccgcttttttttgtgagacaaggtctggctctactgcctaagctggagtgcagttgcatgatctcggctcactgcaacctccacttcccaggctccactcccacctcagcctcccaagtagctgggactacaggcatgcaccactacacccggctaatttttgtattttttgtagagatgggtttttgccatgttgcccaggctggtctccatagtcttcagctggtgagctgaagaaatccgcctgccttggcctcccaaagtgctggaattgcagtcatgagccgctgtgcccagtcgtatatgcacatttgtattacttatttgttcctttttattactggtatagaagggatgccccacaggagtaggccccacatagggttgtttctctgattttaggttactatgagtaaaatcactataaacattcacatacaagctttgtgaatatagtttttcatttcccttgggtaaataatgcctaggtgtgggagtgctgggtcatagtgg

SEQ ID NO: 915856 - DNA, 4001 bp, Homo sapiens
atatatatatataacaaattttttaaattaacggttttcatgcaaacgaagatgtgatgttaaaccaaatataaagaagagccatgactgattaacaaacggttctatctccttgggcaaaattaaagggggaactgcagcaattagggatgggggaggggaagcatcagagaggctaagggcatctcaagagaaagacaggatctctcctaaattaagcggatgactgcctatgttcatcttccttaacacttctttgttataattcatcttaatagtgtgatatttgtttaaaagttgataacgcatcaattatgtctcttattttggattctcgactattcaaaataaaatattatgatcaagtccatccagagtcaatacaagacattgcagaatcattaaagaaagacctgtcaattcaaataacgttaggcatgcacctaagaattccacaaatacagataccaggtctgaaacgcagccagaaaaccaacaactcagtgtaagaataacaaaaagtatacgctcgaatctttctaaataaatgactgaaacgacttagctgattattttctctatcatttgcacctttatttttgatttacccttagtcaaaagttacttgcaacgttaaataaaattagttaaatatgagattaataaaagaaaaaaacttgtgttcaaaatatttagaaaatgagcttctacaggccagtgttttgtcagattttgaatttctataaaatagggggcagggggcttgttgtaaatatttcacacttaattcgtttgttattttaaagcaacccgccccttatagcttaactgtggaatatatacaatgataaggagaagttctcttggaattgtaaacgtgctttagctgtcgcgatctgaaataataggttagtattaggttacaagatagaaaagatagatggtttgttttgataacattttgacttggagatacttgggcattcaaagttgaagatttcacccagaagcattccaaagactccttaggtgacttttaatgtgaagtcataaaaatacaaaacgtagaatctgggaatgagtgattaggccggggatggtttgcccgaagctatttagtgtgctttagtgtttaacaaacattcaacgcgtgttgtattgcaaacgcaaaaaaaagcagaaattacaaattcacacacgctagaaatctagggatcctcaaactttgaaaatatatcgccacgtcttggaaaattaaaaagatttatctttacctaaaggagctcaaagggttttttgttttttgtttttgttttccggtttttttttccctactcgtgacgacagtgacgtactctaacgagctgtgatcgatttcagttcctaccgcccggactgcaaggcgggctcgcagaggaagcgttctgtcttgactcaattacgctctatttagcgccctatcagtttactccaggaaccaatattacagaaggactcagggatccgtaggcgaccagaccctacagcgaaaggagaatcgctcagaggcaacccggtgctggatctctccctccctccgccctccgcccccaaaggctgcagcagcagtaacaccgcttcataaagcgagcaccttccactaccttcctccaccttccaggtccctcgctcccacttttctcctttctccctccctgcctgatcagaccgatcctgcattttcgattgcggaagggctgcggcggctccggctggggcgctagcgactcaccgctgctgtcctgacagggcgaggtcctctccaagcgcacgtgatgctcggcgcggggcaggggtccgaaggcctgcacgcatttgcctgcagacgctttgctgtaaaaggactcattgtccagcgtctccataacgtgctccagaggacctcctgcgcccatgtaaaagtcactgtttttactcggagggctcttgagggcaaacttctcgctcagaaactccataatcctggaagactgtcgcgtagctcctggggcacagaaactggagagcgctgggggagggagccagtgggtgggaggagggagggccagagaggagggaagggaaagcgagcgctgcggcgtcgggaactgccccgctccggtccctttaatacgtcccggctggaaaaggagcacccgaagttgcttttatatcttgaaactcagctggcctcctcgggcagcctcccagttctaatgaatatgaaaataggcgggcgactaactccaccccaggtccccctccgcccctaccccacccccattttccccacttacccgggcagagggcgtccaggcctaggatagacagacagacagctccatttcagacaaatgccaggagagacgagcccctgacacccagattcattgccgccgtgacagtggactggcatttcggaagatcttggtgagatcgcaaagcagttaaacctccactccctactgcctgcgccttcctgagccacccgtccccaccccgcccccatgccggccactcactaccagaaagatttagaggcgtcttaagaacttgaaaggaaatattgctctaaaaggcttttatttcatccgtaaatcgtttacgtggaagattcacattaatccgaagcccaaggaaccagatgcattggcaactgttaatcgcagccgccgtagtagaggggccgcttcggcttctaaccgggaggagctcggggtccgggccagctgggagctttacgaggccgtggccttttctttttctctggaatgcggcggagtgtggacgcggtggcgatgggtgggagagagaagccgagcaagaggcaatgaagccattatactaatgccaaccaattccctacaccctcttcgccacccttccctttggtccacgattttatcattagacccaaattattttaagaaaacccgttaggatcagtgcctttgaaaggcttttactctaatgccaaagtgaggattgttacaaataggggtttatgaagaagaggaatgtctgcatatttttacagaaattacttttaattttaaagagttgctgtggagttactccgaaaagcgctctgggagtgagtggtgagcgcgcggagctgcgggcactcgcggcgcggcgtcctgggcgcggacaggtccaaggcctccatttccaccagaggggatggtagggcaggcaggacagcactgctaggttgaaagcccttctgtgtgacttttggcacgactcttggcttcctaggagcccgcggcgcttgggggaaatgcgttcggtgccctgggcacaaaatcgcatttgcgtcaggcaccctaagctagcaaatttggtgaaaataagccagacaggttttggtccaggtaggcctctgcttagacgtcctgacacagcctttgtcaacactggcactcacagcggccgtcgcgtttccccagacaagtctggcaattatggtgaggcctcgggcaggccgagcagcccggactctgaggatggtgaggccaagcccagctgtggtgggcatgctgatgggtttgagagtttccaccttctgcgggggtcttagctgacccacgcctctttggtgagaccttcttcgagacctgaccaggcctcagccagagagtaacaatcagggagggctgtgcaccccggagctgctccttagcgttgcgcgaaaggcagggtcggccttaagcacccagatccgaccggcggatcccgagcagatcagctggcagcagcagccttgctcgcccggccaaagtccaacccagactgttctcccaaggaggcgcacaagcttagttcacatggcgcagcgctcagtgtggccttgagcgcgcactcagattcaggcaagtggacactattcctgggactaactagcttctgctgtattattattactctctccagagcagtgctgcaagaaccaactgcagattgttaaatttcaggggagc

SEQ ID NO: 915857 - DNA, 4001 bp, Homo sapiens
aaatgaaaaagccccatcttccagaccacaagtcagctccctccttttcctttccctactttttgtggttttgatgtgaacatagaacatgtcttggaacccaggacttcatgttggtgcattagtatcattttatttatgtatttatttatttatttttgagacagagtctcgctctgtcacccaggctggagtgcagtggcgagatctcagctcactgcaacctccgcctcccgggttcaagcgattctcctgcctcagcctcccgagtagctgggattacagacgtgcgccgccatgcccggctaatgtttgtatttttagtagagatggggtttcatcatgttggccaggctgatctcgagctcccaacctcaggtgatccacctgcctcagcttcccaaagtgctgggattgcaggcgtgagtcactgtgcctggtcgcattgatataatttttataagatactccagtcccaacccaggtacatatttttcaactttctaagcaaaattttaaataatattttcatagtaaattgggaatgttttcatcccttaattaaaaataaaccagtcaagctgggcgtggtggttcacgcctgtaatctcagcactgggaggccaaaccaggtggatggcttgagcccaggagttcaagaccagcctgggcaacacagtgagacattgtctctacaaaaaatacaaaaattagcctggcgtggtggcgtgcacctgtagtcccagctgcttgtcaagctgaggtgggaggatggcttgagcctgggaggtggagatcgcagttgagcctgggaggtggagccaagatcatgccactgcactccaacctgggcaacagagctagaccctgtctcaaaaaaacaaaaaataggctgggcgcagtggctcatgcgtctcaaaaataaataaataaataaataaataaataaataaataaataaataaaattaaaccaacccacagtcccttaaaagctgggctcttgcacaaccctaaactgcctcagataagccgtggtcagtttgtgagactcattgatcgtgtgcaattgtggtcccatggcacgctttggattcaaattctcatccaacttcccttgctaccccaggtcgccctcaaactttgttcttttattcatatctggcaggaagctcagatgagtaagagaaatatcttgttttctgatggtcaaatcttgatttattatcactcagggccattatcgtctaaatgttctccgtggttctaaagctttagtgtacgagatcacgaggatgtgaaaggtacttttgaaaaattcaggtctcagaactccagccccagtgatgctgattctaaaattctagggatagggagtgggggacgcaggtggaatcagaaatctgccgtaagaataaaataaccacaggccaccctgacaaaggtggtcttctggcctccctttaagaagcactggggaggacctcaaccccttctgatggttggacagtgatattttaccagcagaggcaggaccctgatgcgttccaatggggtgttcctctctgagctctttggacggaatgacaaccccaagcagcagagcgtgttagcaacaggtaccccaaaggctggcttgcccgtgtatctctgtgcagggacgctttcacggcgttgtttccctccagagtgcacagtgagaggaagagcggccagctccgcccgtggcggtccccaccctgcgcgcccggccacttacttgcccaccaccaggctggcgccttccagcaccgccaggctgcgcagcgcatcccgcgccaggaagcgctcgccgcgggcgcacaccagcaccacttgctgcgcgttctccagcaggaggctgtggccgcttgccatgtcgcctcgcgccgagggtcgccgggaggccaccgggctcgggccaccggcaggactcagtggaggacgaaaagccgcagcctgcgctgtccggggctgggagggtggggcgggggcgggcgctcgcagccgctgccctttgctcgcctcccccaaccacagcaacgggggcggtaatcattgcaagaatggcaacgagtaataaacctgatgaggaatcctctcttttttggtcgtcttgtcccatcccgagtaaacgagatggagactagtgtccctacttttcagataaggaaacttaagcttggtcaccccgagagatcaaagtgagctgtgtggatcacgtggtatgtggaagcgcgtcaagggttggctgggtgagggcacccggagtgttcgggagtgagggaccggaacctggggtagagccccggaaggggggccatgggggaaacctctgcccggggggttggggtgggagcctggagatagcgctcctggagagggcagagtaggggaaagctgtgcccaggggcagggacgggagcttggaggtagagccccgggagaggacagagtgggggaaacctctgcctagggtgctgggacgcgagcctggaggcagagccccgggagggtactgcgtggaggaaacatctgcccacaggttctggggcgggagcccgggacgcggagggccgcgagccgagggaacctgggggtggggaggagggggatgcggtaggggaggtgctcctgggtccgcgcgggtggcgggtgccccgcacttatccgttggccagctgcgttccgggatcagctaccagacggtccctgagatgaccgggaaccgggctgggggaggatagagccgagactggaggatcgattggcacctccgcccacttttcccacaacgccttcccgaacgataggttggaaaggctcctggatccaaactcgctgaggtaaaataggtttcagctcagtgtccgcccctccgcatgccccctcccacccctcagctgtgtctggtgggcctacaagcaacttgcgaccaaaattggagacagaatcaagtttatggaagatggtctgtgattctcagcctcgtcgcttcctgctaccaattgctatggaaacactgccaggcccaggcttttgagtccttaattacttgatttcgtttattcatgtttatcacaagctctgtgttaagtcttgtggaacatacaaagataggaaaggcgctttccctgcccagtaaagactttacaataaaagtgatagatgtggacacaaataatatactataaaagcagactaagcctgcaaacccacaaaatataaaagttaatttagtctcattaaaaaaacctggaacagaaagcaaacactcctttagatgaccacgataaataagaatataatttagcttcatattatggcctataaaagagagatcagttaggaaagagaaagataaaaattggaaaatatatagacaatgtgagtgaaagagaccctaagggtgggggggagggggcatcagaagattattcacagctcatatacacaatcacaaacaggttgtttgtgtgtgtgtgtgcatagcttttaaaaagtttatacatacatatatttctatgtctttaaaaagagaagtagaaatagtggggaatagaaacacataaagtcactaattcacagagaaatattaaaattttctattataaaatttctgctgaagactttaatcagttacattttgcaattttaggcatatttgcagaactatgcaattgtatgtataaaggatgggttaaaattatagaaaaatagggttcaataaacttgtcttagtctgagttctgtttcctataagctgtttgaccttggggaatttctttacagtaatttctcgaagcctcgttttctcatcctcatcatagggagagctgtttctactttatgggcttgtctgagttttaaataaaataaaacataaatcacttagcccagtgcccagctctaaacaagtaataggtattattactattattcgtgtgttttaatcctgctatttgtcttcctggccaattaagt

SEQ ID NO: 915858 - DNA, 4001 bp, Homo sapiens
gcagtgataaatcggacaatgtggtcgtgctgtaggcctggaagttcgtacaatgctctctcagcttggaactgagccacagacctcggtgggaaggccttgatggcaaccagttttccttgcagctgcccggcccaaaccactgcatgacctccttcccggattacctgctggggacactgtgctgagtgtgggcctctgagctataacagggccaggattcctccccagcacaacctccaggagtgcccagaggagcccttctctccctccctggggcacctgggagaaacacagctcaggcagctcctgcagctccacactccagtccctgcctgagtctggccttggctctggcactggctcacctcgcactctgtagttctttcgctgtagcagggctggaacagacaagagccttagggtcagggtgcaaatgcatagggacaggaaaagggacttcgtggaaagggagctttgtgagaggtcatgggagtccgggaatcaggctatagagatcccaagaccatggggtcaggggtgcctggagaggggtcagagcttttggggcaatgtcttggggtcacaagggagggatggggtggattagtacccaagatgatgctgcccagcagcagcaggaggaggaggaacagccccagcagcaccagtgccatccagatggactcacctggacatcaaggcaagaatgcaggctggagagcactgacccaaacctgctctctgctcttcccctcctgagagcttgcgtctcaacccacccccaccctggtcacaagaccccttatctcccagtcaccagggcaaccaacttcccaaggccaggaggaggaaagcgtggggcgggagtagggtgagaactggccctggttccacctctcatcctaacctgggccccagcccccatcaggcttcagtacccttgggtggctacctggggcagcctggggaccctgggagccaggagtcccagggctccctggaggaggcagatggctgtaattggcattgcagaagtcagtgccacaggagcaggtgaagagagtggagccagggctggggtgggctcggggacttgggtcacagtggagggactcacagcctggctcatcactgtctcggcatcctgatgggatgggattaggggaagaggagagaaagggggggcaaggaagaaagcacaatggggtgtggaaacagagggtaaatcccttctctatcagaggcgtcccttccagctctcatgggcttttctttcccaccagatgttctatttctccccttcccccttggttgccacccacaccccaggatgtgtctgtctcccaccctagccatcacctgccatatactttgccattcaccttgcatttccacctgtgcccggtcttgggtcaggttccagatcccaaagcagcagcggctgtagaggcagcggatagctctggggagctctgtgcctgtatctagcagctctcccagtgtctttgtgcttccccgcactccaggggcctcaaagaacacacaggttcgcctgtttgggggtgctgaggcccagggtggggaaaggaaaagattcaaggtgggagtgaatgcagaggcaaaaaactggccaaaagaatagacaaaacatgttccacatcccagcgtcagtatggtaaagccacaggaggaagcagggtcagcagaggcctggaacctgagccctgccatggggacacatggctctatccttcacccttactcacccagcccactcaccactcttccaaaggggtggctcttgcttcaagcgcccctttcccttgctggatggatggagagacccttcccctccctgtagacacttaccttccacagctgtgggaagtaatgcccaaagccccaaagaccctagcatcttgctggaggatggcagcagcagaaggagaagagcataagccagcacagctgcccctggccaaatctttcttcagatacagggcatcctggggcttctgatccctcagtccccaactccgcccccctcatcctatcccagcctctgtgggggagaaggctgctgtgggggagagggtgggtgtggggaaagcagggaaagaaagggaggagcagagaaccaatctcatatcctcttctcttctgcaacctcctctttgctctgcatagtgagaggaggggaacttggaggcccagctgagaacccagtgatgcctaatttcaaatctttgcccttccctgaccttggaagaagatgctggactctgttgactcttctcaggaggaaaccaatgtgaggtcaaatgcttagagccattcagctctgcccaagatcctttctagcctaagatctctttatattcagggttcatatctgcaactgcttgggcagaggaaggcctcacagcccatattagaggttaccttgttttccaacttaagaatcagaaagtatacaaaacttacctgaatttttaaaaaacacattgaaaacagtaacaatggtaaattttgctatgtggatttttttttttttttttttgagacggagtctcgctcttctcccccaggctggagtgcagtggcacgatcgcagctcactgcaacctccgcctcctgggttcaagctattctcctgcctcagcctcctgagtagctgggattacaggcgcctgccaccacacctggctaatttttgtatttttagtagagacggggtttcaccatgtcagccaggctagtctcgaactccttacctcaggtgatttgcccgcctcggcctcccaaagtgctgggattataggcgtgagccaccatgcctagccgtggattttacttaaaaaaaaaaaacacattggttcacaggctgaacaaatacccattattaaggaggtaacaaatttcttatcaagcacctactatgtgctggggcacagctagggctatgcattttacaatcatctcatctaattctcccctgaaatatttattattattattttatttatttattttttgagaccgagtgtcgctctgtcaccaggctagagtgcagtggtgccatcttggctcactgcaacctctgactccctggttcaagcgattctcctgcctcagcctcccgagtagctgggattacaggcacgcaccaccatgtccagctaatttttgtatttttagtagagacagggtttcaccatgttggccaggatagtctcgatctcgtgacctcgtgatctgcccgccttggcctcccaaagtgctgggattacaagtgtgagccactgtgcctggcctattatttttattatttccattttataggtaagaaaactgaacttacgtaagtcgcccaaagtcattcagctaggaaatagcagagctggaatttgaacttaggcaggtctgactccaaagtccaggttctagtcttatttttattattatttttgtacttttagtagagacggagtttcaccatgttggccaggatggggtcgatctttttttttttttttttttttttgagatggagtcttgctctgtcgcccaggctggagtgcagtagcgcgatctcggctcactgcaagctctgcctcccgggttaacgccattctcctgcctcagcctcccgagcagctgggactacaggcggccgccaccacgcccggctaattttttgtatttttagtagagacgggttttcaccgtgttagccaggatggtcttgatctcctgacctcgtgatccgcccgcctcggcctctcaaagtgctgagattacaggcgtgagccactgcgcccggccgaaggggtcgatctcttaacctcgtgatccctccgcctcggccgcccaaagtgctgggattgcaggcgtgagccaccgcacccggccggctctattctttgtattacactatactgcctgaaagacgtacaaaattcaacaatgaaaaaaaattaccacttaatactatactt

SEQ ID NO: 915859 - DNA, 4001 bp, Homo sapiens
ctataaccagacttccattgtgaaacacgtaaaagttttccatctctttatccggctctagcagtctgttatctggacccacccagatgaaatccgtatttgcattacctgtcttgctgtcacagtggaccatcagtctttccccgacctgagcctcatgaataaagccaagcgcacgaaaggaaccattgatgatgctgtcagagcaattcataaagctatcctggagcagaagtacctgacgcgagtgcctggagtcagaccacaggcgacaggtgtaatcgttcttaaaatccatcactgagctaaagtgcctacgataccaaaagaccagcaaggagtacagggaacagtcacagacaaatgggtttccatgaaggtagatgcctctcagctgttttcctggcactaaatttatgtggtgcattggcatggaaggaattcggttataagaaacatctaaaaacatcagttctgccagcttgaaccttccaacatacaaatccatcggaaactgtgtgagaaaatttccacttaagtagagtttctgcaactgggagagccctccaaacgctgaaggatcgagataggatatgtgattgttgtaaagcagaagcacttccagaaccttcaactcttggaatacagcatttttcaccgtcttcagcttattggacgataagtcaagacacttcaaatttggagttgtggaaaaactgcccgtggaaatgctggtgatgttgttatgacgaagaattagggtgttcagctttgcaaacgatactggaatccactcagaatccagaagcccaattctgttataactcaggtccagtctcttaatcagtctgaaaaggttcccaggcaccttggacaggtttttgttggtgcagctgacgatgtcagtggcacagatgcaagcggtggggcacaccccagaggcaccagggcccacagtcactgtgatcatcagcaaacacagcagctccctgcagcccggtctgacgacggctccaagcagggtgggcagagtgtgtacacgtaacgacattatggtcgcctctgagtctcttcccggtgtcttttccaccggctcagcctcccaccagtgaacctggcaaacaattaataattcagagggagtaaaaagcagaaactgactaccactagttaacccataagagccataccttactttctttccaataacttttgaaatgggttttatttcacaatagggagctctgtgttgcctcttcactgttaaatgtattttttcctctttcctgggttagtcctgcttataaaaatgtacagtcacattctctccatacaacccaccgtctcacccaccatcagaaactcaattttttcctaaggtgcatcctgcgttgttgttgttgttgttgttgttttaaactccctccaacagacacaactatacgcaaacgtacgctacaaacaattaaacggaaatacttagcaaccacccatccaggaaaaaactcacggtgctggggagcctcgtgggctccggggaggctgcctacgcagtgccttccgaaggtctgcgcgtccgtctgtccgtgtctgtcactcttgcaccttccgacttcctttccctccggctcccggcgggcggcaccctctagccggctctcaactttgaggagtttcaagcagccgcggcggcagcagcagccctggacgcagcagccaagctcttcgctggctcccgggggctctcccgggttcctctcattgcaggctgaaggtaccgcctcggcgctctggccgccgtgtgcccgcgcgcggggcgccccgctcccagagccggggccgcgggagggggcgcaggcagccgggcggcagcgggcggccccgcctctccgcactcgggaggctgcaggacccggggttcccgcgcgcccggggccgggagacgggctggggcgccggtcccacccctgcgcgtcctgcctcctgcgggcagcagctcggagcctgcgggagggagcaggctgggcgcgtggtggggggcgcgcgatgcggagggggcggcggcgcagccaatccgagaggcggccggcgccccctcataccgccccgcggcctcgccgcctcctcccgctttcctcctccagctcccacccggacctctagaacggccgcgcagagcggggagggggcaggggtccacaccagaggcccagactctggtccttgagtcaagatgcccaacccactcgcctaccaattacgtcccttcgtccagctccaagccgggcggtaatggggtccaggaaggctaaaggggacacgcccagccaccgagggaggggtctcacccttggagacccacttcgcggcggccgcacaggtcacgtctctctccccacccaggccaaggaatccccggacctcttagagctttgctttggggcaagggccaaggaggctttgcctgcgccaagtgcagttgactgtctgggtttacaaaataaacccagaagcagcctgacgtctccgctcgtttctagggaggaggtcgcggggagggaagtcgggaacgtttcctctccacagggatatctgctgggaggaagtaaccgggaaatcgccacggggacacccctcacctccctgggaaagttctatccctttcctgactcaggaggcggcaacagggatggtgtccaattcaagaaggaggagggcaggaaagaaggcttggagccgaccttccggctggaatgcaaagataagagtattaacccaaataataataataatcccagagcagacctttttttcttttttctctcttctccttcccctcttctctctccctctctctctccctctctctcctttctctttcgttctctctctctcatttcctctgtctctgtccccgccacctccccgtcttttgcaagcgtgctcgtggcgcgtgcgggacagggaagtaaggggcgtgtgcgcggaggctcttcatcccttccggagatgccgcggccgaccagcgcgctttggttcagcaagcacagaaggtgcaagccgaacaaggccattcagaaatgaggtggagactatgaggctgatgagctctacgattaaaaatccatttttgtttaattccaagataagttttaacgatgggatttgagtgagtcagatcgcccatttggccattatatccggattaaaagaaataaattactgccttgacaaaagatgccaaccacagtggaatgaaaagcaaccaaattgaggaaacagttggggcaggatagataacttgtaatattacttaaaaataaaaatgatgaggacaaccaactcttcctcccctcccccgcgcaccttttcacttgagcaatcttgaatttagtgaaagttgtttcctacatggtccgtgagtcattgctgtggtcaggcagatttgttagaccaacacctaatttaaatagaattgtttgtggaataaagccgggctagcactaataaatctaggcattttcagatgaggacaacttgattcagattaatttatttcatgaaagttgaattttatcataagaacacagcctaaaatgcttcatgcaagcatttcttactgtgtacttaaaggggagaggcagaagttgagattttctagtattaggccacacttcctgggattctcaaaagcttggtctccaggacttcaattttatagagttagaatagttaatacagaggaatagaattaaaatcgctcagaggaatattttttaaatgactaataaatgaccaggtttttgcaggattttactaattaacatcgtattttaaggaaaccatgaaggcagaagaaagacctgtatttaatgcaaaaatagtctaaaaagaataagtgattcaaaaaaatggaaacaggaaggttatattattataactacaggcatattgtagaaacattatgcagagattacacagcaaaagtaaactaaatgcac

SEQ ID NO: 915860 - DNA, 4001 bp, Homo sapiens
gctgcataatattccatggtaactctcccattccagctccatgccaccagaaataattctgcaaagaacatcttcatgtgtctcctggtttgggctcttcacctcttaagattttgtaacagtcttctaagtgtctccctatttccaacttctgcctaattcaaatctctctctgctcacagtacagttctaaaacctttgatagctccccatgactgaaagaggaaatgctcttacttcatcctggtccctaagattctattcccaatgacctggctttatgtctcactactgtgctattcatattgtatcttccattcacattggagcgctactttctggtcttctctcatatttctacctttcctgcctgtcaaacctttactctttttatttcactctctacgatacatttcctcccatttgcaaccgtcagatactaccaatgttcaaaaataacccccttgacaaagctttctcctattcttttccttattagaaatttcaaaagtttgttactctcccgcttgtgatattattctacatatattatagttatttattttatttttttgagacagtctcgctctgtcgcctagcagcctaggcgtgcagtggcgcgatctcagctcactgcaacctctgcctcctgggttgaggcgattctcctgcctcagcctccagagtagctgggactaccggcgccactactactcctggctaatttttgtatttttagtacatgccgcggttttgccgtgctggctaggctggtctccaactctcctgatctcaagtgcctcggcctcccaaagtgctgggattacaggcgtgaaccaccgtgcccagataatttttgtatctttagtagaggcggggtttcgccacgttgcccaggctggtctcgaactcctgagctcaagcagttctcccacctcggcctcccaagtttaatgtaaaatatcagatgccattgtttcagaaagccttcagtagattaaggagattgttctccttatccttaagatgtctattttttacatggcaatattaacggactgaaagctcctggagagacgcaattgcccttgtaacttccatttccgtacaatttctggtaggaaataataataacaataacacttagtggtgtttattatttgctgggcatccttataagggttttacatgttttaaatttatccctcaggacaactccatgtgatgggtgctattatcacaaaaattttatagataaagaacctaggcacagggagaggttacgttaccggtccatggtcacgtggctggtgaatggcagagccgggggctgaacccagcaatctcagccagggatccgtggtcttaaccactttgttacctttatcccagggtctgtcaatgtttattccagttacaggggtggaattctgctagaagcttttgagaacctcatctagcgttgtgtttttttctaccaaggcttttagctgctaagagagaggccactgccagtaacagccggggcgccgagctgtcaaggctgacggaggaatggacgctcatcgcgcagcggagtgttggaggggcaagcccgccaagagacccactttgcacaactgtcctcagccaggaaacgacagatcaggaacccagggacagaaacacacgcggggcctcttcagaggtcggcggggggggtgggaaaggggcggggaggaagagcagcgcagggcctggccgtttggaggaggtgctggggcggcgcgaagggaggcgggacagggtagactcacagatccaggagctgactgacccgccgtgggcgaggcatcgctgcagcgtctgaagcctcttccgcggtcccagggcctccagaacccagccagggaccgtccgccaactcccgcccaccgcgcgacgcgtaggtttttgtgacgtcacacggatttttccggtgaccggggcgtggccacgcttcggactccacaaggaaagaagagagccccctttggggcggagccactgagggctgcgcggaagaggctgggtgtgataaactataaagaggccctaaactcggatgcaacgtgacgggagttgtagttctttcacctggcgggcgtctgctccggttcagctgcaggaggtttcttgggagttcagcccagcgcgcagccccgccgcgacgccgcgagccgagaactctcctggggcgaagggagcgctgagaagtcgctactcttactaaaaggatgcgttggatgctgggccatacccttggcgatgcacactggagacccgctcggatacggactccattaacatcaaacggagcgtgttagaggatccgagtttactgagcactttctaggaagcgtgcactgagctacgtgctttctaggccttagttcaatacttaaccatattcattataatccggtgaaatcgtaattatttagccttattttacagatgaggacactgcgtaccaacaagtaacctcactaagaatttcgtcatggaggagaagggaacctgtattcaaattaggaaggatcctgaagaaagggcacctttaggtggaattttatctttggttctgctgcagagtacttgctgctttttagtgctccctccacccccctcattcttccttgtagattagtctgttgtttgtatgctgagttccttttttaagctccttgaaagttggaacccactgctgttgcctgttcaggatgctacacattgaatcaacatggatttattaagcgctgaacgagggctagggatcgtgctgggtgctgaggattgagtggcgaacacttgggtcagacaagtaaaagggcaattagaataactgttaaatgcttagatggggttagttctatggaagcacccatgggggtgggatacagatcagagagaaaagggtggtctgcaaatagtttgggatggctacactggagagtgatcaagagtgagtgtagggcaggggttggccgactttttccataaagtgctctgaaagttgcagattccaggagaagtaactattgtcagacccagacaaattggagcctagagaccagaaaggaaggaaactcatgcttgtatgtctgagataagaactgtctcaaggccagacgcggtggctcacacctgtaatcctagtactttgggaggccgaggcgggcggatcacgaggtcaggagtttgagaccagcctggccaacgtggtgaaattcccgtctctactaaaaatacaaaaaaaaaaaaaaaaaactgggtgtggtggcgggcgcctgtaatcccagctactgaggaggctgaggcaggagaatcgcttgaactcggaggaggttatagtgagccgagatcgtgccactgcactccagcctgggcgacagagcaagactccgtctcaaaaaaaaaaaaaaagaaagaacgaactgcctcaaggactttaaaaaataaaccaaaaaacccacaatttcttcacatctttcatgcatttaatgttttgcacaacttgcttgttttgcaaatatgcgcacatttctatgacaagatttattgctaaatattctttaaaactgcagcagttcagataagatactgtcgaaaggacgtttggcccagcagcaggacctccaccaatgaacggactccaattcttgatttgagccttgggaaccaatcaacttagtttccaagagtttatgtgaacttccctcctttaccagtaaaatcttccccctattcttcccttctccagacccgtggcttgccatagctgtacatcttggattataattctttttgttcactcccaaagaaactcagtatctttggagaattctttctttgttgtcttttagcttcccagagccaaacaagaaatattttaggttttgtgggtcatgctggcttggtcacagctattcaacttgtatcttaaaattagccatagacagtatgaatgggtgggtctctgt

SEQ ID NO: 915861 - DNA, 4001 bp, Homo sapiens
atctcgttcagcagcaccagcaccgcgatcttgtacggcgtcacccagtccttgatgccgaacacattggcgtgcacaaccccattggtcatcatgggattgaagtagaggctctcgtggacgctggccatggcggcccgagactaagtctcgggcccgcggcgcgctgccgccagttgtcaccacaaggcacaacactaccgggtctacatctccgcccgccctcacaatatcccaggaaacagacatccgcgtgctcgcggcatttgttaaccaatcagagcagtctgtcagagcacatgggagagcgacagccagtcagaatgtacaagagtgcggggaggggtgcaccaaaagactgactccctacagaaacttttgccgagtgggagcaggttcccaggctacgtggacagggaccggatgggaggggaagtcgatgcttggggtcggggctgaagggactgaggagctcccaaagtggtttttttgttgttggttgttgttgttggtggtggtggtggtggttgtcgttgttgttgtttgagacgatatctcgctatgttaccaagactggagggcagtggttattcgtagacgccctcaaagagcactgcaccctcccaaatcctgggctcgagcgatcctcccgccttcccgagaagctgggactacaggcagcgcgcctggcttgttcatgtaatttgaaaatagttcaaatagaatgtttaaatgattgtgtttaaaagtaccgaaattaaatttgcacccttaaagtatgtatttattatgttacttttaaactcaaatgtttaggagtttaactctgtctttttaaagataggaacatgagatttttcttcagcgtttcacaaatgccatttgcagacagccagatcaggttgccagtggtcgtgtatccttacgtgaaatagaacattagcaacatcacctccatgtgctgagtcagtttcctacctaataaactacaaaatctatactctgcatttcaaagccctccaaaagcaatccccagccaacattttgaacctgatttttcacaattccccttccgttcatctgtacctctcccaagacacttagttctctataccctgaattattattaatgatctggtatccctattagtctttatgtcccttgaaagaaaaaccacataccattcaactttggctatccacatgcacacactgtgccttgtgccttttgttttgttttgttttgttttgagacggagtctcctctgtcgcccaggctggagtgcagtggcgcgatctctgctcactgcaagctctacctccctggttcacgccattctcctgcttcagcctaccgagtagctgggactacaggcatcggccaccacgcccggctaattttttgtatttttagtagagacggggtgtcaccgtgttagccaggatggtctcaatctcctgacctcgtgatcctcccgcctcggcctcccaaagtgctgggattacaggcgtgagccaccgcgcccggcctgccttgtgcccatttttatgtttgtttaaattatactttctctctctctcattctgctaccgaggctggactgcagtggcacgctcacggctcactgcaacctcagcctccagttaaagtaggtaattagacatgagcagggcaggagaccccctcgccctcaggaatgccaggctcaagcaatcctcccacctcagcctcacgagtagttgagactacaggcttgtgccaccatgcatggctaattttttttttttttttttcccgatacggagtcttgctctgtcgcccagtctggagtacagtcgctcgatttcggctcactacaatctctacctcccgggttcaagcaattctcctgcctcagcctcccgagtagctggaactacaggcacgcaccaccacgcccggctaatttttgtattgtttgtagagatggggtttcaccatgttggcccggctggtcttgaactggttgaactcctgacctcaggtgacccgcccatctccgcctccaaaagtgctgggattacaggcctgagccactgtgcctggatgcatggctaatttttttattttttgtagacacgaggtcttgcgatgttgtccaggctggtctcgaactcctggactcaagtgatcctcctgcctcagcctcccaaattgctacgattaaaggcatgggccactgcatgcagcctcatgcctggtttttgttttctcaatcgctatttgtttaatgaataatgaatgaatatgcattattagttcacaaaaacaaaaaagaaggcagatatgtataagctaaatgatgctatcaaaaaagaagacattgatatcttgtaatacaagctttcctatcttgagaactctgtatgttttagttaccatacataattattatataactatcttttatttgtgaaaggagaagctggcttttgccaggaatttaatactcacttaacctctttctttgcctcggtttatttttatgcctcactctattaatgaaaaagcatacttacaatctcccagctctttaggatatttttgcatatgtgtataccataaataaggtttgacaaagggtctgtgtggaataaactagtattcaaccttaaaatcctgagtaggaacacttaatgaatggaaagaggaaagtaattttacaaaatcctaaataacaattttactgtaaattggtaagactttcaagccattgattcatttattcagtaacactgtgctaagctcctgctatatttaaggcactgttctaggtgctggggaccaaaagggatgaatttctaagccagaagttgcaaactgaagttgcaatctaaactaaatgcggctcattagatatattttatttgctttgcatggtgtttgccaacacttaaaaattaggatatttctgccaacaaagaactacatttccagcttcacttgaaaaatttgaaaatttggtaacatgatttattcctagatggtaacaactgactggatatgcacagcataagctgcctttggccaggtgcaatggctcatgcctgtaatcccaacattttgggaggccaaggcaggcagatcacttgaggtcaggagctcgagaccagcctgggcaacatggtgaaaccctgtctctattaaaaatataaaaattagccaggcatggtggggggtgcctgtaatcccagctactcggggggctgaggcaggaggatcggttgaacccaggaggcagaggttgtagtgagccgaggtcatgccactgcactccagcctgggcaacagagcaaaaactccatctcaaaaataaataaataaataggctggaggtggcggctcatgcctataatcccagcaccttgggaggcagaggtgggtggatcactttgaggccaggagtttgacacatgcctggccaacatggtgaaaccctgtctctactaaaaatacaaaaattagccaggtgtgctgggatgcacctgtaatcccagctacttgggaggctgaggccggaggataccttgagcccaggagttcaaggctgcagtgacctatgattaccactgcactctagcctggacgacagagtgagactctgtctcataaataaataaataagccacctttatttagggcatgccgtttccaactcactacaatcctcatcaatcgttattgggttttttgttttgttctgttttgttttttggagccagggtctcactctgtggcccaggctggagtgcggtggcatgatcacagcttactgtagcctccacctcctgtgctcaagcgatcctcccacctcagcctcccgaatagctgggaccacaggaatgcaccaccacatgtggctaatttttaatttttttgtagagatagagtctcactgtgttgctcaggctggtctgtaagtcctgggctcacaaaatcctcccacctcagtctcccaaga

SEQ ID NO: 915862 - DNA, 4001 bp, Homo sapiens
cgaggtctggagatcgagaccatcccggctaacacggtgaaaccccgtctctactaaaaatacaaaaaattagccgggcgtggtggcgggagcctatagtcccagctactccggaggctgaggcaggagaatggcgtgaacccgggaggcggagcctgcagtgagccgtgatcgtgccactgcactctggcctgagcgacggagcgagactccgtctcaaaaaaaaaaaaaaaatcctctccatgagtgcactcatccacctctatcgcatttcattcattttacaaaaaactactcaggcattctaggaggctttggggatgtaccagtaaacaaaaacaggactaagtactgagctggtggaggttaccgtctaatgggagagaaggccatcactcacgtaaccatgaatataaatggaaaaaccacaactgatataggggaaggtatatgccatatgtgaacacactaaaatgaaaattctagtaatattgagcatttactacatgctagtaacagtttctactattgttcccattttacagagagaaaactgagacccaaatgaattaaggaacttaattatctgagctaaacctgtgtctgcaaaatgaaataacacatgacggccgggcgcagtggctcactcctgtaatcccaatactctgggagaccagacgggaggattgcttgagtccaggagttcccggccagcctgggtaacatggcaaaatcccgtctctacaaaaaatgcaaaaaaattagctgggcgtagtgacccgcgcctgtactcccagctacttgggaggctgaggtgggaggatcacctgagcctgagaggtcgaggctgcagtgagccgcgatcacactactgcactccagcctgggcgacaaagcgagaccctgtctcaaaaaaataataataatttaaaacaaattttaagtaaagtgcttagcacacagttaagtattcaatcagtgctcgtccttggctttatgccttttttttttttgaaacggagtcttgcactgtcgcccaagctggagtgcagtggcgcgatctcggctcactgcaacctccgcttcccaggttctagcgattctcctgcctcagcctcccgagtagctgaaattacaggtgcccgccaccacgtccagctaattttttgtgtttttagtagagacggggtttcactacgttggtcaggctggtctcgaactcctgacctcgtgatccacccgccttaccctcccaaagtgcggagattataggcgtgagccactgcgcccggcccggttttatggcatttttactgtttattacggtcctctaggatagggagcctgtatgacttatccctgtgtctccaacgctctattgtatagccccattttaaagaagatacaggatctgagactctaactctcagctaataaatactggagccagacatgaacttgcaaaaaaaaaaaatgcatgtaaagcgcctggcccaccgtaaacgctcagtacgtgttagctaccggtagtagctatctttatttcttcacgttcctccaggcagggagagtatctgatggacacgagtgtccccaagcccagggttccgcacagagcagatgctcagtaaaagtttgctgcacgagcaggagccagcgggcgcctctcacctgcagcaggggcaggagcagctggttgagcctccgccgctccatgaggctgacggcgccctcgcctgtgcggctcatctcgttcagcagcaccagcaccgcgatcttgtacggcgtcacccagtccttgatgccgaacacattggcgtgcacaaccccattggtcatcatgggattgaagtagaggctctcgtggacgctggccatggcggcccgagactaagtctcgggcccgcggcgcgctgccgccagttgtcaccacaaggcacaacactaccgggtctacatctccgcccgccctcacaatatcccaggaaacagacatccgcgtgctcgcggcatttgttaaccaatcagagcagtctgtcagagcacatgggagagcgacagccagtcagaatgtacaagagtgcggggaggggtgcaccaaaagactgactccctacagaaacttttgccgagtgggagcaggttcccaggctacgtggacagggaccggatgggaggggaagtcgatgcttggggtcggggctgaagggactgaggagctcccaaagtggtttttttgttgttggttgttgttgttggtggtggtggtggtggttgtcgttgttgttgtttgagacgatatctcgctatgttaccaagactggagggcagtggttattcgtagacgccctcaaagagcactgcaccctcccaaatcctgggctcgagcgatcctcccgccttcccgagaagctgggactacaggcagcgcgcctggcttgttcatgtaatttgaaaatagttcaaatagaatgtttaaatgattgtgtttaaaagtaccgaaattaaatttgcacccttaaagtatgtatttattatgttacttttaaactcaaatgtttaggagtttaactctgtctttttaaagataggaacatgagatttttcttcagcgtttcacaaatgccatttgcagacagccagatcaggttgccagtggtcgtgtatccttacgtgaaatagaacattagcaacatcacctccatgtgctgagtcagtttcctacctaataaactacaaaatctatactctgcatttcaaagccctccaaaagcaatccccagccaacattttgaacctgatttttcacaattccccttccgttcatctgtacctctcccaagacacttagttctctataccctgaattattattaatgatctggtatccctattagtctttatgtcccttgaaagaaaaaccacataccattcaactttggctatccacatgcacacactgtgccttgtgccttttgttttgttttgttttgttttgagacggagtctcctctgtcgcccaggctggagtgcagtggcgcgatctctgctcactgcaagctctacctccctggttcacgccattctcctgcttcagcctaccgagtagctgggactacaggcatcggccaccacgcccggctaattttttgtatttttagtagagacggggtgtcaccgtgttagccaggatggtctcaatctcctgacctcgtgatcctcccgcctcggcctcccaaagtgctgggattacaggcgtgagccaccgcgcccggcctgccttgtgcccatttttatgtttgtttaaattatactttctctctctctcattctgctaccgaggctggactgcagtggcacgctcacggctcactgcaacctcagcctccagttaaagtaggtaattagacatgagcagggcaggagaccccctcgccctcaggaatgccaggctcaagcaatcctcccacctcagcctcacgagtagttgagactacaggcttgtgccaccatgcatggctaattttttttttttttttttcccgatacggagtcttgctctgtcgcccagtctggagtacagtcgctcgatttcggctcactacaatctctacctcccgggttcaagcaattctcctgcctcagcctcccgagtagctggaactacaggcacgcaccaccacgcccggctaatttttgtattgtttgtagagatggggtttcaccatgttggcccggctggtcttgaactggttgaactcctgacctcaggtgacccgcccatctccgcctccaaaagtgctgggattacaggcctgagccactgtgcctggatgcatggctaatttttttattttttgtagacacgaggtcttgcgatgttgtccaggctggtctcgaactcctggactcaagtgatcctcctgcctcagcctcccaaattgctacgattaaaggcatgggccactgcatgcagcctcatgcctggtttttgttttctc

SEQ ID NO: 915863 - DNA, 4001 bp, Homo sapiens
atcccagcactttgggaggccgaggcgggcggatcacgaggtcaggagatcgagaccatcgtgaaaccctgtctctactaaaaatacaaaaaaattagctgggtgcggtggcgggcgcctgtagtcccagctactcgggaggctgaggcaggataatggcgtgaacccagaaggcgaagcttgcagtgagccaagatcgtgcagagcgagactccgtctcaaaaaaaaaaaaaaaaaaaaaaaaagaccagactggtcaatatagtgaaactctgtttctactaaaataacaaaaattagctgggcgtgtggcgctcgcctgtaatcccagctacttggttggctgaggcaggaggatcgcttgaacccaggaagcggaggctgcagtgagccaagactgcgccactcaactccagcatgggcgacagagcgaggctgtctcaaaaaaataaaaataaataaacaaataaaaacaaataacagaatagccagggaggctagagagcagtgaacagagtaatgagatgaagtcgcagagagtggagggcagatatttgccttcagaggccatgggaaagaattttcataagtgcaataaaggatttttttttttttttgagacggagtctcgctctgtcgtccaggctggagtgcagtggtgctacttcggctcactgcaagctccgcctcccgggttcacgttattcttctgcctcagcctcccgagtagctgggactacaggcgcccgccaccacgcctggctaaatttttttggtattttttaagcagagacggggttacactgtgttagccaggatgatctcgatctcctgacctcgtgatccgcccgcctcggcctcccaaagtgctgggattacaggcatgagccactacgcccggccaataaaggatattaagcaggagagggacatgcactcaaggatggaatcagctcagtgcttcaaggaaacatgaaaggcgccacgcccacccattaatggagtctcccgtttcctttttttgagacaggcagtcgttctgtcgcccacggtaaaggacaatgatgcgatcacggctcactgcagcctcgacctcctgggttcaagcgatcctcctgcctcagcctcccgagtagctgggaccgcaggcacgcaccatcacgcccggctaattgtttaatttttacttttcgtagaggcagggtctccctatgttgcccaggttggtcttgaactcctgggctcaagcgatcctcccgcctcggcctcccaaagggctcgtattagaggcgtgagccaccgcgcccggccccgttttcaggggtttcccaaggccagaaagtggaccctcctgatacacttaacggggggaccaatctcagatgcgggggctagcgcataaaaaccaggaggctgggtccctgagctgcagcgagagaaaaaaacgttcttctggaaggagccgagagggaaggattcagcctagcgatgtgacagtcgcgctgccccgcgacaggtgcctcaggaaaccctcgcctgggtcgtcctcagagcctctgccttctatgtctccaagccgccgctcgccacatccccgcgggacttgacgccggcacccagtgaacccaacttgcgctccgaagtctgctccgctccaggacgccctcgcagaccccggagcctccgctggcgccggcggccgctccttcccgcctgttcccacgtgccctgagcccccgctcccagaccgccgccgctttctcctcagccccaggcagctacccgcctcaactcacgggttgttattactcattgtaagtaacaagctgctgaggagccgcacgttggagtgcagccccgcggccgccatgtcccgcacgtggtctatcacattcatcctgctctgcaaagccgcgggcagcggcggcagcactgactcgaaaagccggtagaggatccttagggaagactccaaaatggcggcgtcgccggggtccatcgggtccacacgcggcaccacccccaagcaagaggtaactactgaagtgcccgaataaaaagaaactcgagtccctgctcctgtcgtggtccttttcaggtgaaatgagttgttatttttacgcaaaaatcacgttatcatcctaaactgcaaactttactgaggatttacaatgagacaaaaggcaccttataagactactcggtcaatttgaatgagtctgagaggaatttgtgcctctcagaaattaaaatgtgtgggtatttaccgaaataaaatacagtaaggtgaggaaaaacgctccaactggaattaaatattctaatcgggcgccagggacagacctaacggcctttacagtggcgcatgcgcaccaggctagggccgccgcgcccctcctcaggtgttttgtgttcctgccaagtcaggcttcggccctgggggaactccttggttcgaggggtatatttccccatgtaaaattattccctagatccgtggaaataaaggctggatccaggaattagctgatacccatataaaccagtatgtgtctggcacacttaacgttttaggaaagttttacacaagttattgggacgctcacaacaatccataaagttgaagttgtcattcccttcccacaagggaagaaactgcctgcttaaattttgtgctcaggttgttaaatggttgacttggaatcagatcgactggttaattatgttggatcgcaaactcaaatgtatacagggaccagggaggtaactgagccaatgaggcagtttaggtcgttgagtcagagtccgaatattctccacagtcatcctctcagatctagcctatcgctcctttcttaaaggagacagtcgttttggtctagattttgttttcatttgatttttacagtagtagatgcaaaaaaaatgctctgaaaaaatcacagtgtatcttcatcagcaactttttcagctcttaacattttgtcacagttgaagctcctgtagatccttttcccatctcatcccctactctagtttcctggatgtgtgagaccttctatttgattttggtgggcatcatcactgtgaacttttcttttttctttttttcgagacggagttttgctcttgtcgcccaggctggagtgcaaaatctcagctcactgcaacctctgtcacccgggttcaaggaattctccctgcctcagcttcccgagtagctgggattacaggcgcctgccaccactgtcatgtgcgtccgtgtgaagagaccaccaaacaggctttgtgtgagcaacaaggctgtttgtttcacctgggtgcaggcaggatggtagcagcacgagccataggcaaaactcctcagacaccaagttaaagaaggaaggagtatattcggctgggagcatcagcaaggctcctgtctcaagagccgagctccccgagtgagcaattcctgtcccttttaagggctcacaattctaagggggtccgcgtgagagagtcgtgatcgattgagtaagcagggggtacatgacatgcaccggtggtcagagtgaaacagaccgggaagtttcacaatgtctttctataatctgtagataacatcagttgctaggtcaggggtcagttaaggcaggaaccggcccttttcacttcttttgtgattcttcagttacttcaggccatctggatgtacacatgcaggcttgggttcagaggcctgacattcctgtcttcttacgttaacaagaagaataaaacgaaatagtcgtaaagtgttgcggcagcgaaaatttttgggggtggtatggagagataatgggcgatgtttttcagggctgcttcaagtgggattgggggtggtgtgtgggaacctagagtgggagagattaagctgaaagaagattttgtggtaagggacaatattgtggggttgttaaaaggagcatttgtcgtatagaatgattggtgatggcctggatgcagttttgtatgaa

SEQ ID NO: 915864 - DNA, 4001 bp, Homo sapiens
atcttgcctgtcacagatcaccactcaatagggatttgccaaatgagtagttttaactcagattaccaaactagttagagcttagtaatgtgagagcggagtaaggttacataaaacctgcctcccaggtttttccaaggcctgggggtgggcctctggccagtgggttcctactaactcctgggtactgctgcagtgccggagatgggtggaggctgcctaaagaagttgctacctctctctgtaccctacccctgtagcccaggcctacctccaggaggcggcaagccgcctgctgctgctcctgctggtccaggacacgggcgcacgccagggccacatctgcgttgtccaggagatgcaggcggagctggctgtccagaatggctgtgaccaaaggctgcagttgggcaaggtcatcctggaagtcccggcacagtctgcccgcaagggtcaccagctccgccgggggtgcacaggtgtcctcatgctccttcagcagagtcaggaagctctgcatcctgtgctgggtcgtggccactctgccaacacaaacagtcacaagaatggccaccactgaccacgtcctttctgtcagtcaatcgcccaacccactctgcaaagcaggtgatgcacggctcttgtgccgtggacacttgtagagtaggaataagacctcacacatcccgagagagggcagcaccatagcatacaccctctagaatttccttctaatcccccaaatactttagtccttaacgaacacggctgtgcaccaagcactgggctgggtactgtctgcaacagctcctccactgctctgggctcagtagggtagggaccttgtgtgcaggggtcaccagtggatgccaaggcctttcatctgaacccacatacatgcacttgttttaacagcagaaactgctcacgccaatacttaatccaaacaatgtcaaagacacactttgcaatcacacgcttggtcctgcatccacacaggaggaacctttacttgttctaacggtgcctcacctaaggacattcaggcagctgccagtgactgcttttcccaacagaaaaccctccccaatcgatcttacttctgcggaatacacttttattcacagaagtaggggcagggtagtaggtgttgccaaactgctttccaaaaggtttgtaaatcctcacagccgcgaagaaccaggtaggctgcgcgctccctggcgaggggttctttctgccgtgcgcccgccaaggggacgcgacctcgtctactccacccgttcccgggctctagcgccatctcacccgggtcctgactcggggctctgagtttccagctgccacagtgggcaggaggccctggacctggggtcccttgggggaacagagcctgcaggggccttggaggagggcagaggaggctcccaggcctgggtttcctgcaacgccgacccccaccggctctgggaggggcggggttcctgccacttcaggaaggaaaaaggttcctgtggggtaccttggcctgtccgcccggtgccctgaggggcacccggctccagctgaatggaggggaagggtcgcgggaggtggctctgcttggcttcctgactttggcgggacccccgcccatggcccccagcccccctacctttctggcacgctgctccctgcggaggccgaaattcctgcctggggctccagcctgggaggctccaccctcagccccaccccggcccccgcacccctcaccctccggggccccccttaccctcagggactcctgccctagcgcccctcaccttccgggaccccccgcctccgcgccccttatcctccaggaccccccccgcctgcgcgcccctcaccctctgggacccccgcccccgcgcccctcacattccaggccccccctgcccccgcgcgtccctcatcctcccggacccccctgcccgcgcgcccctcaccctccgggacccgcttcagcgccggcgcacgtgcttggcgcgcacccggggctggcgaggaggcgctgggcagcacagaaggtgcgggtgctacaaagtatccaggctcgcagccaatcccgcgaggccccgcccacaaggcgtcccgggggccggcgcccctcagcccccgatgcgaccgcggagtccgggggagctgaggggtccgtgggggatctggtgtccgtggcatctgcgggtccgaggagtcccggacgacctggggtttctggggtgtgcggtgcggggtcagaaaggcctggagctttgcgtcctcgagcgccggaaggagcaggctctgcggggcgcggggtgcggggttggtgggggagggcgccgcgacccccgccctgcagcggagccgagggagtcgtgacccacggctgaccccgcgccgcccgccctggctctggcgccggcgcaggcgcagctgagtcaaactggggtcgcggctcggtggggcgcagcgctttcctagcgcgggggaggagggcgcctctggaacgcagacccccaggggacgcgcctgggtccaagcggagttccgacttcagcctcggcggggggctccacccaggtgggccctgcgggtggctccctcaggggaagcctagggcagcctgaccacggctgacctccgtgaccaccggcgttccgggcaccacggggcgatcctggggtgggagtggggtcctcgcagacctggtcaaaaggtggctgggaaatgactgaacaccccaagtcctggcacgggtgcagtccagcctctgcccttgtggagtttatagtttttttgtgggtttgtggcttttttttttgtttttggtgttttatacagtgagctcggaagttacccggagaccttgaattgtttgtttagaggcagggtctcgctctgtggcccaggctggagtgcggcggcgcgatcagagctcactccagcctcaacctcttggggtcaagtgatcctcctgcctcagcctcccagaccacaggtgcgtgccaccgtgcccggccttgagttggttttcaaaggtagtgaaggtctaattggaaggaaaaaagtcaatacacgcataagacacaggataaacatttcagtgtttgttccagtgaagatgtgaaaacagcccaagcctctggtggaagatttgagaaataaaccacggttgagacaggggatgggttcctggcaggttattagtagtgatgctgaggtcgctggggcccagctgatgatcgcgatacattgtacagcagaaggctggcttctaagacagaggtaggagcccacatggaaagcagagataaaatgatgcatgccacatcctaaaccctggtgggtctggggtgattcaattaccactttgtttcagtatcttttgtaggcattttaattttcttctttttgcttatccacattttcttttctttttttttttttttttttttttttttttttgagatggagtctcactctctcgcccaggctggagtgcagtggcgcgatcttggctcactgcaagctccgcctcccgggttcacgccattgtcctccctcagcctcctgagtagctgggactacaggtgcccgccaccacgcccggctaatttttttgtatttttagtagagacggggtttcacaatgttagccaggatggtcttgatctcctgaccttctgatctgcccacctcggcctcccaaagtgctgggattacaggtgtgagctaccgagcctggccacttatccacattttctaatttttataaaataattttgtggttttctatttttaaatttctttttaagaagtggaaagaacaggacaacagggttgtggagaagcagtactgactgacggagtctattgggactggagccccctgttgggggtggagaacagactgcagctgtctgagatacagaacagaatagagcgatagtcctccctttacctcctgccatgtggactaaagattgctcgctacc

SEQ ID NO: 915865 - DNA, 4001 bp, Homo sapiens
tttgggaagctgaggcaggtggatcacctgaggtcaggaattcgagaccatcctggccaacatggtgaaaccccgtctctattaaaaatacaaaaattagccgggcgtggtggcaggcgcctgtaatcccagctactcgggaggctgatgcaggagaatcgcttgaacccgggaggcggagcttgcagtgagccgagatcgcgccactgcactccagcctgggccacagggcgagactacatttcaaaaaaaaaaaaaaaaaaaagtggtagggccgagacacaaactcacacaattggacaggaatccccactcaatcatcagaaagcacctctccgcagtgactaacagtctgacaatttagagtaaaaacaaactcagtttctcccactagtcttgcaacatgcttcggacaccaggtatgtggggattttctccccacaaatcacgcaggtcgtcagttctgcagtggacacaggctgggtgtcgtctgtcatcctaattcagtcatctattctgacagcgtcttcctggagataccagcagacccccacaggttaacggctcagccccgcaagactgccccccacttccagtgcccaggttgtttgacctgcgcttgggaccgacggggcgtaacccggtgacctcctcaggttgcggtaatttgctagagtggctcccgaactcacagacatgttttacttacacttaccagcagagtataaaggattacaaagaatacaggtgaagagatgcgtgacgtaaaaccggggggaagcgcttggaaattcagggcctctctgggcaccgcctccaggaacccccacgtactatctggaagctccctgaacccagcccttttgggtttttacaggaacttcatttcacaggcgtgattcatcagccactggtgatcaacgcaaccttcacccctctctcctccccagaggttgggggtggggctgaaagtccccagaacctctaaccctgccttggtctttcctgcgaccagccccatccagaagctccctaggggctgccggccaccagtccactcagcctacaaaagacatcactttggaggttcccgggatttcaagagttgtatgccaggaaaaggggatggagctgaaatacacagttcactgtatcagttacctcaaacttaaaacgaccaaaacccacctctgatctccacatcacccagacccgacagtctaccgcaaagcaataaatggccaccttctccctcttcctctggccccaaacccctgagttacatttgccttttccgtctctgccttatgttccatgaccagtaaccgcaatggcttcacgttccaaacacatccgggacccaggggtttcctccccgcgccgccctcctttgggccatccctccccaggtctcgagagaccgcagcaagagtctccgctaacgcctcgccgggcccccgccgccttccccggaggctgctccagggcccgggaaagctctcacccccgaacccggcgtggcccctccgcccccggcccgggaagccaagtccccgcaactgccctttccgcggccggaatggcctttcccgaccggccctggtttccccggccgcctcgcccaactgctgccggctccaggggcgcggccgggaccccaggcccgaggagggcgtcggggcggggaaggggccagggtgcggggacccagcgaccgcctgggccttacctgaggcgggggcggcggccgcgcttggcggaggaactggggtcccgctgcggcccagacctcccggccgcgggcccagccgccgcaccagccaccgcacagcgatcagcagcaccgaggcgcccagcagctcccaggccagcgccgcccactcggccgccgccagccgcggccacagcatcgccgccgcccgggccgcagccgccgagaagcccgcgccccgcgccgcgcccgtcccaggaccccgcgccgggctgcccgcgccctgcctgacggcgccgcgctcgaggcggccggggcggcgcgggggacacggacggcggccccgctcgcggaggcccggcgagggcgcggccccggccctgggacccaagcgggcgggaacgggcgagcggacgggcgggcgcggcaggcggggcgcgggcagcccgacgcggggtcctgggaccggcgaggcgcggggagcgcaatgtgctggcgggggccggggctggggcccggggaggccaccagggcggggccgggcgcggggcggcgcttcttcgcgcctcccggccccggcctggcgtccgtggggcgctgtgcgtctccgagaacgaagcggcctccgggttcgtgtgctccgagcccgagtactgtttgcggccgtcgtcccgtcctggagcaggagtgaggaagcgcctctcactcccccgcgaacccgcagaacaggccgccggcgctatggagaccggcggagcttcccgctccttcaccaaggggccctgacgcgcagttgaaagcgcggattttgccgggcgcggcggctgcgtccggagtcccagcgccttgggaggcgaggcgggaggatccccacggcccgggagctcgagaccagcccgggcaaatattttgaaagtcatggtaaaagccgcaattacttttgcaccaacctaatagtgagaccctgtctcgaaaaagggaaggaggattttactgtatgtaatttagatgttttatttattttttgatgcggtgtcttgctctgtcgcccaggctgaagtgcagtggcgcgatctcggctcactgcagcctccgcctcctgggctcaagcgattctcctgcctcagcctcccaagtagctgggattacaggtgcccaccaccacgcctggctaatttttgcatgtttagtagagacggggtttcctcatgttggccagactggtctcgaattcttgatgtcaagtgatccaccagcctcggcctcccaaagtgctgggattacaggcgtgagccaccgcgccccgcctaatttagatattattaaatgaaaatgaaagacctgaaaaatataattgatatccttggttaaaaacataattgatctgagcgaggtggctcaggtctgtagtctcagcaactctggagcgtgaggggtgatggtagtttcagtccgggagttcgaggctgccatgagcgtgatctcgcctgtgaatagccactgcacgccagcctgaccaacatagcaagaccccatctcttaaaaaatatcattggatggtactaatggttggttgggcactacagaagaaagggtcagtaattttgaagatggatgaaatggaaattcaaaccacgatgagatgctgcttgaaatccaccagaatggctaaaatttaaaaattggcaatatcaaattttgctggcaagagcaaacactgagttaaccaccttggaaaatagtgaggcagtttctttcaaagttaaacgtacacctctgctgtattctgagtgtctgtccccagcgttcgtatgttgaaaccctaaccccccttggccgggcgtggtggctcacgcctgtaatcccagcactttgggaggccgaggcgggcagatcacgaggtcaggagatcgagaccatcctggctaacacggtgaaacccagtctctactaaaaaatacaaaaaattagccgggcatgctggaaggcacctgtagtcccagctactcgggaggctgaggcaagagaatggtgtgaacccgggaggcggagcttgcagtgagccaagatcgcgccactgcactccagcctgggtgacagagcgagactctgtctcaaaaaaaaaaagaaaccctaacccccaaggtgatggtattaggatgtggggcttgtgggaggtgataggtcatgggacagagccttatatacttcccttagaagaggcccaagaaggctgggcacggtggctcacacctgtaatcccagcactttgggaggtcgagacaggagg

SEQ ID NO: 915866 - DNA, 4001 bp, Homo sapiens
gaaaagaaaagagggtaattttggacttcggtgagggctcaaccaccttaaatatggcaggttgcaagcacacagcttgcagcacccattcaccaaatggagtaatgctaaccttctcaatttttgtcaaccataagacaaacaatcctcctcttcctctacaatttcttgacaattatagcaccaattttgagccattcaaaaaccaggtctgtaagacactggataaaatgtatgaagtcaacaagaacaaccatactagatttcaggggtaatcacaaatcctcatcctaactgctaagtttgttagcttgaaacttgagggcaccaatacctcccagaattgttgggagactttaaaagcagagtttctcagccaggcgtggtggctcacacctgtaatcccagcactttgggaggctgaggcgggcggatcacctgaggtcgggagtttgagaccagcctgaccaacatggagaaaccccatctctactaaaaatacaaaattagccgggcgtggtggtgcatccctgtaatctcagttacttggggggctgaggcagaagaatcgcttgaacccaggaggcggaggttgcagtgagccgagatcgcaccattgcactccagcccgggcaacaagagcgaaactcagtctcaaaaaaaaaaaaaaaaaaagaaggaaagaaagaaaagcagagtttctcaaccaagacgctgtcggctttgggggccggagaagtcttagttgcggggggctgtcttggccattgtaggatgttgagcagcataaccggcctctacccactaccagaagcacccactccccactttcaacaaccaaaaatgtcccatacattgccaaatgtccccggggggtcgtgggtgcaaaatcacctccaactgagagcactactgctttaaagagatagcaataatgaaaagattaaagcatcaaagcactttagaacaggaagggattttaaggagcctgagaacccgtgattctcaaactttgctaggtatcagcctccctggggagtttgttaaaaatgcggcacctggacctcaccccagacctatcaatagagtcaagtgttgggttctgccccagcaccaacatcctcattctacagctaagttaacgtcggccagagagggaaaatgccttgcccaaggtcacagggcgagttagaacctggactccaaaaccaaccaagcccttccttacaacaaggagagtgtgctattcttacgtctttgaggcagcagaacctaaaaatggttaagacggtgcattccggagccagccggcccgagttaaaatcccgacttggcatttatcagcggggcggcctcgcacaaggcacgtagcgtctgaggacctgtttccttctctgtccagtggaaaagtaacagtacctacccaccagcgttattggaaaggtgaagagagaagatatttaaaaagcccgtcgcacggtaagcactcgatacgtgtcctattattaggactgtcccacacctgcaaagtggaaggggtctggggatcccggggacagagggctggaaatgggctcagggaggcgaaacgacccccgattccccgaagtccccaccgggagacggacccccgccccgcccctcacctggccctgcagctccttctcgagctgccggtagtcgtttttccagactaggaggtgcagggggtagtggtcgcccgcgtcgcaggccgaggacatggcgaggaggccgtaacctggtcctcgtcgcccgccccaagtctcggccccggcggggtctcccgcgcccgcctgcctgccctgaggccggcgagcaagcgagcgtagggcgtgttacgctgccggccggctgagccggtcgggtgcggggcgcgcgggaggtccggggtcgccggccggctcagggaccaggtcggccgcgcccaccccgcgccccgcggcgttcccgcccgcgctgacagctcgcggacagacttctgcggacctaactgccccaaacagggaagtgcggagagcgaaccaccgcatgccgcggcggggataggcgaccttgggcaccgggtccggggtccgcgccattgcacccacctccagctcacaccgagaaactcagtgcagcccacagaacagagctgaggctcattctcttggccaaagatctccacgcggaaagttccgtctacctgtccccagcttctttccccctgctccagtagccccatgtggttcggtccacaactgggcctcttccattggctctgaagtcagggggtgacaactgagccccggaccaaaccattccagctgccgacacccttgcagcctttttggagcaggacagatgcttccacgacgggtcaaaagccattttggaagtgggcaacaccggacaatttttgaaggaggaacgctaaaccctggcgaagtggcttcaaatacagtatttgcataaaaggggatatttctacttcatgatttctcaacctcggcacatattgaactgggcagtttttgtgtgggggttgtccggtccttgtaggatgctgagcagttgccctggtctttctccccactcaatgccagtagcactccccaaaacatgtctctccagatattgccaaatgtcgtctcggggagaaaaatcgtcctcagttgagaaccgcttctatttgaactccgaaccgggttatgattcaatagctaactatggtggtgatttagtccatgtatgaatgtcatttttaagctagctttttggatttgaggttatggctgaaaggactgataaataatatacatatttgaccacagtctgcgaatatgaagtttattctttgagtttcaggcactatgcctccttgactcaatgaagaaccaaatcaacttacagctagctactcatgggcttgaactttctgctgctgcttcagctcagctgtctacaactagaccacatagctggatgaagctatttaatgcattgtgaaaacattccctctgccctctgagtgtatgcacatccagctcttcagatgcctgcaacaacagctgttcaagaatcccaacctaatccattctccacagatgtggagcccagaagatttgtgagttgttaaaccaaaacaggatgcaggagcaccaggatggcacccggagactctaaccatggaatgcgtgggaattctgtgattatttctccatcacacatttatcacactgtagagatggactcaagaccagtgcttctgaggccttttccagcacttctcattctttcagatgccttttgcaacttaacgttctccttcttcttcatcatgccgtgtttattgaaaatctccctatctcattaatcagaaaaccccataatgacaggaaccacatcgttttgcttaccagagtatctaaaaccaaaatagtacctggctaacaacaggcattcaatatttgctgaatggagatcatagctgtgtttatatgtaagacagacaataagtagtcattggtattagggtcacatctcctttctccttcacactgatttacctcatttcattgtgtttatctcacaccattttgtaaattatcccatgttagctattgttattctcaaattccacgcatatgaagaaaaacagtaattagaaaataatagcaatatccataattatgggagctactatttactgaggggttactatccagcaggtgtatcacatttttcccataatttattccatctgtccttagccaaaatgaatgtttaactttgctggtcacatacaagttttgtcgcatattcttcttcctctttttctttatttccctctctctcttcttcattttcatctcgcaaccctttaaaaatgtaaaaatcattcttaagtagcaagccatacaaaaacaaatcgtggactagaagtaaacaatgcattatcttaattttgaacatgagattaaaactgaagcctaaggaat

SEQ ID NO: 915867 - DNA, 4001 bp, Homo sapiens
gggcccccaaacaactccatggacaatgtggacttcaccgcacctccccctgaacgaccccacagagccacaggcctcaacgacacttccctggatcccctggaagcctggcttgtcagagttggaggtagtcccagggaaagctaacaccctcacaatactggtgaggcccaaagagggaagccactcagctaggaacaggggctggttccagatgccagccttttttcgtgttagattttccagctgggctaggttcccctcccacactttccttcctgggacctccacacacaatgtctgagctatcaatagcaggacttggttgattgtacgaagcccaaatcatgtgcccccccctccaggaaggtgaactagattgatcccccatctccacctctctcctttctgcaaataatcacagctgacttagtgtctggtgggaaggcttggaggagggactggaggccacacaccccggtccaggccccgcacacctgccatgaggagggtggccacgcactcacagcggttccgcatggcagccttcattaacgccgtgagcccccgctggtcccggcgttccaggtccaggcccacatagtagttgagcaggagactcactagaggcacgtggcctgcagggcagcaagggtaagcttggtccccaggaaagggggtgatgaagctcccaaaccgccctccacccagcatgacagagtctggtgtagaacaccgtgcaacaagggtggggctgaggccctgtctgcatcaaaagggggctgtcggaagtggggtgcagcagcctcacacctgcttgggcagccaacatgagggccgtgtcccctcctttgtcctgctggttcacatcaaggaaaggacagtggctgagcagggccacaacactctggaagccgtggtagcatgcgaccatgaggcctgtctgagggaggggcagctcagatcccctgctttccccctgggccactccagggccccttgcaccctctaaacccatatctgtcccagagcctgccccaaaccccgtgaagacccgcccttaaccattcccttcctccttaggactgcaggaggtattgcccctgaacccctctcagggagccaggccaggacggtgtggtggggatgcaaagatgcccccagctgttctgggaagccaggacatctcaccctcccattgctgtccacctgggtggcctcctctggggagaccccaccatccagtatggcttggagctgggtgggatcattgtggacacaggcccaatacagggcccccagcctgcagcctggggtgggggtctccttgcccgggcagggcagtgcctcagacatgtccagccgtctcctgtgcaatgccagctcttcctcttccaggcagggaaccagaaggtgagtcccttttctcatgcagctggcatctaaaacacagaatggagaggagtagtgagtgtctccctggatcctagggaggggacccagcagctgcgaagtgcacagcccttgccccagggaaaacatttatcccagcaggggtctcgccccatccaccctgagaaaggacaagcgctgggtcaggagccctaagcaagcagggttcactctaggtcagcaccccagtgagactcacggagagagggtcgtcgttttttcttacttggggttcgtagggtatctatgaggcagtcaacgcggggcacagcccaggctccgcggagcacaatcactgggtctccgaatgcctccaggtggactatccctccccaggaagcaacgcaggtaacagatggctggactttcataaagagctgctgcaaacacctcggggctgagccggatcaagcagctgggactggggccccatgcggggcgggtggtcacgtctcaggagcggactcagaccagccccaagatcctccgggtgggcggggcctgagccgggcagctcctccccgccggggcgggctcacaaagacgactcctcctgacggacgcgcccactctcagccttggggacgccggcggagatgctgcctcgtggggtcttggcccaactttttaggcccagcctaaagcccctcctaattgggtggagcgcgacttgctgaaggggtggttgcgggagagggggtgagtgaatgcaggtatctcattaaatagggttggtactctcagaatgaccctggggtggggtctccaggggggtcacctgaacttattttttgaggttctggggaaataaaaacataattgtcaaattatgagtatagagctgggcccggtggctcacgtctgttatcccagcgactcaggaggctgaggtgggaggatcgcttgagcccgggaggtcgaggctgcaatgaaccgatgtcgcgccactgaactctagcctgggcaacagagggagacctccttttaaaaaaaaattgtggccaggcggggtggctcacgcctgtaatcccagcactttgagattccaagacgggtggattatctgaggtcaggagttcaagaacagcctggctaacatggcaaaaccctgtctctactaaaaatacaaaaattagctgggcttggtggtgggcgcctgtaatcccagctactcaggaggctgaggcaggagaatcacttgaacccgggaggcagaggttgcagtaagccgggatcgcaccattgctctccagcctaggcaacaagagcgaaactccttctcaaaaaacaaaacaaacaaacaaacgaaattgtgagtaccgacattatgtgtctagtgcaggtgggcagtcggggcacaaagtgcggcaggcagtagtgagggagggattggccagaaattatgatgtatgaaatttaatagattagtttcagtgtgataaattaaatatgaaatatttaaattaaatgatctgttaatataatgataaattgttatcaaaatattctttaatatttatattacatattaagcttgatggattggtcttggtccacagatgtagaaaatggagccaatgatattcccccattggtatcactcccatcatcagactgtacaagacctctctcttgttttgttttactttctttagtttctctctttcacccttaatccccacatcccattctcctccaccctttaccaactggcacttgtatatccttgaaaatgtacatttcattgaaaaagatagtactgatttgtgtgtttttattttatttttttctttttagaaacagggtcttactctgtcacctgggctggagtggagtggcatgatcatagcttactgcagcctcaaactcctgggcttaagtgattctcccacctcagcctcccgagaagctacgagcttctcggaggcacacaggtgtgtgccaccgcgcctgtctaacttttttatgtagagatggggatctcactttgttgcccaggctggtctcaaactcctggcatcaagtgatcctcctgtcttggcatcccacagtgctgggattgcaggcatgagcctccatgctctgcttgtatgtgtttttaactaacatgttatgaattgtgctatagaacttattctgttagttttttctttttcacttaagctccatccttattgctttaggtgcagtgtatcagttggatgtgcatttggtttttagtaaccaaaaagctgaatggtatgttgtccataatagacgggctcctcaacattaatctaaaactgctttcagtgtttcttctgcgctgcagaagttggaaagctaaaacaacccttcccagattcccttgagctatgactctgtggtttgcgtcctgctcttgtgcaagatataaatttggaacagagctacgtagcatgggacatccgttttgctgtcacaggtcatggcagcagcagcaaggctctggtgagcagcttcctgattcatcagcttcctgtagtagtgactgttgttttctcaatcacaggcagaggtcatgtgactct

SEQ ID NO: 915868 - DNA, 4001 bp, Homo sapiens
cctgaacaccctctttagccttctcataggcaccaaaattattttcagtatctcagtaagcaaacagatactggttcgtttgcaaaacccgagctaaaatgcccctcctaaccaccacccacctcattcccactggcctcggcccctccccctggtggctggagccagggaagtgatgaactgaggaggaggtccccctttccctgtcttcagggctgatgggaataggataaaggacccaactgatgaaatatgtttggcccctgtgctgtcaactttcaagctgcttgagggccaaggatgcaacagattactatacccatcctccatcacaaggaaaagaaatctcagtgcccagagggggatcagactcaaggtggccccccagggagggatgagtcactcaggcctggcagcagggcccccgcagtctgccagcccagtgttaagctcttcctgagtcacatcagctggcagcactcaacccccttactggccagttctaggggtaggaggaaggggccaagatttgatctcctcactacctggggtagaacagcttgtagggctgaggactgaggctccttaacccttaacccccacctttaagcaacttatcctttttgaaagggtaatagaaggtgggggtgcatacctcgtttcgggaggcagcagcacgatgaagaggggtcagccacagtgtgtccttagcattgacattagcacctgtggggatataatttcctattttgatggaaggtggggaggaggtatgaaggaagccagtaatcaggccaggaaatctgaatggagctggagcctcgcctggaccaagccggggagagcaatccttgaatatcaaaaaagactcctcccctcccttcgctccctatgtgccacaccttccagctccccactttcacctgacatcagtagcaactggaggatggggacatcgcctacgtaggcagcagcatgcaatggagttcgcctctcttggtcctgggaaggcaaaaaagagcagggagtatgggcgcggggtaagggggctatcaaggaccccagcccaagtctcagagctccaggcccttccccacaacctcttcccatagtttctgcagcgtcctaagtcccggtattgggagtcaaaggcaagcacctagggagggtggagtcagggccaatgggctgagaagccggctcctttttccaggaggggtgggggcgctgcagactccggaggttgagaagagaacaacgttcctgggcattcccagcccaagtgatctgggcttcaagcctgacctgctctccatccccaaatgcagagtaggctttcactccaggatggaaagaactgcggcctcatctgagcagaggagacacggagccgccccaccggtggggaggggtccagaacacgggagccaggattccggtctcgccatcctccctgctcccaactcaccagcacattgatgttctccttctgcgagagtagggaacgcacttcctccacatctcggctaaagatggcctggaccaggggcggctgcagagagaaccggcattctgagagcgggctggagccggagcggaaccggtgtgggggtgggggtgggggagcacctaggtttgagtggggggcgtccgtggaggggctccactctagggattctggctggagcgagctcccgcggtgcctccgccggttgccaggtccccaaggacaccggctcggttgaggggagcgcggcatggggcggggcgggagctgcgggagccccgggctcaggcccagcctaggccgcacatccccgggctcgcgtgacggcagcgccgagccctggaaggaggaagcgggaaagggcaggagggctgacctggtccgtgatgctgaggatccccatggctcggcccgggctccgtccgcatcgagctcccggcggcggcggcggcggctccaccggggacacggagcggcccaggcggcggctgcggtggcggctgcagggagagcgcggccccgcctaccggggggcgggcgagttggaggccgcagcgctccctggcggccgtcctggtcccggcgctccccgcgcaaacggaccccggccgcagcgccctccgccccaccctggcggccccagcagcccctgcacccccgaactcgcgcgccggctccccggctcacgcagctggccgcgctgtgctctccgctccagtctggcggcccaaggggttccccacaagaccctagcggaaacctgggccttagtcccgcggtgcttcccaaactgaggaccgaacggctggccagatcttacccagcccacaatgctcccgcccgagctaactcctcccgtcagcgattccacaccccgaaatcccccacagactaggaggaactggcgggtggagaactgggaattatgtatggcaatagccccagagggagggaaagcgtgtatctccactggcggaggcgtgagttcggtagagaagaaatagcaaaagtgctcaaactgcagagaaaccccaaggaggattctactgcagaaaacacccacaaagaggccatgacaactggcagctggaaaaggccgccaagaccaacagaaggggcattttccaactccttactgattccattgcaaggttaaagtggaaaacactcaacaatttctccccagaacagcctgtggcgcttcccctcctccaatggagaggccagagagccgtcaattagagaagaaatgaatggaggtcatctcaacccagaaacggaaaaaggaggaagacgaaaagtggagattgaaaaattgatacaatttataaaaggtgatccagggtcctgttcagagtttcacaactcaatacacattgaagagaacacgaaatggacgaagtgcagcatgctggcgtcctgtcaaggctttatatataaaaatcctcccttgaggggagaggaaaaaaattaaaaaataaaaatacattttattttattttttgagatggagtttcactctcgtcccccaggctggagtgcagtggcacgatctcggctcactgcaacctccgcctcccgggttcagtgattatcctgtctcagactaccaagtagctgagactacaggcgcccgccaccctgcccggctaattttttattttagtagagacgggggtttcaccatgttggtcaggctggtctcgaactcctgacctcaggtgatccacctgccacggcatcccaaagagctgggattaccggcgtgagccaccgcacccggcgaaaatacatttcaaaaaagccttcccggccgggcgcggtggctcacgcctgtaatcccagcactttgggagtccgaggcgggtggatcacgaggtcaggagatcgagaccatcctggctaacacagcgaaaccccgtctctactaaaatacaaaaatcagccgggcagggtggcgggcgcctgtagtcccagctgcttgggaggctgaggcaggagaatggcgtgaacccgggaggtggagcttgcagtgagccgagattgcgccactgcactccagcctgggcgacagagcgagactccgtctcaaaaaaaaaaaaaaaaaaaaaaaaaaaaagccttcccattcccaacatggtgaaaccccatctctaccaaaaatataaaaaagtagcctggtgtggtggtgcacgcctgtaatcccagctactggagaggctgaggcaggagaatcacttgaaccaaggaggcggaggttgcagtgagccgagatggagccactgctctccagcctgggtgacagagccagactccatgtcaaaaaaaaaaaaaaaaaaaaaaagccttcccttgctttcctgctagaaagatacttaagacactagtaacagtccttttttcccagaaagaaaaactggggtacaggaaataaggaatgagagagaaatttacctatcactatataccttttggaattttttaaatttttacc

SEQ ID NO: 915869 - DNA, 4001 bp, Homo sapiens
aaaaaatattgcttctactcaaggtgccaaactgcaccaagcaaagtaactccaatgcagtaacattaagtttggcaactgcaggacaaggtttccatccttgaacaaggagcactgatacttcactattttgccccccaacatcatatttccccctgcattctgaaggtttttttaaaaaatatttgtaacaatgtttttgtatgacactggcatcaagtctcccaggcagcatgcatctgttttaatttcatttgtattcgttactcctttcttctctatctgagtccaagagaatcactgctaacacacccagcactactcaggatagacaacgacagaatgaaacacttctgaggaagcctttccggtggcataatgccagcactactcattatagcctattttatcacagagccgtcaacattacggactcgaataacccagataccagcggcatccccttgcacgagctcatctgcggagtacaaggaatacagatttggaagaaacctctgagaggttttctaatctttcctctcttccttctgacttctaactttaacgtgagcccaccccaaagaagagaactagactctcttagtaacttgtgcaaaccttcagaaaagtcttaggttgtacctaaattcctcatgttgccattccaacactatttcctgtagttttccctttccagatgcaggagtccacagagcaagtatccttataagtgtctaagaatcatcaagcaattccaaagttcccgtgtctctaatctactgatccaacgtgcccggcgcacataagcagcaccgcgactgaatttcaagtcttctcaaactcacacctcagttgctcagagaggagaaatgcagcgaggactcgccttcctggccagtctctgaaaacgcgaaaccttcctgagctgtccatttgttttaggggctgtttataaacggctggttttcttggaggaaaaataaacaaataaatacggggcgatggcagcatcctgataaacacaggaccttgtttggcttttggcaagttgtaacctggagtaaaatcacatccaagttacaagcacgcaaattggaatttcgctggaaacactgacccgaccttcaccgaagcagcaaatcgcagtctctgctgctctgctcctgctctccaaggcttaacattggaaagtccatgcccacgtccccctctaattaatcaatgtagaaagaaatacgagggaagagagagggagcacactccacaccaaccttgccagcttctattcttcctgctattccttaaaggcgatgcacagcgcacctggaaattacgtggacttggcatggctttttaatattaaagacaaacgacctttggaaaatatacactgttaaagtcaaaccatttggagagacacccagcaatttacctcctcaaactcctcggaaccccaagaatgaggaaaggaaatggaaaatgcgcttaacccgggggtggtgggggaatcgataaccagaacaggtttgaaaaaaaaagcccccctcccgccccctccgtagagaccgctagctgaggctgcaacacctgccccggcaaagcgtctccgcagccttcccggcttgcccgactcggcttcctccgcctctgccccggctgcggcaccacttcttggagccacgtctcggcgagcgggggccgcggagcgagggggccgctgtgccgctactcacccgagccgctcgggctggccgcgagccgggatccgcgagggctggcgggctctggcccccgaggacgcagacatgtggcttgaacctccgctcccctagccgttgcctctgtgcatctttctgggcgcccccagcgaatgcgagcggcgaggcgagggcgagcgcgccgaggaagggcgggagaggcgcggagcttggccgcgccgcgctgcgccgagcgccgggctctccccgcgagctccccgggcccgcgcgcgcgccccccactgcccccgccccccgcgcggcgcgtgccccccaccccccgccgcgcgccctcgcacccgcccggctccacgcggcgcgcgcctgccctggcggcagcggcggcggcggcggcgcgtcctcccccgaacgccgtctccagggctgctggctgcgctctccattgttccgcggctgctgcccggggtgggcggcgaggcgggggggaggtgtcggcttggccgccggggagggcttaccgctcgggcggaccctcactgcgagagcgatgcgggcccaggcgcggcgcgcgggggctgcagggcgcctagcactgggggttgccggcgcgcgggggcctcctcctggctcccaggcactcgctgctgctgggcgcccctcgcatcctcggttactatggatatctcgctcctccgccgccccctccgcgcactccgggaggccgccggggcggtagcagcggcgcggctccgcgggtgcccaggtgaccggctcggcagcggcagagcagtggcagcagccgccactgccgctgttactgcggtcgccgccgctggagagaggaggacgaggagggcaaggggcagaagcaggtcctgctctgtctgccccagaggccacctcgggtttcttctcactaaccaagcgacttcgtgtttacctcgcaggagacgcctcggcagtcctcaacttgtgtgcgccggtggccctctcctgtgggacttgcgttccagctgttctcagagcgggtatgatcggcctccagtagacttggagggtcacgggtgagattttgataaggttcaaatactcctcactcctgcctccggtttccaccaaagttaccattgtactactaccaacagttgtggaaatttactttggcaaaggttttgtgtttttgtttgtttgtttttccccccaaaaattatgccaattaaatccgaccttaaatgacaaggcttttctctcatgtttaaaatcccatttttttccccttgccataaataaataaaaataacttgtggcttacaggctgcttaataccacaacattttaatgagcatgtcaggtaacccacaggcttcagttctttgttgcttacaagttccatccgtaagtgtgagttgctcacttagtctggggtaacaaccgcagattcccacagagaagaatcagtgtcttaaaacaaggtaataccaacccaatggtctatgaataggttggaatggcggtactttaagtaaaagtataaagaaatggttaacattatgaggaacttccagcagtactaataatcaaccctgttgttcaggagacattcacttgctaaactttaaggctaggcatttactgccttgaaagcaaagcaaatgaagattttgaccaactgcaacattcaggctctaaaatagaaatatgaatgaattattaaataataggtaacatttactgagcacttacgattttccaggcatctgtgcattatctcatttaattcttacaactctatgaaggtttcattatattatcctcactttacagattaaaaaaaaggcttagatctgcaactggtagttttggaagaacattcttttccttaaacaggaaactctaaatgccctctgttttgtccacctttgtgccactgtctgcttctgtgagggtcaggataatagtatacctgaaaccgcccttttagcaagcggcagggccaggacataagctcagactagatgtctaattcacttgctatacatgtaacatgtaaaataaaaaagacctgcatcttgactggtgtactctttgataaatgggacctgattacttgatggaggcatgtttgactatctttgtttatgacattagcaaactttcaatgggtttggaagtgaggctatttagttctgtgtcttactctgcaatccagacacctgtgacttgaggtaaagtaagtgttttcttggtttcccaatcatgagagtgaccgaagaatgacatttt

SEQ ID NO: 915870 - DNA, 4001 bp, Homo sapiens
ttagtgtcctaagtctgtcctaaatctgcccagtgttctaagactttcatagcaattgaagaactttcacttttttccatttcaatacccaaatatcttgtctatataaccagtgacagtacttgataaacacaagaaaaataacagtagctgcatatatcagtataaaaaaaccaacaaatcactcataaagcattctgtgcatgcaattacttagagctcatatatcttactatatttatgtcttttttatttttaaaaactcttgggcatacatacttttggagaaggagcagaagttgaataatgttaataatcttcaaatctataatattcaagtcaacctcagagaaaaataatctaagatagaaattaaaaaatctaatcagctgtcactattgtgttatcatttctggtactagtaagctgcaggtgtcagccctattactgtatttaggcagggctattacttatttccacaagtcatttgtgtgttacatgcctgtgttatgtaggtctctctaaacttagggatcagtgatatgtgtgatgggtacttaaaagcaaggaaaggtaatagagctgtgacgtagcttaacaaggggaactgatgagcactgggggaggtatgggaatgattagaaagctgaattgtcggtttgcacagttccccatcctccttcctcacctatatgcaaaacggtggaaagttagcacatgccaggtttagattgcatgtagaccagaattcagaagtacatgactatacttactccaccaacctttctttctaaatattgacagctaaatgaccaaagtgtttattttccacctaaagtaataaacaatacttcatcgctcttcaatcagcaagtggaagtaaacgctctccataattgaccatctgaagcagtttgctaatgaactgaaggttgtccacatgatttaaactgcttattgaacaattatcaggaaaagaaatgatcttcacaccataaacacaacaaattgtctcattaaccactaaatgctgatgctcaagtgaaataatataagaatcaagaattagctgaagagtgatataatccgagtattctaagattacaaatttatttaaaaaatcataccaagaatgacagggagaatatcaatattaatcttctttcactgcctataaatagcactctcaccagttcattcatataacacatatgtatatggatacatacagatctcattttttagcaagagtctatatgtacacagcaagttcagtcctaagggcatccaattttccaatgcagttacatatataaatctgaccagttttggtgcaaatcaggctgcctctgagccatgtaagacacataagaagcaaagacagacaaaaggcagctccgtggacacagagagcttcttaccataaactgcacattgtcaaatccattagccatcaggtggttctcgtactgaggtagcccaatgctttccaaccattgtcccactgtttggacagggcatctgggtcctgtaagaggatgaagagggaagcgtttaagcagggagtagccgtccacggggtaatagcggtagtcctgggctgagaggtggcattgccacatcatgcccctgggaaagttgctatcaaaggagcccgccagcttgacagattaatgttctcagcgagagagcaaagtcagaagtaaaacatagtttgccaggcaggctgtggagtatgacttgatcctagctccacatttcttacatattaatctttactaccgaccagtacgtcatacagcccccaaaaccaggcagcagaagaaggcatatcaagctgtcagcttgggctggtctgcgttctatgtgattgttggagtactccacaatgagcaatgcacggccggcagccagaattcttttttatcaagtactcctacactcatcagtatgcagctccatgctccttgctccccctcgctcgctccccttcattacccagcccaggctacacctcgcattttcaataatagccatcagataaggcagattttttttgtctgcaagctgtaagcctgctgctgctgcttcctcctacacacccatccaagcgtcaatcttgaatgatgagagcagtcaaaacaaatgcagaaaatagcaagattcaaaagcaaaccaaagtgcttaaatctgaattgaatcttcatactggttatacgttacagagctatttgttgtggaattttacgtttcaaaagacaccaggaaatgcgaagcttgaactatagcttataacagagctcacgacaggttccctttctccttttcctttctttcctgtcttttcttcttcctttttaaatggagcacagataaacgtttctgatctgaagctttgcagtgtttggagaataattattctgtttctttaccatgctatagcaaaataagcctctccgagatatatatttttttcttttttgaaatactgcaaaatacagaaactgcatcgcaatcttgaagtcaagataatttatttcttgtttgcatggtttcttccaaacaaaagtattattaggcacaagaaatcctttttcccctctgatatttataacccaatctaccagggttaccattctaaattagctataaaggtaacattaactggatagattttttttttaataaagaagatgagccctaacccaaaataattcaagaataacagatgtaaatgtgtgagttttactgaatggcagatagactgagtaatttatttaataattgggagaaaccagggattaagaatagaacccacaggactagatcatcagaagaaacagactcttaagattgggagagaacttgcagaaaggttagtctaaccttcttcctaacgtaggcatccctggctaaaatgttcctagaggaatatcttccaacttctacttgaatactgcctgtaacagagctcttactacttctcacgaagcctcaatttattagaaagatatttcacttcctaccttgcttctactcactgctccagctctgccttcggagaagcacagattgagaacagtgcctcttccacataaagagctttaaaatttaaagataactctctcatccccccagagcagccgcctggcacatagtaagtgcctaatacaaatttattgaataaatgaaacatcgcttttcttttttcctcaaacctcatctttctctgtttcctttctctttttaagggcattgtcaactttcctggcacacagacattaaacctcaaaacatcttctactcctctttcactactgaaatcagtccccaaattctatcatccctcttcccagtgtgatccattcccttgattctatttcctgttttaagtttacagaactgccacctacattgattttgttctcatagttcaggcccacctagcctagtgaaacaacgacttctatattgatctttctacctctaatatttaaaaaatcaattttatgcatggtgtcagaataatccctttaagacacagttttgattactactccctgtctcaaaacccttctgtggttttctgttgtcttcaaaatcaactcccaactcctctgatgacattttggggtcttcatgattgactgcagttcatctaactttatttccacttttccactgccccagacaggcaggattacttgctggtctctaaaggcagcccataatgggctttggttggttttattatgtccccacatttctgtccatttgttggctttgaatcagttgctatttccattatgaaacctcttctaatcttctctaccacgaataaatctctttcttctctgtcttaaatggcatttttagaccctctattgtaacagatattttctgccttcaattttagttgtttgtgtctgacttattttttgaaagcaggcaatatgctttgctaatatttcacatagtaaagattcagtacatacctgcta

SEQ ID NO: 915871 - DNA, 4001 bp, Homo sapiens
tatatcttactatatttatgtcttttttatttttaaaaactcttgggcatacatacttttggagaaggagcagaagttgaataatgttaataatcttcaaatctataatattcaagtcaacctcagagaaaaataatctaagatagaaattaaaaaatctaatcagctgtcactattgtgttatcatttctggtactagtaagctgcaggtgtcagccctattactgtatttaggcagggctattacttatttccacaagtcatttgtgtgttacatgcctgtgttatgtaggtctctctaaacttagggatcagtgatatgtgtgatgggtacttaaaagcaaggaaaggtaatagagctgtgacgtagcttaacaaggggaactgatgagcactgggggaggtatgggaatgattagaaagctgaattgtcggtttgcacagttccccatcctccttcctcacctatatgcaaaacggtggaaagttagcacatgccaggtttagattgcatgtagaccagaattcagaagtacatgactatacttactccaccaacctttctttctaaatattgacagctaaatgaccaaagtgtttattttccacctaaagtaataaacaatacttcatcgctcttcaatcagcaagtggaagtaaacgctctccataattgaccatctgaagcagtttgctaatgaactgaaggttgtccacatgatttaaactgcttattgaacaattatcaggaaaagaaatgatcttcacaccataaacacaacaaattgtctcattaaccactaaatgctgatgctcaagtgaaataatataagaatcaagaattagctgaagagtgatataatccgagtattctaagattacaaatttatttaaaaaatcataccaagaatgacagggagaatatcaatattaatcttctttcactgcctataaatagcactctcaccagttcattcatataacacatatgtatatggatacatacagatctcattttttagcaagagtctatatgtacacagcaagttcagtcctaagggcatccaattttccaatgcagttacatatataaatctgaccagttttggtgcaaatcaggctgcctctgagccatgtaagacacataagaagcaaagacagacaaaaggcagctccgtggacacagagagcttcttaccataaactgcacattgtcaaatccattagccatcaggtggttctcgtactgaggtagcccaatgctttccaaccattgtcccactgtttggacagggcatctgggtcctgtaagaggatgaagagggaagcgtttaagcagggagtagccgtccacggggtaatagcggtagtcctgggctgagaggtggcattgccacatcatgcccctgggaaagttgctatcaaaggagcccgccagcttgacagattaatgttctcagcgagagagcaaagtcagaagtaaaacatagtttgccaggcaggctgtggagtatgacttgatcctagctccacatttcttacatattaatctttactaccgaccagtacgtcatacagcccccaaaaccaggcagcagaagaaggcatatcaagctgtcagcttgggctggtctgcgttctatgtgattgttggagtactccacaatgagcaatgcacggccggcagccagaattcttttttatcaagtactcctacactcatcagtatgcagctccatgctccttgctccccctcgctcgctccccttcattacccagcccaggctacacctcgcattttcaataatagccatcagataaggcagattttttttgtctgcaagctgtaagcctgctgctgctgcttcctcctacacacccatccaagcgtcaatcttgaatgatgagagcagtcaaaacaaatgcagaaaatagcaagattcaaaagcaaaccaaagtgcttaaatctgaattgaatcttcatactggttatacgttacagagctatttgttgtggaattttacgtttcaaaagacaccaggaaatgcgaagcttgaactatagcttataacagagctcacgacaggttccctttctccttttcctttctttcctgtcttttcttcttcctttttaaatggagcacagataaacgtttctgatctgaagctttgcagtgtttggagaataattattctgtttctttaccatgctatagcaaaataagcctctccgagatatatatttttttcttttttgaaatactgcaaaatacagaaactgcatcgcaatcttgaagtcaagataatttatttcttgtttgcatggtttcttccaaacaaaagtattattaggcacaagaaatcctttttcccctctgatatttataacccaatctaccagggttaccattctaaattagctataaaggtaacattaactggatagattttttttttaataaagaagatgagccctaacccaaaataattcaagaataacagatgtaaatgtgtgagttttactgaatggcagatagactgagtaatttatttaataattgggagaaaccagggattaagaatagaacccacaggactagatcatcagaagaaacagactcttaagattgggagagaacttgcagaaaggttagtctaaccttcttcctaacgtaggcatccctggctaaaatgttcctagaggaatatcttccaacttctacttgaatactgcctgtaacagagctcttactacttctcacgaagcctcaatttattagaaagatatttcacttcctaccttgcttctactcactgctccagctctgccttcggagaagcacagattgagaacagtgcctcttccacataaagagctttaaaatttaaagataactctctcatccccccagagcagccgcctggcacatagtaagtgcctaatacaaatttattgaataaatgaaacatcgcttttcttttttcctcaaacctcatctttctctgtttcctttctctttttaagggcattgtcaactttcctggcacacagacattaaacctcaaaacatcttctactcctctttcactactgaaatcagtccccaaattctatcatccctcttcccagtgtgatccattcccttgattctatttcctgttttaagtttacagaactgccacctacattgattttgttctcatagttcaggcccacctagcctagtgaaacaacgacttctatattgatctttctacctctaatatttaaaaaatcaattttatgcatggtgtcagaataatccctttaagacacagttttgattactactccctgtctcaaaacccttctgtggttttctgttgtcttcaaaatcaactcccaactcctctgatgacattttggggtcttcatgattgactgcagttcatctaactttatttccacttttccactgccccagacaggcaggattacttgctggtctctaaaggcagcccataatgggctttggttggttttattatgtccccacatttctgtccatttgttggctttgaatcagttgctatttccattatgaaacctcttctaatcttctctaccacgaataaatctctttcttctctgtcttaaatggcatttttagaccctctattgtaacagatattttctgccttcaattttagttgtttgtgtctgacttattttttgaaagcaggcaatatgctttgctaatatttcacatagtaaagattcagtacatacctgctaaacaaaataatgtaatttcatgatccaaagtacaaaaaattctattttcaaatttaaaaaaagttttaactctatcccaagtctctaaattatttatttaaaataagataacttgttttttaaacagattttttcatgtctgtcttttagctcatcatcctcatccactttttgaataagcagccctgggtggactgcatagtacttgattatattttgttgc

SEQ ID NO: 915872 - DNA, 4001 bp, Homo sapiens
taaacataaataataaaaaaagacttcaattctgtttgatagttcttctaattcttaatgccatctgtttagtgtcctaagtctgtcctaaatctgcccagtgttctaagactttcatagcaattgaagaactttcacttttttccatttcaatacccaaatatcttgtctatataaccagtgacagtacttgataaacacaagaaaaataacagtagctgcatatatcagtataaaaaaaccaacaaatcactcataaagcattctgtgcatgcaattacttagagctcatatatcttactatatttatgtcttttttatttttaaaaactcttgggcatacatacttttggagaaggagcagaagttgaataatgttaataatcttcaaatctataatattcaagtcaacctcagagaaaaataatctaagatagaaattaaaaaatctaatcagctgtcactattgtgttatcatttctggtactagtaagctgcaggtgtcagccctattactgtatttaggcagggctattacttatttccacaagtcatttgtgtgttacatgcctgtgttatgtaggtctctctaaacttagggatcagtgatatgtgtgatgggtacttaaaagcaaggaaaggtaatagagctgtgacgtagcttaacaaggggaactgatgagcactgggggaggtatgggaatgattagaaagctgaattgtcggtttgcacagttccccatcctccttcctcacctatatgcaaaacggtggaaagttagcacatgccaggtttagattgcatgtagaccagaattcagaagtacatgactatacttactccaccaacctttctttctaaatattgacagctaaatgaccaaagtgtttattttccacctaaagtaataaacaatacttcatcgctcttcaatcagcaagtggaagtaaacgctctccataattgaccatctgaagcagtttgctaatgaactgaaggttgtccacatgatttaaactgcttattgaacaattatcaggaaaagaaatgatcttcacaccataaacacaacaaattgtctcattaaccactaaatgctgatgctcaagtgaaataatataagaatcaagaattagctgaagagtgatataatccgagtattctaagattacaaatttatttaaaaaatcataccaagaatgacagggagaatatcaatattaatcttctttcactgcctataaatagcactctcaccagttcattcatataacacatatgtatatggatacatacagatctcattttttagcaagagtctatatgtacacagcaagttcagtcctaagggcatccaattttccaatgcagttacatatataaatctgaccagttttggtgcaaatcaggctgcctctgagccatgtaagacacataagaagcaaagacagacaaaaggcagctccgtggacacagagagcttcttaccataaactgcacattgtcaaatccattagccatcaggtggttctcgtactgaggtagcccaatgctttccaaccattgtcccactgtttggacagggcatctgggtcctgtaagaggatgaagagggaagcgtttaagcagggagtagccgtccacggggtaatagcggtagtcctgggctgagaggtggcattgccacatcatgcccctgggaaagttgctatcaaaggagcccgccagcttgacagattaatgttctcagcgagagagcaaagtcagaagtaaaacatagtttgccaggcaggctgtggagtatgacttgatcctagctccacatttcttacatattaatctttactaccgaccagtacgtcatacagcccccaaaaccaggcagcagaagaaggcatatcaagctgtcagcttgggctggtctgcgttctatgtgattgttggagtactccacaatgagcaatgcacggccggcagccagaattcttttttatcaagtactcctacactcatcagtatgcagctccatgctccttgctccccctcgctcgctccccttcattacccagcccaggctacacctcgcattttcaataatagccatcagataaggcagattttttttgtctgcaagctgtaagcctgctgctgctgcttcctcctacacacccatccaagcgtcaatcttgaatgatgagagcagtcaaaacaaatgcagaaaatagcaagattcaaaagcaaaccaaagtgcttaaatctgaattgaatcttcatactggttatacgttacagagctatttgttgtggaattttacgtttcaaaagacaccaggaaatgcgaagcttgaactatagcttataacagagctcacgacaggttccctttctccttttcctttctttcctgtcttttcttcttcctttttaaatggagcacagataaacgtttctgatctgaagctttgcagtgtttggagaataattattctgtttctttaccatgctatagcaaaataagcctctccgagatatatatttttttcttttttgaaatactgcaaaatacagaaactgcatcgcaatcttgaagtcaagataatttatttcttgtttgcatggtttcttccaaacaaaagtattattaggcacaagaaatcctttttcccctctgatatttataacccaatctaccagggttaccattctaaattagctataaaggtaacattaactggatagattttttttttaataaagaagatgagccctaacccaaaataattcaagaataacagatgtaaatgtgtgagttttactgaatggcagatagactgagtaatttatttaataattgggagaaaccagggattaagaatagaacccacaggactagatcatcagaagaaacagactcttaagattgggagagaacttgcagaaaggttagtctaaccttcttcctaacgtaggcatccctggctaaaatgttcctagaggaatatcttccaacttctacttgaatactgcctgtaacagagctcttactacttctcacgaagcctcaatttattagaaagatatttcacttcctaccttgcttctactcactgctccagctctgccttcggagaagcacagattgagaacagtgcctcttccacataaagagctttaaaatttaaagataactctctcatccccccagagcagccgcctggcacatagtaagtgcctaatacaaatttattgaataaatgaaacatcgcttttcttttttcctcaaacctcatctttctctgtttcctttctctttttaagggcattgtcaactttcctggcacacagacattaaacctcaaaacatcttctactcctctttcactactgaaatcagtccccaaattctatcatccctcttcccagtgtgatccattcccttgattctatttcctgttttaagtttacagaactgccacctacattgattttgttctcatagttcaggcccacctagcctagtgaaacaacgacttctatattgatctttctacctctaatatttaaaaaatcaattttatgcatggtgtcagaataatccctttaagacacagttttgattactactccctgtctcaaaacccttctgtggttttctgttgtcttcaaaatcaactcccaactcctctgatgacattttggggtcttcatgattgactgcagttcatctaactttatttccacttttccactgccccagacaggcaggattacttgctggtctctaaaggcagcccataatgggctttggttggttttattatgtccccacatttctgtccatttgttggctttgaatcagttgctatttccattatgaaacctcttctaatcttctctaccacgaataaatctctttcttctctgtcttaaatggcatttttagaccctctattgtaacagatattttctgccttcaattttagttgtttgtgtctgactt

SEQ ID NO: 915873 - DNA, 4001 bp, Homo sapiens
gagctgcaatctgaaatatgcacacattgtctacctgtgtttgaaagagaagattatttaacaagggagtacacacaagtcatctctatgacctattgaaaaaatgtcccataaatattcattcttctgacatgaactatcattccaataaaatgtcactgtcaacgagtatatagaataacatatggggctttttaaaatcccatcgactatttttcaactcaatttatttcactgtaatagaaactttccattttcccttttagctagccctataattaattgcactgtctgaccaccacaacctatgagaacttgtgtaaagaacgcaatgtcatcacccaaaagtttctattaagcacttgtcaagggtagcatggaacagtttttaaaaaaccagggaaatcacttgggctttctaaaatttttacaactatagttgggttatccaagagatgttttaaggcgaagatatgaatgacaattgatgactccaaaaatacccaggataaattggatagccacgattttagaaactaaagagcttcccttgaattgtatctagtgaatactctccaggcttcctccctcccagttgatttcatttgtccatcaatacaacttttaatagtttctcaagtatggaaatcaaccccgctatttccaaggtactgctgaatgaagaccttgacattttttttaaatgtcatcttagaaagattctccaagcaataccagtctcacctacgacatcttcacgttaaaaggcctctaccgtactccatatacagtatcccaataccaacctggcatccttcatcctgagctataacaaccaagtttcactcagctatgtccaggtaactgaaagtattgctggggctgcctaacctgccccatcaagttttatacacaccctgtgctgaagacatctcaccagaaagaaggttcactcacttcattttgtgggatcataacccacggcacagcaaacgccttctgcaagagaaggtaggagccaccgaaggctgtggcttttgcagggtaattgcatgcacgcaagagattctctgccaatttcatttaactagacaaaaaaggctgcgttcaaagctgcaaatatgtaataaatgttgatggaaagcgggcggaacgtcgattttcttcaagcaacactagtacatgtacaagttctgcaccagggctcagaggaaaagtagcttactgacgcattgatggaaggctattttaaaattactcaaagaatctaaggcatcaatctgactgggaggctcatacctcctctccatacacgcagtctgttttcctacctaatttaagaatgaatcgctggcagccaccaggtgcaataaccgtgaggaggaggacgtatatccatcacaatgcataatgaggtgtgccaaccccggagctggtgcccgtccttaccttagcagattagacaggggcaggggtccggatccaccgcccaggatccctcctttcctgccagacaggagtttctccaccagagccacatttccagtgcgagcagcttccagcagctcctggtccttccccatagtctctcaccgactcccccacagagtccttgcccccctcgggtcctcctccccacccacccccactccccaaaatccagggccctcttcgccccaccctaaaataatgcaagagcttcagcacggagagctccctgcagccccaggcagggagcacgactctctcctcctcttcggggcgcagcttttacaatggggatcagaccatgtcttgaaagaggggctggccgagctgggagccgcgacgcgcccccacagccactcccctgaattcccaaggcctcgttcccgcgggtgcggcgtgagggggtggggactcgggggtgcttttgaggagcgggaggagggtggtgaggactgaggtcggaggaggaggaggaggcggcagagagagtcctagctggagcgggagcgcagggaacacccgcggtggcagcagcggcccgcgcgccctcgcgcccgacccgggctcgcctcggcttcctcggcggttacgcgggggcggcgtccgcggcggggaggagcgcggcggcggcggcggcggctcgtgcgctgtggcccgcgccgaggcagggcggtggggggcagccgcagcgggcgcgtgccgagggcggcggcggcggcgaggcctggcgcgcggggggcgtgtgcgcgcgggcaggtgcggcccctggtgcggcccgagttgggtggcgggctggcggggaggggccgggccggctgaggcggggcttcggccctgagattctcttcgttctcgtgggcggggaccctccctcctccactctccttggaagagcgttaaccgtgtgaggactggagttccccgggccgcgtcggctcctcctcggcccggcgggccccggcaacacgcctcgggtctgtcacgacgcctgaggaaaatcctccgtgacaggaatggggaggctggtgacactggggaggggccctttggccaccgcttccatcagagtctaggcaacttgaccggcatttcacccttccgctttacctccccaagagagcctgagatctgcccttggttagaaagaagaggctcgtttcgtcctagtttctgtggcactggccaccgagcagtttgcgactgtttcagtttttctggagtctttaatcagcccatattttagttgggctttggagatctgctgacttgtaagaataccaggaaaaaggctctcattgaaaatttatccacatctacactcgaaaaatataaatgggcatggattagagatccactttaatttgcatatatcatcagcaattcattgtgcatggttggcatgacttgttagatgctctccttggccgtggtggagaacgcgcgtttattttctattaaaacttcctgttacaccttgtgctttgcattgtccttggaatagacttcataaatgttcacttgttgataattgattggtaagaagaggacttaataggcactgtgcttacaacaacccagtgaactggatattattatatccattttagaaatgaggaaatagggctcaaatggttaattaaatttctcaagatgccacatggagtaagtggctgactcagaactagaccccagaacagactcactccagacaccatgtgcttcccaatatacgttcctgccccccatggaaaagcgaaatggacagacaataattattgcatgcatttgatgagtagttgctacataccagacactatgctaagtgctttccatgttctcattaagccttgcaacaatcgcatgagataggaccattttcatctctattttggagatgaagaaactgattacccgcaagataatagggatagaaagtaactgagccaaggctcaaatccggcactgtctgctgtaggcaaagattttcaataaataactgggggaaacttaaaaggcatttagagataaataacaagagtatattaaaacatttttatggaattcattgtgttctgagatttcatttcaatgattcaaaatattaggtaaattatggctatttattggaggtttcctgaagtatgtagattttggctagtgtagttttttaattcattttgattttgttttctgtgttagaatctgttttaataagataatctatgttataataatataatccctgacataatgggactagcagaccaatgaaagaaacgagataaggagccatcacattcattttgaaaatggcatagggaaatccttcttcctttttcctaatgttgccacctaagcaaaacacacctttcccagaatatactgtaagtattcaattggtcagaactgaaaatcacccacagttttcacaagcaacatttaatcatggatgagttggtgaccgcaggccccgagtcatcttatcgaaatcatgcagcccccacccccaatgg

SEQ ID NO: 915874 - DNA, 4001 bp, Homo sapiens
tgtgtttgagtgtgtgtttgtgtgtgtgtgtgtgtgtgtgtgtgtgtgtgtgtgtaatactactcggccatgaaaagaaacaaaataagtcttttgcagcaaattggatggagctagaggccattattgtaagtgaagtaactcaggaatgggtaactaaatatcatatgttctcattcataagtgggagttatgctatgaggatgcaaagacataagaatgatatcatggactttggggactcagcgggtaagggtgggaggagggataagggataaaagattacatactgggtacaatgtacactgctcgggtgaggaggcactaaaatctcagaattcaccaccaaagaacttacccatgtaaccaaaagcaaaaccccgtaccctaaaaactactgacatttttaaaacaatttttaaacaatacagatggattataccgtgtactagagacaataacaccgtccctagcagccaaatacctgctatgcatgtgctctagcaacgtcatacatagggtgggatgggcttctctcagcccacagaatgggtagctttccagaaaattaggtctttgttacagaaaattatagacacactccccagtaggcccaaatgcctctcaccctgcagccttgccccacaatggaagatgaagagatggcacacctggaaactggactagaacttgaggtgtgtgtttggatcccacccttacccctcacacagtctctacagtcaaccagcagagtggctctggtacccacatagaggcaactcagacagcagaagcagttgctggaaaggatcgaatcaggtgcttggctccggaaatgacgggtgcacgttaagacacactgagaggagcaaatgagccctggatgcccagcagctgagccagggtgacagagagactgggcaggggctctgatgccaggttccaaggacaaaggctcggcaggtggagggccaagaggaccacagtcctctggaagcaccttcaccttgtctaagatcctccctccacctgccacctgcctttgggctgagacccgaccttgctcagtgggaccttctgtcccagacgaggttccacatggtcccggggtggtatttctccacatctgctcacaaagtatcaggactgtgactgacaccacctcccagtgcactcagctcattgttcatgccaaaggagcgggcacctccctcttcatgcctgtctcaagaattaccagaaacacaacagccgacaaagtccctgtcccaggcaaagtcagtcctgcccaaaagcaataaaataacgtctttcttctccatactccacctcaatttgcttttcttctaagaaaagtccctcgggaaggtatagctgtgtttccctgcagcctggggtgtaaatgcctgatcttggaacccttcctgaatgcggttttgggtaagacactggaaaaaacttctgaaactgagaggccactccagggatgccaaagtcaaatttgctctgtcctcagcggaccgttgctgagttaaacccagtccggctggttgtttacttattgtttacttaccttcagatgctgtaggctaaacgtccccaggacttgtaacaaggagaggcaacatcacagaggtggggattggtaaccaatcacagagaagcggccgcccaaacctctgttgtcctaccttccctctccttgagttaaaaaaaaaacaaaacaaaacaaaaaacaaaaaacgtctcggaaattacatagacgtccctcagagtccctaccctggaaaaacggggtcaacttcccgcaccaccctgcccaggctcccttgggggtccccaatcccgaagggtgggagttcggatgccgcctccttcactccctccctcctaccacctgtaggagaccaggaccaggtccagccggaaaactcaccgcgcggcccgggagtcgccatgatgtggacgcagaccccgccggcccgcggccgcgcgcttctgggcaggcttatgccgccgcggggctaattccatcgcggctcagctccgtcccggcgcgcccgcccctcgccggctgccgcctcctcctcccccatccctcccggccgccggcgccgcgcagccacagcccagctctccccgctgcgccctgggcgcccgggtgctgggagcggggcgtcgagaatggagcgcggtcccgcggccgggttgagtccaggacacactcgggtccgtggggctgaggggcgagacagtaaacgctccctgctcccccagagccggggcaacgccccacaacctgcttcgagtgtaaaaattcagtcggattatctcatgaactgtctggctgattagtttccaatcctgccagcaaaaccttcttcccgccgccccaaagggtcatccactgcccaagagttagccctggggcgggagtgggggcgagcccctggacggcggatctcccacacctgtctccatactaggtggagaccagctgtcctcaccttcccctaggttaagcagaacaaaagggagaagaggcaggtagtaagtgcacaagggaccgcaaaacaggaggggctgccagaggcaggaggaggggtccattttacaagagctctcccatgagacgctaggagggttaaggaaggttgagggagtagatgatggaagctccatccccagaggggaagaggagtgccatctccccgggacagttcacggacctgggcagggggatgggagggaagacctccaaagggcccttctgcacgatggaatctgcaactccaagatgcacagaagtaaaacaagttcattaataccatggacccccaaaatgaagaagtactatgttaaggtcaagtatgccatttgtgatcactgaccttcaggcatgaagattttctctcctatattgataaggtaggctggtcatgatagatcccactttatagagaaggagcctggggaagcaaaggggagtaagtgacaccacagtcgagggcagagcagaaggaaaaccacaagatgtgatgtcccaacccaggcctttattccatccactgcaagtactaccagctaatgcttctacaggacttcctctccacccaacacccttctcagtgctttccctatggtagttattttaatcctaacaataagtatatgaggcaatcactgcagtgtgcccattttacagatgagagaactgcagtgttaaatggcaagtaacttgcctctaagaggatcctaggattccaaagcaggcagcctgccctggagtctgtggcataacactctgctattctgctcctttctgtccctaacaacccctttctccctgtctacttccagggaccgttatcatgtcttttcaatccccaaacgattgaaaaatggtcaccattgctctttcattcattccctttcttctttccctccagcagtttcttagtgtctatatactccttccttgagactccccttaaaacatccactttggggcactctgtcttgcctggtctgagggtgagtaaaaaagagggtccctgaaaccaggtacagatagtgcctttggaatacctgtaaataaaagaagactgccgagacaccgctccgcacacactagccccacaagtttctcttcttgcatcctttttacccagctctcttccatcgttttgggtttttttaaaataatcaaaacatgcagttttccgattcagcttttttcttgacggtaaaatgacatatcagtaaacatgagaagttcaagctagcaagacacaggcagttggaaaatcaaccacctatgctgcagtggtagcctagccttcctgctgaatttctccagagctgatgcctccaataacaccttgtccccagctagagtgttaggcgatcagtcagaagagtgacagttaattccctgtccctggatctggtttcctaccaagagagaccttagaggctacccaaagttgggagtggggtga

SEQ ID NO: 915875 - DNA, 4001 bp, Homo sapiens
aagaggaccacagtcctctggaagcaccttcaccttgtctaagatcctccctccacctgccacctgcctttgggctgagacccgaccttgctcagtgggaccttctgtcccagacgaggttccacatggtcccggggtggtatttctccacatctgctcacaaagtatcaggactgtgactgacaccacctcccagtgcactcagctcattgttcatgccaaaggagcgggcacctccctcttcatgcctgtctcaagaattaccagaaacacaacagccgacaaagtccctgtcccaggcaaagtcagtcctgcccaaaagcaataaaataacgtctttcttctccatactccacctcaatttgcttttcttctaagaaaagtccctcgggaaggtatagctgtgtttccctgcagcctggggtgtaaatgcctgatcttggaacccttcctgaatgcggttttgggtaagacactggaaaaaacttctgaaactgagaggccactccagggatgccaaagtcaaatttgctctgtcctcagcggaccgttgctgagttaaacccagtccggctggttgtttacttattgtttacttaccttcagatgctgtaggctaaacgtccccaggacttgtaacaaggagaggcaacatcacagaggtggggattggtaaccaatcacagagaagcggccgcccaaacctctgttgtcctaccttccctctccttgagttaaaaaaaaaacaaaacaaaacaaaaaacaaaaaacgtctcggaaattacatagacgtccctcagagtccctaccctggaaaaacggggtcaacttcccgcaccaccctgcccaggctcccttgggggtccccaatcccgaagggtgggagttcggatgccgcctccttcactccctccctcctaccacctgtaggagaccaggaccaggtccagccggaaaactcaccgcgcggcccgggagtcgccatgatgtggacgcagaccccgccggcccgcggccgcgcgcttctgggcaggcttatgccgccgcggggctaattccatcgcggctcagctccgtcccggcgcgcccgcccctcgccggctgccgcctcctcctcccccatccctcccggccgccggcgccgcgcagccacagcccagctctccccgctgcgccctgggcgcccgggtgctgggagcggggcgtcgagaatggagcgcggtcccgcggccgggttgagtccaggacacactcgggtccgtggggctgaggggcgagacagtaaacgctccctgctcccccagagccggggcaacgccccacaacctgcttcgagtgtaaaaattcagtcggattatctcatgaactgtctggctgattagtttccaatcctgccagcaaaaccttcttcccgccgccccaaagggtcatccactgcccaagagttagccctggggcgggagtgggggcgagcccctggacggcggatctcccacacctgtctccatactaggtggagaccagctgtcctcaccttcccctaggttaagcagaacaaaagggagaagaggcaggtagtaagtgcacaagggaccgcaaaacaggaggggctgccagaggcaggaggaggggtccattttacaagagctctcccatgagacgctaggagggttaaggaaggttgagggagtagatgatggaagctccatccccagaggggaagaggagtgccatctccccgggacagttcacggacctgggcagggggatgggagggaagacctccaaagggcccttctgcacgatggaatctgcaactccaagatgcacagaagtaaaacaagttcattaataccatggacccccaaaatgaagaagtactatgttaaggtcaagtatgccatttgtgatcactgaccttcaggcatgaagattttctctcctatattgataaggtaggctggtcatgatagatcccactttatagagaaggagcctggggaagcaaaggggagtaagtgacaccacagtcgagggcagagcagaaggaaaaccacaagatgtgatgtcccaacccaggcctttattccatccactgcaagtactaccagctaatgcttctacaggacttcctctccacccaacacccttctcagtgctttccctatggtagttattttaatcctaacaataagtatatgaggcaatcactgcagtgtgcccattttacagatgagagaactgcagtgttaaatggcaagtaacttgcctctaagaggatcctaggattccaaagcaggcagcctgccctggagtctgtggcataacactctgctattctgctcctttctgtccctaacaacccctttctccctgtctacttccagggaccgttatcatgtcttttcaatccccaaacgattgaaaaatggtcaccattgctctttcattcattccctttcttctttccctccagcagtttcttagtgtctatatactccttccttgagactccccttaaaacatccactttggggcactctgtcttgcctggtctgagggtgagtaaaaaagagggtccctgaaaccaggtacagatagtgcctttggaatacctgtaaataaaagaagactgccgagacaccgctccgcacacactagccccacaagtttctcttcttgcatcctttttacccagctctcttccatcgttttgggtttttttaaaataatcaaaacatgcagttttccgattcagcttttttcttgacggtaaaatgacatatcagtaaacatgagaagttcaagctagcaagacacaggcagttggaaaatcaaccacctatgctgcagtggtagcctagccttcctgctgaatttctccagagctgatgcctccaataacaccttgtccccagctagagtgttaggcgatcagtcagaagagtgacagttaattccctgtccctggatctggtttcctaccaagagagaccttagaggctacccaaagttgggagtggggtgatggatggagagacagtaacctttgaattactgagtagttacataaaacttctatccattcttccttccttctgccccactaaactccccaccaagcctactcagcataatctatgccattttcctgtaatgtggcttctcttaaggttaagctcaggcagtaacagaagtggtgggaacttaagggtgcagcagtcactggtccccatgtcagcacgggaggagtgtaagcaacagggatggtgtggctctgatggggtggcctgggagttcttatgcaggtgtcaagtcacctgggttctgaacctggccctgccacccagcagttatgacctttggcaagtcacttgaattctctgagctgctttcatcacttgtaaaggagtggaggagggacagtggactagatgatgtctaagtcccttttgattccattatccagtactttcaatgagctgagtctctcctgtgtcaaaagtatttggaatgaaaatcaattcttcatcaaattcttgtaatccaggacatccccttctttctcatgggtattctccccagcaagagtccccaccatcttgccagcatgtacatgaaaattcttccatacattttaaggaaggaccatctctaactgcaagtgacagtaccagttagtgatttggggactggatgatgtttggtgttatctacaccacttcctcttccactgaaggatgtctggagtatgtaggaccttggcatcaagcataaagcctgatagaaacccagccggtccagccctcaccacaaaggaaatctctaatgctctgctgttaacattagagtctcttattccctaccgaaagccttgatctccccattgttattctcgccacttcttacatgattacagagcaatttacagttacctaaggacttgcaggccctattttaggctgaggttgtttatccttaccaccttatgagtgagaaca

SEQ ID NO: 915876 - DNA, 4001 bp, Homo sapiens
gaacagggctaacatgtaaacatctacaaattcttgttttttatttaaacgtatgcttttacaaatgcaaggaacccttcactgaaataaaaaacaaacaaaaacagaacaacaacaaacgcatctactttggacccagagaagaaggtaaaggcatatgtctgatgtcatcaccactatttcaagaaaaatccacatgaacaggggacataaaagtagtgaaaatgagcaagcagttagggaactttacattccaaactcccaaagagcaggaggagagactggaaatttcaccccacattctctcccctcacttatcacaaaaaatcacattgtattagttcagtaccttatgaatcagagactgaattacatttggcaagaaccctctctagagtgaaatggaccagaatggaaaaacctacacaaataagataacccacctccggtccaagacttgaaaataactaaatagaattacaactgcgaagctattctttggaatgatgctttgaccaaaatagttcgacacacctgctaccaaaaaaaaaaaaaaaaaatccctgttaagagagactcctgcaacgcacaggagtgaaactaataaaatgttcttggtttcctttgggcgtcaagaagctgccagtaatagacttgaagttgtgatgctctttgcagcaaacctcaggagaccaggtgaaaaattagagcactattgtaagagtaatgtccctggaataaacaatctgccacatccatagtcttcgtcagaaacctgcttatgttctcctagaaaagtctaaccattctaataacctcaaagtattttatctcctagcaggaggacaaaactatgttgtcaactcaaaaatgttcctgtcatcactgccctaccactctctgaagagcctgtaaaatatggtttgcagaactgggtaccctgagactcagaagggaaagaagcaatgaggtcatgcagtctactccgtctgccagctcaggattcctcctgctgagaatgttcctgcccaagttgtaaaccccacaagatatagggtcatcccagacccacacgggcaggtgcagaaaacacagctgcccacagcagactcaacataactcacacgtgtgtgctcatctttatccacaaagatggaagagtttgctatgtgggcaggtcacccccggcccttctgatcctgagtgagtgcccctggcacactgaggattcatcctgcccaaatttgtcagtcatcctccacagattccctgcacgctgctgcagtttaccatcgtgaacacatttccccggctgctgcttcaaggacaaagacagagcacttatattcgtatcacagcagaagagctcacgtttatggaaaaaagataaaaagacaaacactccaggcaaatgacccctggcatttttgaagctggatcatcccagacaagatccatgaaaacagaggaaatgcagaaggaaggtcactaagcttagctgggaagagggggaacgaacggttcagttcactgcagcaacagagcagctcattcaacgtaagcacttaccataaaaatagaaagagtcaacagaaggagaagggatccttcctcagtgccttggtgtcttcggcagaaagaaatccactgtgaacctccaggctccagtcgggaggaggccagcaaagtgatgacaggcaataaaaccaccacacacaagtccttttcagcctcccctcgggccgtatgcagttgtttgtgctgtaaaaaccctgagaagtctggaacaggactctccggagagcgagccggagtgaaagcagcctggtggatttcaccaccgtctcagagcatcacgcccaggactggtcctccccctccccaggtgcaggggaggcatggtcgggggagggtgggcactaggctgggctaggaaaggcgagaagagggatgaaaaggagtctctttagagtggaaggaactgccggagagaacatcagtattccatatcagttattgccagcgaccaatcagcccagccagggggccgtgtcagtgtgacaagagagcagcagatgacagccagttctgagagcggcaggacaaccccctgcctggaaaagaaatttgggaggattggcaacttatcctctccactgctgctgttaatgtttgcttgtatttaacaaagatctaaagccccatagttacactagccatgcaggaagtttttgaggcatcccacagcatctctgcaagaagccagacttgaagtcccctaaatgatgtctgatggcatgtcacagtccagacagccctactgatgtgccttcaaggggtcatcatgagtacagtaatggcgctttggacctaagcttctttatgcccaaagtgcaggataagatgaccagtgacccggctttctatttcagaagtgaaaaatttaagacagagaagggtcaaaggtctctccaggaatttgactgtcaatcttcattagttttcttgtataatataggtatagaaatattgttagaggtgagcttctgaagatagttaacatgtcccttttagagctcttaaatcacctataagacaaaatatgtgtttgggataaacaataataacaattcataaacacactgaaaattgagaaattctgacttacactaacagaaggagcaaaggagcaaatctcttggtgataaatgaaggatgcgtggaggactctaaacttttcctacttcccttttcccctattctaatattgaacttataaactttgtccatatatattaattaatttgtatttggttgtgatgattacattatatagggatgtagtttctgaagttaaatgccagtttaattggactccacagtaaaacttcagaactttttgtaagatggggagattgtcttgggccacctttttatcactgcagaaaagataactccctttagtcagtcaagagttaacaggaatatacaaatgccctcgggttttgttttctgttttttttttccaggtgacttacatgatgtagagtttttaattttagttgtctgtttttacctagaagttggaataccatttgcacattttgctgtgatctctacccgtaggcaagctgactttggggagcctgaataccacagcttaaaaggaagggctgagctccaaggaagcagataactcagcaccaaaatgagtcacagcagaaggccataaaaaatgttccacatcaaagatgaacataataaagtgaaattttttaaacgaagaagaaaggatagtttgccagggaagtccttgtaaattatataaggaaaacctgggagactttgattctcaaatgctgttttgttattctcctcagttcaactcaaatcagcaaacatttgaagaacatcaattatgcatcagggctacagagatgagtccttgccttcaagaagtttacagtctcatggacaaatttaaatcttcttcttgaaatttcaacactatgattcttgccaagacagaaaatgttctactattttaatgttcttcagattaaaccaatccatgaggctggactttagcctcaaagctctgaattagcctagttagatgtttgtcataaccgaagccattcaggaaatataaatgcacaaataatttctgaaatcgaattaatatatgagaaggttctttaactgaatgtttgtttttatctgcattaacggcttctgacactgtaaaagcatgggcagcatatcaagaatatacttaataagggaatattatttaaagctcctaaatgaattgagattaatactgttgatgaaacgggttcataccttgaatacacagcattataatgatgcatgaaatggaaaatactgcagaaatacaaattatctagtggattaagtaactgcacatctatatgacaattgatcaataaaaataggtattccagttattaactcaaacgccattaatttttaaagtt

SEQ ID NO: 915877 - DNA, 4001 bp, Homo sapiens
ctcccacaatgaaagccaattctttgtaattagtctctagtacatactttctactggttttgcttttctgattgaaccttgattgatgcactatagtaataaagcttaaggaagaagagggcaaaaaatgaagggtgaaagcagtaggggccagatcacaaaaggcatttgtttttaacatgctaagaagtttgaactggaccctgtaattggtagaacaagcacagtaactgattaggggtacagatgaatcattctggatttggtacgtactgggaaaggaggcaagaggaggaaagagatgctggagtgggagaaaccaggaaagttacatgcgagagaaataagagaagaaccctaagattgtcatggaagccaagggaacagtgtttgggaaacaagtgggttgtccaccttggtctggtgcatcaggaaagtctggcaagcatccactacattgtgataaaaggaggtcactgagggcctcaaaaacagccagaatggaatggaggagctagaaaccagattgtgttggttactctcgacagaacagagcaatcaaaagtaaattattattttcagaagtttggcttggaagggaggaggaaaaagtggcagaagagggaaaagggtacagtgttaaatgatcagaatggtagaagcttgagccttttcatagactgaaggtaaacagctagcagtgtggaagggtgaaagagatgaaaacaagaggacacattctcctgaggaagcttcagaagaggtgaaaggtgaccatggctaaaggacatgggtaagagcttggtcaaagacagtgggaggcccctcatcttctgaaaactggaggaaagtggggaatgatgcataaagagcaatacatttgaagagagaggataagggacctccagtaattcatgcccaacggccctggtgtttcttgatgggttaggaagcaaggttacatgctaagagagagaaggtggtgtgacatgagtagagatggaggctggcttcagtagcagctgtgtggtcatccactaggacattacagagaggaatcaggattgggtgagagttattctcaatgacttatgaattctttcgcaatttgatgtttctataaagtcactttgcaggaacattgccttggtcactgatatttccttgaacccaaaacaatgcctagcatgtagctggcactcaatacatatttgttcaatgaatgaatgaatacttaaatgagcttttcccccaaataagcacataagatgtttttacttcatttaatgtagaatcattttaatattttaaagagatcacagatgcttcccagaagacttaaaacaatataatataatgactccagtcttctctcctgatctcaggaggatgtgggcaagccaacacagataacctaggtttcaaagtgggtgttttttggcttgaatttttttcctgaccaatcttagagcaaattatcaggaaaatgaccaaatctctatgttgttttattatataatgagctttcctgaactgagcaagagtttatgcactctgattttcatttagattctaccactgtgcacatagcctcaaccttctctgaaccaccaagctctctcccctcttattcgtcttggtgatatttaccattgactgaggtgagcagaaggggaaatagaacaagactcctaacaaaagcaagcttagctgaaagtatggcatatttacacaataaaaatataatgcagactgtggtcaggttgctactgaaatgggtccccgttgaacttccccatgcatcacctgggtggaagactttggtttttccattagtgattccagaagagcttgcctccatttttattgaccttctgcctggtgggagtgaggaatgcctgaccacaggcaggcgacgacgtgacgctgggcggcttgccacacttcgccgttgatggatttgcaaacgcttttcagccccatgaatagataaacttaaacctggaatgagaaatggcaccattagactgaagaagtcacttcagaatggctaaaaggctgttacgctctcatatgaagtccagagaacagaagcaaccatgtttcaaattcttaaggtatgcatcactcaaaagtagacatccttagttaccaagacaagacttttatgaatcaggatccaatcagtcaaatctgaaaattcttataaaaattccttccaaaatgctgggaaaatgtgcacatatttgacatgctgttgccaaagcagtagggcttaggaactactgttggggtatctggaatttcaataaaaatcaagaactttctccacaagattcacagataggccaaagttgttggctaaactcacatttacactcttgataaccttagaattatatgcatcttgagaactattttatttggaaatatttcaaacataccaaaagcaaaatgaatagtataatgaactccatgtactcatcaaccagtgtcaacaaatatcaagatttttccaattttttttcatcgatcccactccctttgttgttgatttgctttttagatgctggagtatttaaagcaaattccagacatcatgtcaatctcctcaaaagtagaattgattacatcagcctatatagattacatcattaatatggactccatctactgatgcatatcaactgtataaagaaaggctgagttcaatgtgtatctttttaaaacactcattgttcaccattggaggttcctaagataccaattcgttactcagaagattaataaagggaataaagcaagcatttatcctgcctttactagccattttttattagttgatgagggaaaattcttcactacagaagaattcttgctaagaaacaccgataagaaagagaattaaaaattattttggattttttggttttctgtccctgtgatagtttgctgagaatgatggtttccagcttcatccatgtccctataaaggacatgaactcatccttttttatggctgcatagtattccgtggtgtatatgttccacattttcttaatccagtctatcattgacggacagaaaaacccaaacactgcatgttctcactcataggtgggaactgaacaatgagaacacttggacacaggaaggggaacatcacacactggggcctgtcatggggtagggggaggggggagggatagcattaggagatacctaatgtaaatgacgagttaatgagtgcagcacaccaacatggcacatgtatacatatgtaacaaacctgcacgttgtgcacatgtaccctagaactcaaagtataataaaaataaataaataagtaagtaaataaaaagagaaagaaggagggagggtgggagagggagagagagagaaggaagtagggagaaaagaaaggagggaaggagagaaagagagagagagaaaggctggaagtaggctggatgttactattcctgacacctgtaatattagtatttctgggcttgaaattcttttttatgcaaatccttctttctttctgagtgagaactgtactttttaataaaaattgtgtaactgtaaggattacattagatagtacatgtgaaacattcagaaaagtagccacaggtatgtcttaagtattggaatcagagtgcgtaggtttgaatcacaacctcttcctttactggccaggtatttctaggcaagttcattagcctctgagtctcaggtttctttatatgtaaatgggatataaaacagtatctaccttataatgttgttgtatgcattaaaatggatattgaacattaaaaaaatggaatgtaaaaaaaattattttaaagctacaataagaagtctactaaaaacccagaaacagggaaaataacaagtctgctaagaggtaaactgcaaaatcaccaatcataggtcatgtcaaaggtaagaagggtcaccttaaattttcccaggggaaaaagaggatatga

SEQ ID NO: 915878 - DNA, 4001 bp, Homo sapiens
ttactttctaaactgagatctactgctggcacagtaaaacaaagctcagagcctcttgcttacttcagtttccatttgagcttctgcccttatttacttacaatactcattataaacagtgcagctcaccataaaagacaataatactttcctgggaaacagactgtgtcaattttattgtaactttttaaatttcactcctatatttttatgtaatcatcaggtactacttaatcttgctaaacagtagtaacagccagagtgacccagtggtaagagcattaatcttcactggttttacaagtcagaaaacctgggtttgaaagtgtgagaagctgggcagaccaacctgtgcgcttcagttttctctcctataaaaactactactatttgctctctccttaaagatgaataactagtaaattgttcttaaatgaatgaatgaaatgtgaaactaaatcatggagtgtaatctcctctattcgatttgtccctggacaaccaagaagttaccaaatttttttgatcgaaatattccgtgcccaaaatgtaacagaaataaaaaccacacccaactcctaaaattaagttacttttaaagttattagataacaacagggctttagaacatcagcaggatgttctgctttaaaattgatttggcatccaggagactaagccgagtcgccacaacagactggcttggtaatttaattagagtcttctggagggacacattatatcatcatcccccgacagtgttctctttagggacctgattttctctctagtcctctcattcctttccccttcctcacctcctctcatcccttttgtttgccctttttttctttttttgctcttaaaacagctctccctccgttcgtcttgtcacttccatgcatttttaactctaactagaaatgggtcaccccaggtttgctccccaagccccagggcccctcaggacgagtgaaaaaggccctgcggtcctccctgcctgggggaattcctcctccgatcacagctccggtgggctccgcagatgggaaagggtttccagcgcgcgcctagcggccacaaatcacttcccggggccgccccgccaggcctcaaacctcccagagccgtcggtcggcttttactttaacgaggattcagatgggtcacaccctgtcctccaaatgcgggcctgctccccggaccccgcccagggggctcgccccagtgccgaggctcctgggcaaccctagcactctgcgagtcggggaagtgaccccaaagttgcttctgagtggagacttccgcacgcagaggcgtccccgcagctgccaggcttttcaggggcagcatcccccgcccgtcaggagcctgtcctcggggccaccacgcgccccgcgcctcagccccgcaggggccgcaccggggcctcagtctgcaagcagccggggacagcgggcttcctcccctgcccggagcggccgagcgtctcggccaacctcccccgcggagagcacagcgcccccgcgcagtccccgaacttcttcccgcgtcggctcgggctctcgggtggggacgcggggacccctcgctcaccgatatccccatcgtcgtcgtcctcctcctcctccatttgtagcaaaacattcctgctcatctttttcatgtctccctcagaaggcggctccgaacttggcgcgaagttgggggctcccgggttccagaacggcgcggctctcccaggggccggatcggggaccgcggggcgtgtgtcgcttgggctcaggggccgctgagcccagccagcgccggggaaagccgagccgaggcacccaccgaccggagcccagagccggaggacgcctctcgcctgccgagcggagcccggagactgagcatgcccagtgcggccgccgcggctcgctgcggaatgattgaacttccccggttttacgaggcgcgcagaaggaagtcggcaggcgagactgcagagggagtagtgcgatcctgcgcgcgggggaactagctggagggcaaggcgggaacacgtgagtgcgggagtggactgggttccctgagcattgatcccaaacagggcagcttttcgttccaaggtcgtctgtggacacacactgtggcttgctttgttttaacgtctgatactggagaggagggaaatgctgctgcagcacaactgcagaaccctggaaggcgaactcgtttgaatggcttttaaaggcgacgtggagctaataatggggggatcttaaattactctagctccgaagtgggaaagtggaatctgtacgggtaggttaagattacggtggagtcggggtgggaggagaggcaaaactcagagaataagcaaaagaagaaggggcgggacggacgggagtgggggtggagagaattttctaaataaacgtgtgcacaaaggcaggaggatttccgcatacattgaggtcgcggagagtggagaagcgccccctactccgcccgcgcgagcacacagggagtggtcggaagataatcgctgaagcgtccagcctatttgtacaattgaaactagtcctctgtgtcaaagagggagaagaagccgaagaccactagagttagatgtaaactcttctaaagcaatgtggaaagctataataagagaaaagaaagtcgtgaaataaaattaaggcagagagtttttatttttatttttaatgctttcctggaaaccaaagggaccgataggacaaatacaaagggatttagtactttaaagacccttggagttgtttgaacggcaggttttggggatcgcgtgtctacaaaacttttttcaaaaaagctggtacattcaggttgttcaattttgacttctcaaaagggctagaaggtatatttgaaatcttggttatatgtgttattgtctactcattgaaattgtttatattttttccactgaagtgctagggttatcacaataacactaaatctactgtgcatgttttttcttccacatactttttttaagacggtctcgctctgttgccgaggtgggagttcagtaactagaactacaagcggagcacaccaccatgtggggcttattcttaaatttttttgtagagatgggtgtctcactatgttgcccaggctggtttcgaactcctggcctccagcaatccttgcacctcagtttcctaacatttttaatgttctctctgaaagaaagaaaacattgggaccaatcttaagtgggaaaatagacatgaatatatacatgaaaagacatgatgaaattacttttaagaaaatacctgggaaacactatacttgcttcttgaggtactttttttgaataaacagaattgtttttagtataaagagacaacaatacagtactctgaagataggagaaaaaaatgatgggagaagaaagatgagaagagattgtttcctttcactgaacactctcccctgagcttgtgaaactcactaaaagtagaaacttcaaaagtgttttggttacatgatcaatttttacaattttcttttaacaaatttttgtgtagtactttttatgtgctaggaaaagttttacatgttttataagcatccagtcattcaaccctcataacaaccctagaaagtgttatcatttttcttcaggtgtgaggcaacttgagcaacttgtccaaaatcacacagggaataaatagtggagccaggattgaaacctcaacagcttgtttcagaatcagtgctcatagcctcttcataaaccacctccagagacatgtcccaatccatttttttttcagatcactttttcccccaccaattcaaaattcaaagtctcatcaactccctgccatagttctttaaccaaatgttctctctttttttttttaagacagagtcgcgctctgtcacccaggctgtagtgcagtggctagatctcggctcactgcaagctccacctcccagggtcacgccattctcct

SEQ ID NO: 915879 - DNA, 4001 bp, Homo sapiens
gaatctggatggatcagtctcttacccagtctgttactggcaagtaaactcaatgacttactatttacattaacaaaaaaagtggcagtctcttctaatcatttctagaatgcaaattccaaattcaaattgatagttttcattacagttctctgtctttcccatctatcttaagacaggagctttccctccctccctgcacctggcccccttctcaacaaagatatttctacaattattaccacttcagccactgcttctaaaacaaagaaggaaaaagaaagttattcatgaagatgtaaactttgtcagggtaagaacattttttactcatggccagggtccagtactatacatttggcaatttagaaaattaataaatattctctccgcattctggtaaaaaatgcttttcctcaaaaggttcccctttgctgtgctacccttcttgaataatgtattatcatcagttcaattccccaatccaaaagcgggagccattcttgacctttctctttccttcactatcaatattttggtaagtcactaaattatatccttcttattttcaacctcatcttaagtgttttctacctacctggaatgcacattcccatatcccctgtgttactctttcttcaaatttttctttcaatgtcactgcttatgtgccaggttaagttacttgcctccacttcatgctcctatagcactaatttggatgtctagtaaaacctgccacattattataggtggagccaaaaaatcattgcattattggctattaaaatacagtattttggccgggcgcagtggctcacgcttgtaatcccagcactttgggaggccgagatgggtggatcatgaggtcaggagatcgagaccatcctggctaacacggtgaaaccctgtctctactaaaaatacaaaaaaaaaaaaaaaaaaaaaaaaaaacattagccaggcatggtggcaggcacctgtagtcccagctactcaggaggctgatgcaggagaatggtgtgaacctgggaggcggagcttgcagtgagctgagatcatgccactgcactccagcctggcaacagagcgagactgtctcaaaaaaataaaatataatataatacagtatttttttcagttggacatccagttataggaaaaaggtttttttttttaaagagtgatttttataagcaaaatttgcagctcacattgaacagaattcaaaattatcacatggttactttttgacaactacccaccactatagaagataaaatctggggaaaagataggtgttgatccttcttatcacaagaaaactgtgtggtcattgtttttcttctccactagtccatgagctcctagagggcaagccattgtcttattcaactctatattccaagaacctgaaacaataccttgcatattatagatgctcaataaatgagaaaataaacaaatgatgaaattaattataaatttgtcactccagtacagttactagtgctcttcaattcctcaaaatgtaattgcttagataataagagagtgcttctatttccagaaccatattgcactgcaccatactgtgacacacacacaaagcagactaataatacagtgtcccttcaagaccaaatactcatcaaatatttggacaatatttataaaaaaggagcctccccggcactctgcccactgctcactgttccagcaactcaccaaataggaacatgttcttaccagcagcacaaaacattccacagcagaacaaaagggggaatggacaattcggtgagtccttgacgcttcttaccctcctacctctaccttaagtgacaactctgaagatttctatcatccacaaacagcaatatttctgagaagagtttcagtaagcacaatttctccaccttgtaacatttccatgtttggtgttgtttcagctctgcttatgaactcttcccctattcctacaagcctcctctgccccaacagttcagctctaaaaatacatctagaagttaaacatgcgtcctttggaagagctggaaacaactatcacattactgattctcacacacaactggattacctaatgcttttatagaaaaactcaatgtacactgcaaacctatcagattcactgtgaattcattagttctcttaccatcttaaaaaaatttattgcagtaacgtaatatataagcataaagtttgccactttagccatttaaaatatataattcagtggcaataattacattcacaatgttgcacagccatcaccactatttccaaaatgtttctgatcaccccagaaactctaaccattaagcacgaattccccatttccccttccccttttccccagtccctagttatctctaatcttttttctatctctatgaatttgcctatttaatatatttcatataaatagagttatacaatatttgtccttttgtttctggcttatttcacttagtataatgttttcaagttatatccaagttgtagcatatatcagaactttgttcctttctatgacagaataatacttcgttgtacagatatactacgctgtatttaccccattcatctgtggatggacacgggtgttgtttccaccttttggctattgtgaataatgctgcaacgagcactgttatacaagtatctgagtccctgttttcaattcttttgggtgtatatctaggatttggaactgtggatcgtacgataattatgtttgctttttaaggaattgccaaattgttttcacaatgcctgcaccattttacagtcccatcagcaatgtatgagggttctaatttctctacatactcaccaacacttactattttgtgtgctcttatttgattaaaaaaaaaaatagtagccatcccggtaggtgtaaagtggtattgtggttttgattttcacttccctaatggtgaatgatgttgagcattccctcctgtgctattagatatctgtacatattcttttggaaaaacatcaaaaatgctcaagtcctttgcctattttccaactgagtctgtctttttgctgtgttcaggagttatttatatattctggatattaaagacttatcagatacatgatttccaaatatttctcccattctgtaagctgccttcacttttttaatatcccttgatgcacaaaaatttttaattttctcaagtcccgttatctatttttaattttttttttgttcatgtttttgatgttatatctaagaatctactgccaaatccaggtcataaagattttcctttgtgtttttttttttttttttttttttgagacggagtttcactcttgttgcccaggctggagtgcaatggcgcgatcttggctcaccgcaacctccgcctcctggattcaagcgattttcctgcctcaacctcctgagtagctgggattacaggcatgcaccaccatgcccaacagttattcccttatgttttcttcatgaatttagctcttgcacgtgggttaatccattttgagttaatttttgtctgtgatgtgaggtgggattgaacgttgctcttttcgcatgtggaaatccagttgctgcagcaccatttgttgaagagactcttctttcctcattgagtgtatctggcacgcttttcaaaaaccagttgggccattgacatgtgggtttatttctggactcttgattctattccattagtctatatatctatctgtacccaagaccacactattttgatcactgtagctttgtcattaagttttgaaatcagaacccatgaatcctctgactttattctttttcagaattgttttggtatttggacaacttgccatctcatatgaaattgtggatctgctttttcatttctgcaacttttagcatttaataaacagacttttaaaaacttagatttaccattaaaaatagatagctgaagagtaatattatttaattttgccaa

SEQ ID NO: 915880 - DNA, 4001 bp, Homo sapiens
ttgatctcggactgctgtgctagcaatgagcgagactctgtgggcgtaggaccctccgagccatgtgtgggatataatctcctggtgtgctttttttaagcccattggaaaagcgcagtactagggtgggagtgacccgattttccaggtgccatctgtcacccctttcttggactaggaaagggaattccctgaccccttgcacttcctgggtgagatgatgcctcgccctgcttcgggtcatgcactgtgtgctgcacccactgtcctgcacctactgtctggcactccccagtgagatgaacccagtacctcagttggaaatgcagaaatcacctgtcttctgtatcgctcatgctgggagctgtagaccagagctgttcccattcggccatcttggctcctccacctggctccataaaattgttctaagcacagaaatacatgtagaagaattctctcatcatttttgtaaaacaaagcattctaatattttacagaacaagataggacagtttttttttcttgtaaagaagttgaagtttgagggtttgtttcttcacttttaattattattaccaaatccattttccttgtaactcacaagactgccattttcagctctctggctcttaagctctcaagagtaacatctgagtcctctttgtagaaggaagcccaccacgatctgtgaagggggaaaagggatgagagatggggaatgtccccaaaccagtgccaaaatacacctttaggttgctatttacaaaccagggtgttggatgcctctagcagttccgcgaaaagcatgtgaatcaaagcaaaagctatggctggtgctcagacccttctgggtgttgagtaaccaaactgagaccagccgcggacttccacccaacctgagacttggaaaataccaggaaacataagagaactccaaaccatcttctttgagagccaggaacaaatgcttagtgtgtacttaactattgcatttacagggacaaaaactggacacaaggaaaaagtagggggaaaaaataaagagtggcagtaaaaatagtattttattccaccccctcctcccctcccttccctcacaacccccagtacacttttcctctcttgctcccacagcaacgttacaatcagaaaaaaataagtttcagggggcaggattggagtgggggaggggatacggctaaaaacagtaaaatcacaaaaggaatttttcaaaatagattattccacttaggcatcgtcttctccctcatcttcagtttcttattttcgcttctgacccctttcttcttcaccaagctcttcttcatcttcctcatcatctacctctccattgttataaccttcatccttctcctcctcgtctccactcacgtcctcctcttcacgttcctcctcctcatcctcgtcctcctcatcttccattacctgagcatcttcatcatactcctcctcatcctcatcctcctccttgtcatccaggcactccacaaagccctcaccatccgagttaggggcctccttgtcatccgggtcacagccgttgagatatgtgagttgcaggaggagcttgaacatcttttctcagtagttgttcaggttggttacctcgcaagtgaaaaggtctaagctctcgaggttttctaactttttcaggggctctattgtgctgaggtctttaattttgttgccacttaaatttagatgtatgaggtttggacacttttctgccaatacttctaggcccactgaggctctgttactgcttagttcaagcttcttaagtttgtttaactttggcaagtttgcaattgaggtgaggcctatgttgattgtatttaataattccagttcttcaaattcatctgtgaggccttccaatttgccttcatttgactgactgttgtccaggaaaagttctttcacatcggagggcgtcctgttccgcagctctaaatgaatccatttgcccatctccatctctcacgctttctctgcagaggctcctgagccagcggaattcaaccaataaaccccgaacccacaaccgcacatttgaaagctcaaccagctctgctgggttctccgaaagtaaattcttaattccaaacacacccaaaatctattatctcccatcacattaaattgtgctatcattcacccagttgctccaaaaccttagaataatgactacttcctctatttttctattttacatcagatagatgtattggctgtacctttacagtgtatcctaaatctgatcacttctcatcatctctaggccacgccatagtatatatctcacggactgttgtcaaagcctcctaactagatcattcttatcttcctgcagcagccagaatgctcattttaaaatgcagaaaaccctaaagactctgccaaaaggttaatagagctgataaacagttttagtaagatttcaggatacaaaatcaatatacaaaactagtagcatttctatacaccaatagtattcaagctgagaataaatcaagaacacaaccccatttacaatagccacaaagaaaatgaaatacctaggaatacagctaaccaaggagaggtgaaaaatttctacaaggagaactacaaatcactgctcaaagaaaccagagatggcacaaataagtggaaaaacatcccatgttcatgaattgtaagatcaatattattaaaacggtcatattccccaaagtggcttacagattcaacactatttctatcaaattaccaatgtcatccatcacagaattagaaaaaaactactctgaattcacgtggaaccaaaaaatagcctgaatagcaaaagtagccccaagtaaaaagaacaaagccagagacatcacactacctgacttcaaactatcctataaagctatagtaaccaaaacagcatggtatcgacacaaaaacagacacatagacaaatggaacagaatagaaacttctgaaataaagccttacacttaaaaatatctgatctttgacaagaccaagaaaaacaagcaatggggaaaggactttcttttcaataaatggtgctgggataactggctagccatatgcagaagaatgaaaccagacccttacctttcaccatacataaaaactaactgaagatggattaaagttttaaatgcaagacttcaacctataaaaatcctagaaaatatgccccaaagaaaggaaattagtatatagaagagatatctgcactcctatgttggttccagcactgtttactaagatttggaagcaacctaaatgtccatcagcagatggatggataaagaaaatgtggtgcatatacacaatggagtactcgtcagccataaaaataatgagatccagtcacttgcaacaacatgaatggaactggagtttattatgttaagtgaaataagccaggcacagaaagacaaacattgcatgttctcacttatttgtgggatctaaaaatcaaaacaatagaactcatggaggaggggctgggaagtgtagtgggggctgttggggggagatgaggatggttaatgggtacaaaaaaataaaaagaatgaataagacctactatttgatagcacaacagggtgactataataaaaataacttaattgtacatttaaaaataatttaaagagtgtaattgcattatttgtaacttgaaagataaatgcttctggggatggatactccattatccatgatgtgcttatttcacattgcatgcctgtatcaaaacatcccatgtacgccataagtatatatatctaatatgcacccacaaaattttaaaaaattaaaaaagaataaataaacataaaaattgaaaacaaattctagaagaaaacctaggaaatgcccttgttgacatcaaccttggcaaagaatttttggctaagtccccaaaagcaattgcaacaaaaacaaaaaaaaatggaccagtgggacctaat

SEQ ID NO: 915881 - DNA, 4001 bp, Homo sapiens
aaatttgggatttctcccccaccttgtcttattttttttttttttttagtacagacggggtttcaccatgttgaccaggctggtcttgaattcctgacctcaggtgatccacccgccacagcctccgaaagtgctgggattacacttgtgagccccaccatgcccggcctctactgtcaattttttttagcacacattatcatttcttacaataaaatacttccttttttaattaagattgtataaaatagtgattacattgaagtcctaatattaagagacttcttgttttccttatcaaacataagagtgaatagagcattgttactattgagtattagttctcgttcaaggaggatgtcagctctaggtcctccttgctaaacacatttcccacaaagcaacaggaaacactttctgatgtgatttctcagaccaggaggacatgaggaaagaataacagcctttatagtaaaatacttgacgtttctagcaactttatttcaaatataatgcaaatttttccatgggcataaaacccagttcacaatatctgcaagttttcaaaacattaacagaactttacacaatgtatagagtgaaagagtctaaacgggtttatcaattcattcattcaatacacatttgtgcccctccctatatgtcagacaccaagactacagaaaagattgagtcatttgcctgaaataattcacagtctactcaaagaagaaaaagagagagagagtgggaatgtgaatgcccgaagtgcaaaaacagagcacaagtaacttggagctcacagaagggggcaataattatcaagcttcaatgactgtttttgaagtcaccaaatgtagcacttggaaaaacagggacggacgtagggcatttgcctatgcttgtcaaggcttacaaaatgcccagcaggggcacaaaactgataaaaagttattgattcgaatcaaaactctcattttttaaaatgttaataacgtttttgtcctcttaaacataaaatgttccttaatttatagtaatgaaattcgatgtgaaaaaacaagaatgaatgaattttttaggtgatgtccaatagctaagcaaataagacactctggttttctgaaactaatttccaatttcacctagtcctgttaaactaaaatatgcaaatcttaaatacgttttaaaactgcacaacttatctgaactaagtctcaaaaccttttgtaacccacaacaaaatggaaagccaaaactcttcatggacgtaaaacagaaaacagcgcacgtttatccacgaaaaccccaagtttactacttcctcattacagaatttctcttcctggtacaggagcaggatggttatcaaatattccatgtcctcaaattctcagtccctgaaatcagctaccaagcctccaaagaacctggctcggggagaaaagcgaggaggtcaacttacccaagcctttgcgcctaggtcttagtggggagggcggcactgccgggacaagactgggagactccaggccggtggagggaaacggcaacaggagttttccaccgggaattaggggtgcagggctctgtctcgccacatacccttcgccccggggcaggtccgggcctcacaggcgcctcccctggatctctgcagccccggggcgcacgaagacccccagggacctccgaaggttggcgaggtgggcgtccacccaacgcagcctgaccccacagtcccggagcgccgcggtgaggcccggcccacgggccgccctccggtggaccccactactggacacaaagggaggaggtcttcccggcctgtggcgcccttcccccgacggcggctgcaccccggagggagcccggcgctactccggatgccgctgcggcacctcaagtcttcgcgggtcgccgactgcccagactccccacctctggttctatcccttttgcccgggatagagcagtcacgtccactcgctacctcttcttctccgcctctggacagcggagcagtcaaatcccgccggatccacccagcccggacggcgcgcgcccgcttatgcaaataaacacaccccaagccccaaggggcggccaccgctgccgccgcgcactcctgccacggctcatgcccgcgcgcgtagaagtgcccgcctaccccgcggacggggcgtggctaagcctcagggacgcgccgcgttcccaccaatgccggactcgggcagcggcggcgcgcccgacgtggcgcgcgcgaccccttcgtcctgcccctcctcctcgggtcccgtcggcctgcgcgcgcccgggagtttgaatttcctcggatttggagcaatatcgcagtggaaggcgctgtgggttgaggtcgccgcccacctctcctaggggaactatggagctggcagctgaaagactcagtgaagcaacgaggatgccggggagagggaaggggctgggctctgggcggtgccaagtctgtgagggggcgcggtcaccgcccagggttcccacgaacgccaaggcggccacgtcctgctccccctggtgaagaagctgccctgggcttgtcgtcctagggtctccagacatgtctgaggtgaagagccggaagaagtcggggcccaagggagcccctgctgcggagcccgggaagcggagcgagggcgggaagacccccgtggcccggagcagcggaggcgggggctgggcagacccccgaacgtgcctgagcctgctgtcgctggggacgtgcctgggcctggcctggtaagtggacgcgaggctgcctgggccggcctcctgtgggccccctgctgtttgggctcccacccggctcaacatccagccggaggtgatccaacctcccagacctgggccttctgtgcctctgtcttgaccccaaaggaaggaaacagcccagccttgtttttccctttcgggcgtttcttgtatctcatttccccccgtgctggtagcatgcccctatcgctcagaaggagttgaggctaaggtttgggaacgagccatttgttaagagctgcagattcggccacgctttctgaagctcccgctacacgtcagaagcgttcacgttgttataaaccgttacttcctgtccgctgtgccccattccgggacacatctgccccaccctactcaccccataaatacctaatggaaatacttgcaaccttaaaacagatcattatgtttggagaccgaggcaggtggatcacttgaggtcaggagttcgagactagcctggccaacatggtgaaaccccatctctaccaaaaatacgaataatcagccgggcgtggtggcgggcgcctgtagtcccagttcctccggaggctgaggcaggagaatcgcttgaacccgggaggcggaggttgctatgagccaagatcgcatcactgcactccagcctgggcgaccgagcgagactccgtctcaaaaaaaaaaaaaaaagaaaaccatatcattatgctcccaaaggagcaaacgttatagtagcagagcttggaggagtgctcatattttgatcaccgtgcatgcattatgaatttaaggtcttttattaagtaagttacagattgaatatggtaaagctacaaaaacatagcacttgtgttcacttaaaactaaccagttgcagttttaaaatcaggtaaatggcgatatattggtgtcattaggaaaaatgaatattagaaataaccttaaaaccaactcgtaaaaaaagaaaaaagaaaaaaaccaacttgtgaattttattttcccagcctttttttttctggcgggaggagggaatagcccatttcattttaataagattggcatcttaatagaatttttctccatttttcattcatgtgtaaagttatttagtaagactgttgttaatcttccagagtgatagaattttagaagagaccctggacatctagacattttttatgctactacatatggaattatactttact

SEQ ID NO: 915882 - DNA, 4001 bp, Homo sapiens
agtgcaatggcgcgatctcggctcactgcaacctccgcctccctggttcaagtgattctcctgccttggcctcccaagtagcgggattacaggcatgtgctaccgtgcccagctaattttgtatttttaatagagacgttgtttctccatgttggtcaggctggtctcaaactccctacctcaggtgatccgcctgccttgacctcccaaagtgctgggattacaggtgtgagccatcacacctgaccttaaaaaagaattctaacagatgaagaacataaaggagaaaataaattgttacttcaactccaaactgatatctatattaccttctgccccatcacactcacactattgcaatagtcttctaactggtctccttgcttccagtccaaaacccatcacatgtcaagtaaatgtgtctaaagcactattttagtcatatctctgtgctattcataaattctccaaagatattccctctaccataaagaaaaactttcattccttgagcctggcattcgaagtcctctatagtataataacacttcaaatttgctttctggtcttactgcaaattgtttacataaattttttgtagcctaaccagtttattcattatattccagacacaagtctctataaaagcttttaaattctgttcatcaataggattcaatcaacctggaatctcctcttctttgtcgatccaaagtctgcccttctggcctggcatggtggcttacacctgtaatcccagtactttgggaggccgaggctagtggatcacttgagcccaggagttcaagaccagcctgagcaataaagcaagacctcatctctacaaaaaaattagcagggctggtggcccatgcctgttgtcccagctacccaggaaggtgaggcgggaggatctcttgagcccaggaggtcaagacagcagtgagcagtgatcacaccactgtactccagcctaggcaacagggcgagtcttaaaaaaaaaaaaaaaaaaatttggttaggcatggtggctcatgcctgtattcctagtactttgagagaccaagggtggagaattgcttgagcccaggagttccagaccagcctgggcgaagtagtgaacccacccgctagtctctaaaaacaaaataagataaaaatttttttaggtctacacttctcttagaatccagctcaaatcctagctcagctgaaattacttccttcagcctgaagtgttcttcctctcccatgcatttttctaacactgactgtgcacaaatttatcaattagttatagtcaattcatttgtcaattagcacattgttctcatgctatcacgtctgttgttaccttaaactgttatttaaacagttgtacttttacttaactttttttttatttttgtgagacagagtcttgctctgttgcccaggctggagtgcagtggcgtgatctcaggtcactgcaacctccgcctcctgtgttcaagtgatcctcctgcctcagcctcccgagtagctgggactacaggcatgcgccaccatgcctggctaatttttgtatttttagtacagatagggtttcaccatgttggccaggctggtctcaaaccctgggcctcaagtgatccaccctccttggactcccaaagtgctgggattacaggtgtgagccacagcgcctggctacttaattttttatcatggtgaaacaaacactgatttggttaaagtcacttggagatgtaaatatttactaataataaaccatcttatttaagactaatatattaatcaataatagggaagtttgaaaacacccacagatgcaagaatcagcaggacacacacacacacacacacacacacacacacacacacacacacacacacacaccattcttgcattgttcaagaatacttgccaagcccccggatccattttacctttctcagaagtcatggtgctctgtctctggacttcctcctctggagtcataagttgtgctgattgttcctggactttgttgcttcaggtgtgcccactgccacctgcttgggcagaggatgactcattcccgcatctcaggcagttatgggaatctgagctgtctgtacaaacagggggccgactgagagggacattatcgtggggatttgcatctttagtgatgagaaagcctatgatgcaaatgacatgaattttgtagggtggatcactgggtaccaaattccaaagttcttcaatgacatctgaatttggtaaactttctctttctttaaataaagattaaggcaaggtggatccatcattcttttttgttttgttttgttttatttatttatttttcattatctcctactctgcatcaaggatgcatcattctttttttttttctttgagacggagttttgctcttgtcgcccaggctggagtgcaatggcacaatcttggctcactgcaacctctgcctcccaggttcaagcgattcccctgcctcagcctcccgagtagctgggattacaggcgcccaacaccacgcccggctaattttttgtatttttagtagagacggggtttcaccatgttggtcaggctgtttttgaactcttgacctcaggtgatccacccgcctcgtcctcccaaagtgctgggattacaggcatgagccaccgtgcctagcctaggatgcatcattctttaatggagagatgagaggaaaaataaagttaagagagacttaatctgtaactatagcttgaaaatttttatgttatctggtgagcacactgtggccttggctttcagctgttattcacctatttccaacttcctctcattttgctctctgtcctacatccgtgttggagaggggaggggagctattagatacaaaatgagaaggaccttggcctctgagtcagctaatttgtgtacaggtctttggtgctctcttcatccttgaatctaagattaagtgtgtggccaagtccacttctgccctttttttttttttttgagacagagtttcgctcttgtcacccaggctgaagtgcaatggcgcgatctcggctcactgcaacctctgcctcccaggttcaagtgattctcctgcctcagcctcccaagtagcagggattacaggcacccaccaccacaccaggctaatttttatatttttagtagagacagggtttctccatgttggccaggctggtctcaaactcctgacctcaggtgatccacccgcctcagcttcccaaaatgctaggattacaggcgtgagccacctctcccagccacttctgcttttttatcccccttgaaaaagtaaatgccatacttccctatgccattgctctctgttgcctgaaccctgggtcaagttcaagccaaaaattcctctgagtctcagcacttactcctagaattgaggtcactttttcaaggcctaagtctccctctagtgtctcaaatctagaactcctgaactttgaatctcaaggccccatgaacctgaaacccgaatcctacatacaagactttacttagttatgaaagtcaacctggagcctccatgagataaagcaggtgtttcgacaggggcagaccagtgttttgaagaaggggcagaaatcccacatcatcaataaaggcccttcagagaccaagtttttctaagttaggtaagagtagaatcattgtagaataaaagtaggttaggccaggcgcagtggctcgcgcctgtaatcccagcactatgagaggcagagatgggaggatcacctgaggtcaggagttcaagaccaccctggccaacatggcaaaacccagtctcctaaaaatataaaagtcagctgggtgtggtggcaggtgactgtaatcccagcttctcggaaggctgaggcatgagaattgctcgaacccaggagggaagtttgcagttagccgagatctcaccattgcactgcagcctgggcaacagagtgagactacg

SEQ ID NO: 915883 - DNA, 4001 bp, Homo sapiens
atcttgaactcctgacctcaggtgatcatcccgcctcagcctctcacagtgctgggattacaggcgtgagccaccgcacctggctaatagctatttattgaaagtactgtgataagcattttagattcattgtatcattttaaatttacagggcaactcattgaggttaaaatcattctatctcctttagaaacttcaaaactgatcttagttcaagaaagaagttactattcagtgatcaccgaggctctaacaagtggagcctagattcgaaaccaaaccctgtgacttcaacacccaaacatttacgttcttacgttttactgtacagccttcctcctggataaatcagattaaaattttgaagacatgtatatagcttgtcagggtagtacagttattaattctgtggttaccacattcttttatatctcaagactcccagccccaggatctaagtcatagctcttgattatggcccacccccagtagggagctgaacttactacttctgatatgaaagaagccagagtagttgtttcttccaagtcactcacatctgagatggccctcaaaccctccttggtggtctccggctgagagatgtttgcgtctttctgatcttggtaatactggatcaactgctgaaccccagaccttaatgcaggtttaagtgcagcactgatcgctagacccataggcccccctgacatcccagccatggtcatcagaaggtcatatcccagatctatggccccatctcggcctcgttccctggccttgcccaggcagttttgagtagcataatacaaagctgtgcccaggttgtagaaggttcccactcctggcagcagctggactacattgtgcacagcttgctccttctcattctcacagtcctctgtcgggagggagcgcccgacccttcctgtgctttgctgctccctggctaacagctgcagagcagaggccagggcttccactgacacgttcctctctgtgcttctgcctttctggagccctcgaagatgctggatgaggacctgtgtagcattcacaccaccctggcggtagagctgtagctgtagagcccaaacatcagcctgacaaccagcttcctccagggcattccttagagccaggcttaccaagaacttgggtagaggggccatgtggctgaaaccaggcagtgactttgggtgcagaaattggcaggacaaggggtctgaggagggtgtctgggattccaaggacaagggaaagtgcatcaagacatttgtctgctttccatatgaagtggcatccacagggtgcagcaggaggtagcaaagtagcagctcaactggtatcatgatgagtctgaggccacgcatgtctggagcagagtaccctagaaaggggagaaatccgaaacatacaaaccatttccctaagggcgatggtgagcccaagactcagttagggggacacctcatacatcacctgcttccaagcttttgtactttctttttagagacagggtcttgctctgttgcccagactagagtgcagtgatgggatcacaaatcactgctgccttgaattcctgggctcgagggatcctcctgcctcagcctcccaagcagctgggactacaggtgcgtgacaccatgcccagctaatttttaaattttttgtagagacgtggttttgccatctggcccagcctagttctgaactttgggctcaagtgatccttccacctccgcctcccaaagtgataggcttccagatgtgagccaccgcgcctggccccaagcttctgttctttttaggtaaaggcctaggaaataggaaatgcaccccagttgctcccacttggtctcccccatttacaggtcaccagggacttctgttttatttccacccatatatagggaccccaaattaccacacagtccagtcattgagaagtgagactgccttggtaggtttgatcgcttcctgatcctgttctgcctagttctgtgtcccatgaggaaaggagatatttgctttcccctatgatcagtgaaggatgtaatctctgcaaatatttgcccatttatactggctgctcaaaccttgtgccccttgtcacacactcaacctctatgcctacagtcctgttctttggcatttcctgtatgtccctgccacattcccactctaagctcatgataggagccagggaaattcagaattaggaaagatgagatgtttgtgatactctcatttctcttcattttaaaaattaaattagcggctgagcatggtggctcacgcctgtaatcccagcactttgggaggccaaggcgggcggatcacaaggtcaggagttcgagaccagcctggccaatatggtgaaaccctgtctctactaaaaaaaaaaaaatatatatatatatatatatatatatacacccaggcgtggtggtgggcgtctgtagtcccagctactcaggaggctgaggcaggagaattgcttgaacccgggaggtggaggttgcagtaagccaagatcgcactactgcactccagcctgggtgacagagtgagactccgtcttaaaaaaaaaaaaggaggggagctgacacctactaagtggagaggggcaaggctaacactggtcacatatgtgtttaagggaagaggtgaaataaagagcattcatctgtcctaagtggtctccaacatttctaactacttactgtgtgccatccttgaatacagtcctgggaaaggagactcattacttatgtgatattgaatagctgaaatgagccgggatcaattcctggatcattttcctcacaaagcacttcagaatagctgtggaacatttgatagattatattgtcactgtccatggacaatttaaatgatcttgagagcttcttcaactttttgcctaattcttcaatatgctcccaagactcatacctgcagttcttggtgatgtggacacccaaaactttgaactgtgacaccaagcatcatgggagatggtttctcagcaaactcaatcaccatctgagctacctggtaggccagctaccccagtgggtatatttgccaccatccatacatttcccaggatgggcagctgggtgctgggtttattcacacttccctaagggactactagattcgtcacaatgatgttggtattgccttcctccccattgaactttttgactctcacggatgagggtttcagtggtatcctttcctcgcatctgaaactgcagaacatgggcctcagttgggcagcccacctcctccaagggcaccctcagagctaagttggacaggtactcaggcagaggggctagggagggggctgtgtgtaagagatcttggcagatcctgggatctgggagaggaatctggctctccatgttctccaaataatggagagcatgtttgatggatgcccagtctctgttaaagatggctggagggtcagagtctcattctgagcatttcttggaaaggcagacaccagggacagcaggacacagcaaagcagcagcacagcttggaccatggggggacagcagagcagccctgctggaaggaagcagtgctcaggttgggaagtggagaaaggctcaggacaaagagacaccaagactggccagagctagaaagtgtcttagctcttggaaacttcggttgccctgagcacacctcatcttcactcttaaaggatgtgggtgatcctcctattttgaggagaaacaagtcagaggaaaaaaacagtccaaacatctcatttgctttggtatcttcatgacctgaattactattattgttgttgttgctgtttttaatctgccctttcccagaatcacaaggaaaccagaaagttgatggcttccaaaacagtgaaggacaaaacatttgcaaatatttatgcatctcttcccagcccagactttgtccttctcacctttgacccatactgacaaactgacctt

SEQ ID NO: 915884 - DNA, 4001 bp, Homo sapiens
atttaaaggtttcagagatgctaggtatggtggctcatgcctgtcatctcagcactttgggaggccaaggcaggagaatcatttgaggccagaagttcaagaccagcctgggcaacgcagcaagactctctacaaagttaaaaaaaaaaaaaaaaaaggtttcagagcacacatgtaattgcagtgattctggaggctgagttgggaggattgcatgagcccaggagttggaggttgcagtgagacatgaccacaccactgcactccagcctggatgacagggagactctatcttttaaaaaaaataagaagaagaataaataaataaataaataataaagctttcagaggctgagtttgggtctcactttaatttgagaagttaggatggcagctagaagttaccacctactcctcagtattaatagtcaccacttttaaagatggggcctcaagttaccacaggtgatagtcttgaacagtaatgtccaatagaaatataatttgagacacatctgtaaattgtctagtaactccactaaaaaagtaaaatggaatagatgaaattcattttaataatatattttatttagcccaatatgacaaaatattatttcaataggtaatcaatattaaaattattaatgaaatatttaacattttctcttcatactaattcttggaaacgtggtgtttatctcatatagcacatctcaatttggactagccacattcaagcgctcaaatagccacacagctctacaagatgctaatgagcaaggaaagtggcttaatttagtggaaatccagaaatgccaaggttggaaatacagtttcacaggggtctggaatagactttgaaatcactagtccaaatactatttgatatttgaatcttgtctacaacgttcctatcaaggggtcatccaagactagtgcttgactcacactccagggatggtgagctcactgcttcctgaggctagcgtgtcttcaactcaaaaaagttctcattccattaaaacacatgttttcttatagtgtccaccctggttaggtgggttcctggaggtcaggagtgactagcggacttttatgatatgggattagagattaagtgaacacagccttgctaaaggcataatcaggttggtttatggtctttcatggaccttaattaagaggtttgttaggctaagaaggattgggggagttaagaactaaaaaatgtcaccactgagttagaaactgttagaaggctagtgctggatatctggttaaactcgtccgatacactgcagcaagactaaaagacaaaaagaaaaaggtgtgtatctatgcaaatttcgctaatatggagatagaatttcactaatacggacatagggactgagagaatcatttgacttattataaactttaaaacataattgggttctaattcataaagaatgtcatttccattagacctgtattacaaaaaagaaaaaaaaagtcatcctaaatcttaacgtacacacgctttatcaaaagaatttccgtacccagaaatcaaaggcacttcaaaagtctcatttcgtatcttgagtttgttttaacatattcctcccgcaaaaacgctctggaaatcaaagaaaacttttttaaaatttaattcaataaaaatgacaccgactggctgaattatgatgggttctgagtggcggttgaaataacacatttttcctctatttcctcttttttttttttttttttttttttggttgcgaagaggtgttcttttccgggccacctccaccctcccgcactccccagttctacctttccaaggcaggggaaggtgcatcctcgccaggctcctgcccgcgccttccgagtacccctggcccgcagccggtgacacggcgcgcggaacatccgtgaacgagttgggttacatctctgtccccgcgaagctgcagatcgctgaccgccccgcgcacccccgcctgcctgcacactgtcaaccgcacttaggggaaatttttggaacagaagctccgcccatcctgctcccactgcctccactaaccgactcaaaacccccacctcgggccgccgaagcaggtttcgtcacacgatctgggggactgtattttttacaagaaaacaagcatcaaaaaaaaaaaaaaattcaaactgcacgcgccggccaatggggaagaagtgggaggtgggcggaggccgcgcgcggcgcgcgaggcggggaggggccccgggcgggcgcgggggctggggccgcgggagattcggcaaacgcggcgggcgcccggttcggggcttttttttttttttttctcttcccaaaaccgactagagcgcgagactccgcctgaagctgcagcttctcggatccaccttaaatcttcagcggactcagcgtcggggtcagtgggcgcagccaatgccaatcaagtttacaaccagcagcacgggagggaaaaaaaaaatcatctgcaagttctccctacacacaaatacgcgcgcgcacacacgcacacacgtacgcacacacacacagaaagaaggagggggtgggggcgggcgctcgggagagggcgagaatgtttgtgaaatgcgcgtccgaggctccggggccgcggccggagcgcggggcaggcgcgcggggagcgcagcccggcgcgagcgccatgatggtcgccgcggttcggggcccgttttctggagggggagccgcaatgatgcaatcccccggccgcgcgccctgctccctgccttttctcaacgttcctttagaggcgcgtcgaggtttcgcgcccaacgccttgatttctttttgtactgctcgctccgatgcctgctgctcagtgtccccacgcgtgacaggccgggcgcgcgggcggccgcagaggggctgggccttacgtgtcaactcggcactttcggttctgcggggtcggcctgaggcggaccccaccccatcccaccccagtccccaggccagcccggatccgggaggtggccgctgaggttttccagcgggactgtgggccccttccccacccccagctgggcccgcaggattttttacctcccttttggctgagagggggtgggtgggcgtagggtgtggcccaggtgaaagacacagcaagttttaaaaagaaattcatactctgaacaccagacaggagatcctagaggagatttagaatcactttttctgtgcaaagagcttgagagaagagcaagtgtgggcgctgtgatgatgaagatgaaatggcgaaggcagcgtcccccggcctccgggaaagtcgctccctgaggccggggcggtgggcgcaccccggcctgagaggcctctcgccccgctcctcgcctgtgaagcccacgctcccggagtcccccaaacacgcccccaaacccacatttccccagttcttccccgtcccaggcccccgcgccgggcggccggggttgcgatgggggcacgttgccgagcgggggtgagggcagaggggacccacgcgggcggccgtggtgcggggcccgggctgcgcgccgccgtggccctccccaggcgccggcgagccgggcgggctttcgaaatgcgcggggctgcggatcattggagcccagggtaggggtgggagcgggctgcagcgccggagggtcggcgaactcgggaaggctctccccttagctccgatatccccacggccggggaggcggccggttactcaggtggagagtccgtttgcggagaggagtgggagctttcgctgctttctcagcgcagaggagaggaggagggaggaaagtttctgagaaaccgcccagcccggctgcgcggcggaggcgcggccgcccgggcgcgggaactgcgcgcgacgacggcgacagtgcggggggctgcacgttacagatgagggagcaacacttgatggccttctcgtcccgaggcaccagccagcccgaccccgcaactgccgcggcgggcg

SEQ ID NO: 915885 - DNA, 4001 bp, Homo sapiens
gtggccacgactggacttggtgcagagctgaacccgagactccagctgctcgctgagttcgtccagagccccggtgcaggactccaggctctcggccagtttctgaatcttggccttcagcacggcctggctaaccttggtgtccccctccgcccgcctggggatgaggaagccacgtgagccaaagaagacgatgaagtagacagaattgtacagggcgatggaggcgttcctcccgcactgcagcagctggcggtccccgcagccctgccagcggcagaaaaactcgaggcagctcaggatctctcgcatctggtcctggcaggtggccgcgatctcctgcaccctccgcagctcccgggagttgcagaagatcagcgagagatcggacgtgatggtgacggcccctccggctgtggccacccccagccccacggccgacaccagcagcgaggtccccagggtgaccgggctgagcgagagccccacgatggcggcgagggcgcccgttgcgctcagcgagctgccggccacgttggctacgagggagcgcctgcgcaggcgctccaggcgccgggccacctcgcgcaggcgcagcacctggccgtgcagccggcctcggcggtccagcagcagtccctggaagcgccgcagcgcgtcgggcccatgcggctcccgggccgccggcctctccattccctgcggggacatagacacgcggtcagcctggagtctccgtgccagccgccgctcccgccctgctgcccggacgccagcgggaacttggcacgagttcagcggagcagccactgccacgctaggggaacgggtctgtttccagtggatcatgagacgagttctcaaagacctgttctggaatccggggggagccacacaagttctcaggaccttatctctgcatatggaaataggaataatgctatcttctgcttctctcccagggaacgttaacgatgggcttcatcagctatgtgttaaataagatttaaactgggaggggcgtggtattagaaggcttctccagtactgaggcctttgctctacttaagataacactttgtaagtggtgggttgtacagtttacaaagccctttcatcatgtgaaaattggatcctaggagttttgcaacacacttttctctctctctaatgaatgaaaaagacttcaccaaaacctcaaaaatcgtattttctaccaagcagaagaaacatctaagttagatgcttgcctgaagcaactcttctgcttgtgattcttccaggctcttttcttagaatcaagcctaaaatgagatttgcactgtttattctaactagggctccttggatcttcagaaacatcagtctttgctgggtgcttgatttaaactaagtcacattaaattaataccattatgtctctttgttatgaaagttttcttttaaaaatgagtaatggttgaataaaataaagtggccaaaatttttgttcaacaacttctaccacgttgaagccaactgaagatgactgacaaagatacgaacaagttgtacatcttgggggaaaagtatattcatcctagttgcagattcccaccttcatgtccactgtactcttcattattaggaacttcttaaaagtggcaaatgagccatagaaatagagcatttcaaaactgagctatcagggcagaaatcattctcatctggaagaattgcctgcatcagacatcagattctagaagcagctgattcttcacagagcccagtctagaatcctcatctccttattcacaggacttaattttacttccatgcttccataatccaacccaccagggataattttccaggtgaaaagagaaaatgagaaaaagtcatcccgaatatatgcctcagggttccccacttaccattcacttctgtctgcctccaggaaagtaaaatctgaggctgtttctggatgagtgtgctttatagttccagagaaccaatggctgccctgggaaagccttgtctcattctgagaatttgccatttcctgtcatgacccctgctgccttcatctagaaggacgtgacatggtggaaaatgacctgccagcacagcacatcccgtatttaggaaacgaacattgtgtgttcgctttcccctgaacgcaggaagagaaccacaggctcttccctaacttgaaacaagtgtgttgtcattctcccagtgggataccctgcctttcctgagaatagctaatgacgcgatagagaaggccttcaaacgcaccccaggctgaccaattatagtgtttcttgaggccaccattacaaaatcatattttaaaagaaaagggagggggtggaaaaccctcatatctgacatagccgctcatactccactgctgtatttttaaaagcgttgtgaatctgtgagtggctggagcctgggatcatttggcatgcagcgggtaccctgcagtcctaagaatgcaaggccacacccacaggaagtgctgcgtgcagttttgggcatctccagctgtggagaagacattggcggtctcagaaagggcacactccaggtcacatgcatcagaaaaatcagtggggtcaggctgcatgaggagctaattgtacactttcaaccacaatagggcattggcttcccaggttttcatttgaagtagcaattgtagcccatgtgatagggaaatgagtggattctgtctacagggtcatgaggcatgggctgaagggcaattattttgataattcagcacagaaaagtgaatgtagcttctgtggacttgctgcagaccagaccagatggaacatagatatctctggggcattcagaggtggttggagctcagcctaggaattcagtcctactacatgtccccaaatccatccatcgtccttctaaccctctcctccagataaggagggccaaattcgtttctcacttgaataaggattatctcaactctctggcttacctggaaagccttaacagccgtatcattctggaacatgattaaatcccccacctttatgactatactttgtatttatcaacacagtataacaacagtagcaacagaaaggacaaccatagtcctttcaaacttgattattctagatttggtccacttccaaatattcttgttacagctcctcaaaggatagctgtaacctcaatctagatgcctccagtgtgtccttttgaggttagaagtggaagaatatcctcctctatctccatagacatggtcactccaaatgggatgtgggccagcgcgaattggggaggtagacaagagggaacataccactgattcttcagctgacacatgttcctctaacttccctggacatcatcctgtgtgttttgggtttagaggaacacaattaaatctttattttatagatgaggaatattgctgggatacagggtcttcctcagagcatcaatatcatagtacagaggtgggatgaagaaccagaaggtagaggaaaatagacagcgtgtatactgacctcagcccatatcttggaatttgtttttctctgtgttgaaagcccattttctttgtatttgcctctttatggaggcaaaaaaaattgagttaattgacagtttgggctaaagttttactgcccataaaaacctggtactttggccagtcatggtggcccatgcctataatcccagcactttgggaggcagaggagggagggtcgcttgaagtcaggagttcgagaccagcctggttgacataatgagaccccatctttacaaaaaatttaaaaattggccgggcatagtgactcacacctgtagtcctagctattcaggacgctgaggcaggaggatcacttgcacccaggaggtcaaggctgcagtgagctataatggtaccactgcaacacagcctggatgatagagaccttgtctcaaaaaaaaagcaaaaaaaaaaaaaacaaaaaaaaaccaactggggccgg

SEQ ID NO: 915886 - DNA, 4001 bp, Homo sapiens
accatgtagatatgacaatgttaactctaaagcaccttgaagatcacctgctccctccctgtctctcattctgtagatgttctgtagattaggaaactgagccagctacagggtggagatgaagagactcacccacatcacatcctaagtgagcgtgagagccagaattagaacccaggtctcctgacttgctctacagtcctgtctacttcctcacagctgggcaaatcctttaagccactcacaaacagtgtatattcctttatgttagagctggaaattaagaatatgatctgtttgtgaggacaacatcaagaatcagttagtataatcactgtaacctggcttaggcatcaccatgtaggttagaaaagcaggatatttctgtgcacctcagtttccataagtgcaaggcaaacagagatccttgttcaaagtgatcatttaaaatctcacattgctatcttcagattccacacaacagatatgaacatggacaaaatgccttctaccaagggctttagtctgattaaaatgccaggagtctacagccatataaaaaagggaggccttgaaaaagtcgtccagaggatgcaaacttaccaaaaaacaaaacaaacaaacaaaaaacacacacacagcttgcttccagttccttacttatctacactaggaggatcacaaaaaatgaacaaaagacacctatgcatacagcccttcggacttattctgaactgtcgatgtaggtaaatccatacaaggatcatcctgggaagtattattcacttagaagaaaaagggaaggaaccccaaaagagaggggaaagtgtgaaacgaaaataggttaatcttattctaagttttcaagagttgagacactaggaaataaaggcacttatttaaataaacccgggatgctgaaccaggagtgtaggtacgaagctggagaaatgttaaacaaaggagaacaaaagacccctggggaaagatgtgctgaattatgaactaatgtcatcctgcactcatttgctatatttacacaccagttttcatctgcagagctcaaaggacttgactctcatctcgagtgtgctaatgaagttcccttgtgcgacaaatggggcaggtactgtatttttctcttcactaatgggaaaacggtgccaaaaggaggcctggtaccgccggaaaagagatccaggccctctgcctctcattctggctggcacaagtctcatcacatcattaggagtagcagtaataagactgactcattatctgtaccggacattgtctgctgacaactttacaggtatttctcattgacttctcctaacaaccctatgaagcaggcacaattattattcctattttacagacgacaaaactaaggcacaataaggtggttttcctgaggcactcagctactacatggaatcaaagtttagatctcgcagactcagttgcagctgagcttgcaggggggtcacgacatcaagactccggccgcggggctctctcccctgttccacagctctgccccggctcaggactcagggcccggcccgccccctcctcagcccgagagaacccggtgggaggcgccgcgagggggccgggcgcactcccgcggctgcccggccgggggcgcggcctccactccggggctggaggggcctcctcggcctcacccctgcgggcgaggggcaccggagcggcgggaggtacctgggggctgtcctgcaacgcctcctctagcaggagcttgtccacggcgggcatggtgcggcgcggctcagccgagggctgggttggaaggacagagggcaggagacgcggcggccgagagcactccccggctctgggctcaggcgacgcggcggccactccgtgcccgcggcggccccgcgcgcgtccacgcctggccagtggccgccgccgcctgcccgccggcccagcccccggccgagccggatcaacaggaagtgtggcgcgcccggcagggaaaccggaagtgtggtgagctccggtcccgacaccggaaatgtggcgcccgcgcttccgcctgcgctcgccggctcgcggggagcggggggctctgggtgccagtcccgttgctgagggaacccttcgggtgtttgttctctgtgctgaaggtccgtcaagtcaatgcatatgaagtccaaaagaggaactcgagggtagaaagataaggttttatctgcttatggctacccagaaagccttttgagttgaaggagcgaacagattttttcttttaatggaaggaaaaacccacacttcccacaccactttttctagataaatttcgacgcccctgaaacagctctgagagcaaagaggtcgcctatgctatgggaacaaagaaaagaggagaaaagctggataactgactcgtctgtgataatcagaaataaccactttggaaaccacagctatttgatgtggtcataattaggtctcgtcctcctggtttatgttttgtgattttggagaatttcataatcaaatgtttagaattggaagggctagataatctaggttccagtgttgtcatttagagatgagaaaatgggacccagagaaataagtggtctgcccagggtcagttagtaaacgccagaggaagaaaagaaggaagggagagggatggaagaagactggcaagtggaacgtgacacctttttacacggaaggcaagggtttctgaagttccttctttagaagttaataagactggccgggcgtggtggttcacgcctgtaatcccagcactttgggaggccgagatgggtggatcacgaggtcaggagttcaagaccagtctggccaagatgctgaaaccccgtctctactaaaaatacaaaaattagccgggcgtggtggcatgcgcctgtaatcccagctactcgggaggctgaggcagaagaatcacttgaacccgggaggcagaggtttcagtgagccgagagggcaccactgcactccagcctgggcaacagagcaagactccgtctcaaaaaaaaaaaaaaaaatcatgcagtatgtgtgtcaccaaaatcaacagaggggatatggtaatatataaattctgcattctgcagagacctcttaggtatatcaagacccaatctgcattgctgacacctctgacagtctagtatagtagcatgctgcctgatcacttgaaaactccaaggccattattcccttggtctggccagcgccaacctgacctgaaccattttatggcctccatctaccatattttcctccacagtattctttcttccctattctttcttgcctccaccatactcttgtcttccctataggtggaatcatgctcacaccatatttcttccctttcctctattttataccgcctgccattcagttcattttacctcatccagtgtcccagactctcttctcactgaaatctaattcctcacggccagactcatgctcttccttcatcctgattgcgagaacagtacaaggatagtattatacccagggaaataaatgtgcacattttaatttgaaaatatgcattacaagaagttagtgccctcagaacccttgaaagggctcagacagccccttgggaatcacagcatttttcatgtaccacctcatcttctaattaaagttacttttcttcaaatactagtattcaacattcaaaaattgtttaagctatcccattacttttctgcattttcttgctacattatgggctaaacagccttagtgggatttcttggaacttaagaactgtttacaacattgtttctatgggaaaatctatcccaaattcaaaacaactaagttacaaaagtagatctggaaatacaacacatgcataaatggttttaatttatctcatttgttaattcatccaatcattcattcatgtattaaatatagactgctcagtgttaagcactgtctcccacttgtttgattctcattta

SEQ ID NO: 915887 - DNA, 4001 bp, Homo sapiens
taaacatatgtgacttcatttaattcttctagcaactctccaaggtagattccatggttccattaacttcattttactgatgatgaaactgaggctcatcaaggttaagaaatgtgttcaacctcccactgtaggaatgtggcagggctgggatgtaaatgggtcggcagcactgaggtcaccagcagggtggctctcatcagcgagcatgatctttggtccacagcgtacagccctgactggaggcaggacaggggcagactggagctggatgctactaccatgttcccgcccacaatacctgccagagaactacatcacaagtgtcctttttccttatatcgtggaaatgcaactgtgatgcccattagaactgacagggaaactctggtcttccctttttaatttaacttggcagtgatcacctctggaaaaaatataaccagctaccttggacactggctatcctcatttactatactgtgtctgctcaaactttggtttggaacaacagagatattctgagacataaagaaggaatgagaccaagaataaagcaaaggcacaccagtagctcaaaatcccacggtcagaaagacacggtcagaaagacactggtatatctcacttacaaagataacaacagcaatcatttatggggttactatggcatgccagcatggagacactttacatatgttacttgttcttcctaacaactcaactaaatagctatttttatttttattttacatacctccaaacacaacctcagagagattgagtaacttgccaaaagtaacagtagcagattcaggagtggaattccatccattttctactgcccgacacttttaagggtatgctcggccagagaaacaaatccaagcaccctatgcacacagcctcagctccctatcactcctttaccttaaagaaactgggtattacctaataaaacactcctagacattctcaagaatagtgtgtgtaattgtgtagtggcccaatgttaacaccactgactactgagaaaattttaaggttataaacaaagttcttatctccataatttggtggaggaagagaatgtcctagtgaaaagaaccaagactttgggaggccaagacaggaagattggttgagcccaggagttcaagaccaccctgggcaacacagcaagactctgtctctacaaaaattaaaaaattagccatgcgtggtgatgcatgcctgtagtcctagctactcagaaggctgaggtgggaggatcgcttgagcccaggaggctgaggctgcagtgagccgtgttcatgccactgcaccccagtctgggcaacaaagcgagaccctgtctcaaaaaaaaaaaaaaaaaaaaaaagaaccaagtctattgaaaggaaaaataggttataaacaaaaagaggaacagcacaaaacatctccacagtgaagacatataaaaccaccaggttatgttttgagattatcttgtttgaggaaagaaaggcctgatttggttggagagggctgctcccagccgggccactcaactgcataacctcagaactacatcttttatttctttgttccgttatgccaatcgcaaaagaaacaaacaaaacacaaaccgagcaagcaacagtgctgttgtcttcaccttacctcaaaagtgtactacttacaggacaagagaataagcccctgaagaagtacaagctgcaggagctcaaagctgcatttgtgttcctatcgcagcaggattcacactgtactggaactgttgcctcattatctgtctctggaacaaactgtgaaccagtcaagggtagtcactcttatttatcttcacattcccaacagccagtagtgccaggcaaggagcagaggcttctaaacaacaatggaggcagatttcttaatccctaaaatgttcagcttcccacatatgagaggtaagcagaaataacgcatgtgtatgcacacagactagttttacaatgcatcgtgcagcactgcaaactaaaaaggagtccatgaatagatgtgtctaaggtcagttaactgctattcagctcttcctgggtcactcagttcaattacaaaagctttggtgttcatttaattcatcctgtgcaatcacattactgaagcaactctcaaaattactcttcataaaactagaagaaacacacaatagatggtttattaggatcttttccttttagtgaaacattttaggtcactgatgacagaaaagcccggtgctagatagctgggctaacttgaaccatatccctagtacaggcaagttgcctgggttccagtcctggctctgtcactttatggtgtataattctaagcaaattacttctctgctccttagttatttaaatagagaatgtacttcaagactattgggaggattgagtgagttaatatatgtaaagcatttagaagagtccctggcacataaaatccatgaaacaggcatttgctattgtttttatgctttgcacataaaatgaaggggatggattagattccttccagttccaagtctaggagtcaccttgggagtaaagctacattaggcacaggtcacatacaagagagtagtatataaatatgctctgatgatcattaaagaccttcttaaagtcagcttccattctgcacaacagcaccatcaagagccctcttaagggtgatggccaagtctcaaaagcaatgacaaataaacttcctatattaaaaggaacatattaaataagaatgataatatctctaaacctcctctgccacatacaagttcaaagttatacaccatgtagatatgacaatgttaactctaaagcaccttgaagatcacctgctccctccctgtctctcattctgtagatgttctgtagattaggaaactgagccagctacagggtggagatgaagagactcacccacatcacatcctaagtgagcgtgagagccagaattagaacccaggtctcctgacttgctctacagtcctgtctacttcctcacagctgggcaaatcctttaagccactcacaaacagtgtatattcctttatgttagagctggaaattaagaatatgatctgtttgtgaggacaacatcaagaatcagttagtataatcactgtaacctggcttaggcatcaccatgtaggttagaaaagcaggatatttctgtgcacctcagtttccataagtgcaaggcaaacagagatccttgttcaaagtgatcatttaaaatctcacattgctatcttcagattccacacaacagatatgaacatggacaaaatgccttctaccaagggctttagtctgattaaaatgccaggagtctacagccatataaaaaagggaggccttgaaaaagtcgtccagaggatgcaaacttaccaaaaaacaaaacaaacaaacaaaaaacacacacacagcttgcttccagttccttacttatctacactaggaggatcacaaaaaatgaacaaaagacacctatgcatacagcccttcggacttattctgaactgtcgatgtaggtaaatccatacaaggatcatcctgggaagtattattcacttagaagaaaaagggaaggaaccccaaaagagaggggaaagtgtgaaacgaaaataggttaatcttattctaagttttcaagagttgagacactaggaaataaaggcacttatttaaataaacccgggatgctgaaccaggagtgtaggtacgaagctggagaaatgttaaacaaaggagaacaaaagacccctggggaaagatgtgctgaattatgaactaatgtcatcctgcactcatttgctatatttacacaccagttttcatctgcagagctcaaaggacttgactctcatctcgagtgtgctaatgaagttcccttgtgcgacaaatggggcaggtactgtatttttctcttcactaatgggaaaacggtgccaaaaggaggcc

SEQ ID NO: 915888 - DNA, 4001 bp, Homo sapiens
ccccaggtcctcaaggtggtaaatgctgagaagtggcatggaggagccctcccagacctttctcttctgagggccccagtcagttgtgaaatgatggaggaggaggactgcatgtttcccatggcctttcactcccagtgccctgctattagagaaggacttcctggtcatgctctcaggaagttcctttttcagtctaactggacctcttcttgctgcaaactgaactaattttgttctcagaggaaatgagcccactcctctgcttgcccacctagcctttccttggcccctggcccccagccttgtcatattttcctctttaaagaacagaggctgggtgtggtggctcatgcctgtaattccagcactttgggaggctgaggcgggtggatcacttgaggttaggagtttgaaaccagccttaccaacgtggcgagtcctgtctctactaaaaatacaaaaattagctgggattacaggcgtgtaatcccatgggaggctgaggcaagagaatggcctgaggtggaggttgcagtgagttgagattgtaccattgcactccagcctgggcaatagagtgagactccatctcaaaaacaaaacaaaacaaagcagagaagttccctaattgggatacctctgtcccacagatgaggaagggccacttgtgcagagaagggggcgcccacagagattgtgcgggactcatcaaagacatcaggactcttgtccagtggctcaaggatggaaaaggccgggaactaccggaaacaagcacaaaagaggcactcactgtcctggcttaggatgggggtacagagtgagtgttgatctgttgggggcacaggtcattcctccacattcatgggccttggattcacagggcccacacagacttgagaggggaagtgggtgggacatgggggaagggactgtggcaccaccctcagctcccaaagggcccacggggcccagttagcgcctgtatcatgtaatcagcagccagcttatgggctccggggacctcctcaaggtttggagaagtgagtatgcccattgctgcttgcagggctgtggtgtgtccgtgcctggcctgtaaggagcacctgccacgggacctgcaaaccctcaaagcagaagaaatgctgggcccctcttctctcttgagaaccctgtgatgatcactccaaggctccccgcagcttggaaagcatgtctgctcgggacaccaacccctgctgaggtatagccctgtcttcactgtaatgtaggcgttgagtccaacagaaacctggatgaggctcttcctgcacgacggtcagggtggaagaagccagcagtctgtctgcatcctgctttgctctggtatcattgctcctttcatcctgaccctcctatggtggctgtgttcctggctccagcctctctctctgcctctgtctccatctctctccctacatcacccagagcccatccctcccatctcatcctttacaagggattccccaggacctgccccttgtggatggcaaagttgtggctactcacagcattgacagccaggtccccgcggatgtctgctggcgtgatctcatggagcagagcggctccggccacagcccccagcagctgggcagccacgtagaaggcggctcggagaacggagacgtggcagcccaccaggcaggccacagtcacggcagggttgatgtgggccccgcttatgtggcccagagcctgtaccagggtgccaatacccaagccaaacgccatggcaatctgtagcacagagggcagggcctgtggccagttgagggcagagccgaggccaaagaagacgaagaggagtgtggccaggaactctgcgaacacagccctggagaaggctatggagcggagctcccacatgctgcagagccctgcggggctggcccagctgtctcagggccaggatgctccgggcactcgctctcgcactctatcgctctctttctcaaggcctctggggaggctgggttgtgggcatttatagggtccttccatcccggatctgggcacgtggcggggaggtggagtcgttgaggccaatacctcttctcctccatggcggcctctgcccccatgccccatcccagcccacccacaggcctatcaccctatcttggccttcacagctgactaatgttccccatttaatgagctccagataaggactgacgtccctggttttccgtgtttgttcccttggttaccccagggctgctgccccagggcgtctcccagcccccacagggtcttgtgaatgggaacgtctggtggggattgtgcccggcccccatctctctgactcaaactgttgaccaaggcaggggcaacacctcacacaaaactaagagagaacatgagtgctgctccttctggtaactgggaagttcttctgtcagacctccaattattcctgcttcacagggatggaaaacaactggttggcttgtgacaaatttccaaggcataaaggtttgtgtcttctgtgcttgcattcttgcagctaatcacccataaatcattaagcttcaccttctcctgggagccccagccaaacagcagctcctagagcctgggggcactgggaccctggcccttggtgatggagtcaacctggggcggctgaggaagctgagggtgtccattctggcatcagcctgttccatctatgtgacttaacctttcttgtctttctctgtaaaatggggagaataaaactgacctagtggattggggtttggattgaatgaaacaatgtatgtcaagtgctcagagcagcgcctcgtccacagtaggtggtcaatgaatatcagcccttacttacagtattatttgcactttgaggagaacaggtctttgcacactcatttgttggggtcccagaagctgtgacaggtcctagaaaccctgaggagctcagggccgctctggccacaggagaaagacatttctgtggggcagtgagctgtgcaggctcggggcggctgtgatgcctgataagcagctctctggccttggtgcccactcagctcagcatctgggcagtgctgcctcctgctatcagtgctgctgtggccactggggtcctggaggcgttcaagtctagaagtttccccagccccactcactggcccttccctaatccctccagcctcgctccctctcctggggattcacagcagggtcaggctcagagtggggacagaaggacgggcttctgcaccctgccctagctcctgtccagcaggtccctgggcaagtcacagtcgcaggaacagaaatctgggagagattggagactggagtggagcgctttgtgttgtatcatggggatgtggggtgggcaggaggggtgagtataggcccagggaggggagtgacttatctagggtgctccagcaggttagtggctgagctgggactggagcctggtctggagctttctgccacaccccacactaccgagccacattctgcgcctcagtttccttgtctggacaatgggagtgtggatgcctaccccataaagttgttttgagaatgcagtaagataatgaacgggaaggtattttgcaactgagaatgtatcatatacatatatatatggggactcgtgactcctgctattatgaaggaggaggaagagaaagcggaagaggaaggggaggaagaaagaataaaaattacccatacagaagtgatgttccaaaagagcagggattcctgtggggtttgttctcctgtgtatttccagtgcctaactcctggcctgacacatagacacctggtgccctggcactcttccctcagccatccctcccaacttcaggcattctgggtcctccgggagaagatcgacggagagggggaccccaacccctgtcatataaagggcatctggggcccacctccagactctgcacataggaagagacaaggactcagaggggtct

SEQ ID NO: 915889 - DNA, 4001 bp, Homo sapiens
ttgagctgcaaggggatagcgggttaggaccccggccaccttctggctgtatagccaggggctcggggagtagggcttttggcctccagggacacttagagcaccttggcacctggaagccaagtcctgtggacatcgccccagcgaagccatttgttaaagacactgtacatttcatagtttgcacaggcttgaagctcaggcctgtggccaaagggcagagcgtcagggtagcttttcctggacacgggcctatcaatggctctgcccaacccccagcccccataagctggcatttaccctccatcctgtgggcagctgcccggtttgcctgcctcacaccccatcccggcctcctgcccgtgcctggccccatgccagtgccagccttaaacccgtctctccagtgcggctgactcacagcttgacaatggccaagcaaatcctcctctgtgtttgattaatgaacccagtttgcatggggttgggggctgactctggggctgcaggaggtgggagggaggcaggggtgcggggttgaggggaggagcacaggttggggaaagagggaaccaatactcaacagaaactgctctgcactggccccacattagggggttcctatctacggtttctaaatgtgagccccttgacacctgctgtggcagacacaaccatccccatggaggcgctgagaacaatgaagcacagacaggccagggtcacccaaagccgtgatgacagcccgcttttctctggtggttctactcaaccgctccactgaggtgatgggagaggtgaggggcccaggaggaaggtggagctcaaaggtgagacaggaggaggcagaagtttctggcaggagaggaggggtagcaggcattggagagagaccagggtgggccagcatgaggggagggggagaggaggtgggcaggaagggagcacatatcagcctggagagttgccttcctggccttgggaggctcttgccttcctggtgaagggtgtgggctggcccactctgcggcaccccttttttccaggtggggtaagaggcctggtcctgagcccaccccagggtcgaggctcccaccccccccccagggcactcaccgcgttgacggccagattgccccgggcattgagcggtgccacaccgtagaggatgccagccccggcaatggcgcccaccagctgggccgccacgtagaagaaagcccggagcagcgagatctggttgcccaccaagagggccagggtgatggcggggttgatgtggccgccgctcacgggtcccagggcctgggccagcgtgcctatggccaggccaaacgccagcgcgatctgcaggatggtaggcagcgccgacggccacttgagggccgagcccaggccaaagaagacgaagatgagggtggccaagaactctgcgaacacggccttgaggaaggccacggagcacacctccttcttcatggtggccgcgggggcccggcggcagctgccgcggcggggggcgcccgttgggtcgcaggcggcggaggaggtggatgcggcgggggcgggggcctggctgcggggcgccgcgcactgtcccgcgcccactccgaggctggcggcctggcgcgggccctgctggggcgcgctatatagggggcgggcggccgggcgcggggccggcgcgggggggcagggggcggctcctacgctcgggggccagcgcggcgcgcgggttgggaggctccaggccgctgcgggcccgccgctctccgtcgtccagcgcaaccccggcgcgacccccgccccccggccggggcagccgccggcccgtccgggccacgtgacccaggcggcggtgtagaccggcccagcgtcccgggccctgcgcatgatgcgcccaggttggctcccgcgctctcctcggtgccgtgcgccccggactccctgggagacggggctcggtcccggcgcttcactccgacctcggggcgtctagctccgccggcctttaccgcgctccgtgcgcggccttccccttttcttctcttcgggcttttggtccagctcctccttttcctcctgcgaccggagcatcctgacccgcctcacccccggctgggtcggagtgatgctcgtcccgcaggtcggcgccgctcacctccctcaccgccggcggcgggggcgggcggccgggctgggtcctgcagggcggtccggccgtccgacgtgggccgctcccggcctgggccgggcgagcttctgggcttggaaggctggcgttttgggaaaagtgggcaccgtgccagcctgccccgacgcttcgcaatcctcgacgcccggtagctgggcagtacctggactaggcaacggatccccggaggcgccctctcccaggccggggttccccttgtcgacgggacgggacgggggtgtgacgtgaggccttgagactctgggagttggagtgggggagcagggggggtagagacgcaccactgacctcccaagcgcggtcttggcgtcttccctcttcctgctagaagcccctcaccctggatctaagactctccttctcttcctccacctcccctaagtctccttcaaaccctcacttggtcttgatctctctcccctcgaaatctgtttctgtcagtcagtctttgcaaaaccctatttctctttttgtctctgtctttggtctctgaccctctccctctgccagcctcttcctctcggtctctctccgagaggtctctttctcatttcagtctctctgttctccacctctccatctctctctctctcacaccttctcattttctgtttttccttcctgccttttgctgtcttagtctctctgtctctctctattcatttctctcatcctgcagtttctgtctcctggctattttcacctttcctctgcctcttaatttttgtgcctttctttgtttctgtctgtttctacctcattttccatgtctctctctcttacatgtggtctttctcagtctccccaaagtcaagttcttctacccctggtctgggtgacactttcttccagttcccatcccccttccctctgagcttgtaacccctttgtgacctgctgcctcctcgcacaccaccctctccctcttcccacccactccaggtcgggcatgtggagaacgaggctggagggctctctagggcttagagggggaggacccacccccaggatcccgggagaggagctgcattaaagactcccatccccatgtgtgttagagaagcccttagcacagtgcctggcacagagtaaggctcagtaaagtctccttacgttgtgactgttaattttaaaagccccttgagggtttagtgtggtgctaagctagggggaagagtccagcgggagggtgcagaggaagtagagaacaggtgcctcctctgtcagtttgtcaggcagggctgaggggaggagcctgcaggaatgctaaggacttggaggagcgggctctgggctctgtggcagctaagatgccaaagaaaacaagggctaaagaaaccccgctattgttcctgcccagctctggcatttcctgctggagcagctcctcccccaggtctctcctcttaaggccggaggtcagtctgtcctttcttccatgggtcccagcgctttgtccccagccaatcatgccagctgtacatgccagttgtacgcaggattttcttctgggcctgggacttgggctggacaatgaccctgatgaccccagaggccattgggggccaggctcctttgctgctgaacttgcctccagttcgcaccctttcacttgctttctcatcctctctccccaggcactgtcttcatagtccacaggtctcaaactccagcatctcagaatgaaaggattcacaagtgctcacaagaggcttggctgccaggggaagctccgacctgaagatttgaactaatgagggactataaaggccaagaccttgttctt

SEQ ID NO: 915890 - DNA, 4001 bp, Homo sapiens
gaggggctcacccagtggactgtgaacttcccaatgatgatggcagggccgaaggagcgggctggattcatggagcagccagtgaagtggatctggggagcaagtgcagggtcagggtgggagaaggtttaaggcaggcctgagaggggaccatttctcagtcctggctcagagccttagccccagccacggcctctgtagtgccatatcctgggcctagagtgcagggggtaccactttggctccaaggcacgaggggctcagggagggacactgcctggccttcagggctccacagtttccccggggacggacccggtgtgtgcatgtgcacggtgtcccctctgttccttaccccaatgaggtggcccagtgccacagagatcccaatcatggtggccggggagcctgatgtctgacggctgtcggtggaagcgaagacacagagcaccagctgcagggtcagaagcagctccactgccaccgcctggccagttgagacactgttccggacctggacagagggagttactctggaccagacgcgggctctgcccacggacagacagagaaacccctgccactgggcctggtctcctcagctggaggggggtgacacctcactgccgcccagcttcaggacttcgggaggcctgtgcagaggggtccatatctgctctggacccttgctccctgcagaagtgagtggtgctcctcccaccccaccagtgggttggttggggccagtggttcaggaggcttgcttgagaggagactggcagcaggtgtggaaggaggagatttgggggaagaaggtggaacacagatggttacgaaatggagaaggggcgagtgaggcaggcctcgaggtggagggaagaacttgggaacagtcggagagcagaggacgtgggtggagcctgggagaaaaatgaagtccccgtggggtccccttctctacccacaggccccgcactcccttggccgcatctacccttaaacgcctggtccttctattccttctcctttatgtggcctcttccttctccacctgttcttcgcgccactatcccatttctattctgcctagactgaggtcaaagtctcagtcctctgggtcctggggcccagcccgggaggatgtggagcctgcagctgacttgtttcctcctttgctccctcgcctccgtcctggcctccaccttcaccacttgtgcgcattcccgcctcctggccctccaggtgcccctccctgcacctaccacgttgatcccaagggtctctcggatgtctcccggcatgaccccataaagcagagcagcccccaccgtggcccccaccagctgggcagccacataggccacagcacggggcagagagatgtgggagcctacgaggaaggccagcgtcacggcggggttggcgtgggccccgctggccttccaggtgacctgcacagccatggcggtgaccaggttgaaggtgatggcaatctgtagcacggagggaagtgctgtgggccagcgcatgactgagcccacgccaaagaacacatacagccccgtggccaggaactctgcaaacagcgccctgctgatggctttccaaagcctgcacgccaacatgctggcccagccacgtccccctggctccactgcatccatgtcctggtgccttggccgttccttgccttgctctggggcctcttctctgttcctctggtctctgatctcctgtctcttctggtgtcctgtctctggctgaccctggcttttgctctctgtggaggcttctctggcccccacctgcagctcctccaccacgctcctgtccccaggactgtgctggtcagactggcagggcgcaggcggatgggcttatgcatgtgtatgggggtggaatgaggggtgttgctcatatgcctgctccagcctgagctgacctgatggggtgggatgtgggggctgtctctgggcactgagctggaacctcctacgatgatttccagggcgggttgggcctgactcgtgttgtagacagtccaaggtctagcctgagggtcgcaggtgcagggcagcggggctcatgggatttcagactgttcatgttccaatgtcagcttagatacagcaagatcactcagatccccggcctgcttcagggggtcctgtgcattcccaggtcctgttcgtctggccccctccatatctaggctttgcttccaaatgggctgacaccacaccgtgcccgtaaacccagaaagtaagttccctcctccactcccacctatacccgcactcacagaatgcagatgtgaatacagtcgactttaccaaggacgctgtggacactgtggcctgtggggttgcagaggggcgggtggagaaggggtttattccacagcgactcaaaccgcgtcagatcacacaaggccatgggcacctctgctgtccaccaggggaaatttccactggcccttcactcacttcctcctgcctccctgccctcccccgcgctcccctcccttcttggctcctccgtctctgctctcctcctctcaggggccaaacagatttcactcctttctcacacaaggcagcttaaccattttttgtggctgcactggccctatggtcacccatgccctaggctttccctggccctatggtcacccatgccctaggctttccccttttaaccctagcagatagcaaggtatcttctcaaacaaaagtgttcctccctaagaagagtctgccaagctattgaaataacagtcttcccctcttcaccgtagctgggtgtcctgacctcatccctggcatatctacctgcctacagatgtcccctggttgttctcaggctcctcaaacgcaatctgtctccagatgtgatcctcctgtctcctggtaccccccccaacccccatgttctcctcttgttttctgcagctcagctggtggcatctgggaagcatccttgacccttttctccctccttcccccatccaggaaaagcatcaagtcctgctgattttcaatcctaaatatctcctgactgtgccctctttttgccacccctgccgccctgcagcctttcaccagtctctctgtctgctcccttgctccgtttcaatcaattttccatactgcagcccaagtgctaaaatgcaaatctgatcatgctgctcccctgctaaaatcccttccaagcctcccatccctctggaagctctgtgcctgccttcagggaccctgcagctctccctcacctctccccactctgttaccctctggtttcaccaaatgcacactcttgctggcctctccttggaaaaagctctctcctcttcttggagatcccttgcactccctttgcttgggtaactcccattccaaaggctcagctttgacgtcgcttgctcctttcctgggtggggacccttctgcgtgctcccaccacacctgggcattctcctacactgcagtcaccacagggtgttgtcatggtgtgaatgtgtctccccagtgaggcaaggcggggaggcctttggggggcgggaaccaagttttgttcacccctgcatgtagtgtcttgcacagagattggcacagtaactgcccaataaatatttgttgaatgaatgaataaaaacttcttgacttcccggggcagatgactatgtctgctgcatttcagcctcatactcataccttcccccaactgggactgagccctctgatatcttcaagagaaacatcttaactctggactacaggctctgttcctccccagtccctgtctgagtcccagtaacatccctcacccatttccttctgttctccctgctgtctcgacttcaccatgtcctctccagggaactcctgggcatctcaccctgagcaggctcttgccagcgctccgtggtcctggctccctgtcctctccaccccgtccctgctgcgtgtctctgttctcatcctcttccacgcctttctgcc

SEQ ID NO: 915891 - DNA, 4001 bp, Homo sapiens
ttgggtcttaagtttccattatctatgcctattctgtgcctcttaggaaggcagagacacaaaaacttcttaattacaaaggctaagggtctttgtacccttgctaagctatttccaggcacttctgctgacagccaagccatctcttgccctttccttaaactacagttagaaagcttgttgagttctatctatttacattctaaattcatcatgggtacctactgtttgcatgggcattgtggaagaggagacgaaatccagttcctgcagtcgaaaagcgtctagtctctttggaaaagcaagatagacaactataaaaattctaactatgcaaggtaataattctatgctgggaaacaggacgcatgtgaatatgtgatacatgggagcctttcctggctgaatccaaggtcaatcattcattcggtgaaaagctgaaccttaatggattagtttctttcttagaatgaacttttacagacatgtttttcaaactcaagtccaatgggctatgataatccactgtcccataacactgtcccatgtcccaagtcacggcaagtggaaacacctaccccaacaacaagcccaagacaaaatagcagcaaagactgttactacctacctgattgaggacagggaaggaggtatgcagcgactagattctgtcctgttgcactgacccaagcaatcagactcttgcagcagatctcctcccaataaaactttcatgccatagaccaggggtgacccaatccaacaacagcagagacaggttttaggttacatttctccctcaccgggacggccttactatttcttctcactcctgaccacataccacaatcctccacctccaccaccacattcctcctggcctggaaagatggagacccgccttaatgcaatcaagacgggaattcccccaaaataacagctaccactttgctaatcaagtggcccgttttaacagggaactccacctccccaactcccgccccttccctcaaacgattcgcgtaagcaatggctccattttctgttccgggaatcctggtacttcctaaagaaagaaagcggattggaagacacaaactgagggccagtgacaagatgctccctcctcctgtgagaccgcccccgctccgcctggggaggaaggccccacctctcttctcccaggaagatcagatccccctcctccttctcctgcctcctctccaccctctccccacttgctgccctcttcccaacctgcggttccctagactcgaaagcgcaacctctaccacaatagcgcccatgtggtgccccagcagcctgccctgttggctaacccccaacccccctacgcacccctgccctatgatgggggagggggtgtaaccacagcaaggcttctctcccgtctcctattgctaaggtgggggagggagagggagtagaagaaagcagcattccctagccctttaacagaaaagatacaaacagccatcaccgccccctcatcacctctcctcggacggttttcctctccctcaacagcacacctcctgcaggcgacaacctaactgcagcccaggtcgcccccttgagcgaggcggaggacaaatccgtgtgcgccccccacccccaccccagctctgcgtccttcaaatgcgggggcaggcgtgaagctggcccgacgcaccctctctgagctctcgggtgggaagaatcccaccgccccacgccaagcagtgccgggcggggcccgggaggcgctctatctcctcagccctcaccctgaccgagcctcttctctaccgggacccgccttcccttcccagcctctcacctgttcctgctatcagctgcgccgctgcggccgccgcctctgccccgcaggttccgctccgctccctctggctccccaagccgacttcagcccggctgctgccctggcccactccccggctccctccttccttccctccacctagcaccggaagccgcgacggcgactggagctgtgcggcgtacccccacccccagcccgggatacttcccacctccccgatcgcgcgatagctgcgcggtagctagcggcagttctcgcgagacccatcaccatggcagcggctgcagcaccggcggccgggcgctggagctggagtcagggcgggggcaggtgtgggggctgtgggcggcggaggcgggagccgtgaatggggatgagacagtgaggactgaggtgacaatcccaagctccagggttgtgcctggaatttaaggactgaggcggcaagttggctgcgtaggagacgggctgggctgcggggcccaggggctccttgggcaaagccagcatcgggatatgggtgaacagtcgttgctgtggcatgccttacccagccagacttcatctttatttcttaatctgggctagctgccatcccctgaaagccctcaccgcaccattgttgttgctcactattcctgagactagattactgtggggtctgaatcaagagatcctttcccataaggaagaggaaggagagtgatgaacttaagaggctaaaggaaaacagctggactctgagccagttaagttggaacttgaaagacggagagtggaaacctaatattcagaagtgtggtttgaggaagtgtgcctagatgagtagggattttagtatcccaaggaaaggtgaaggactttgcacccatatttcttgcttcctacccactcctacttccctcacactccgttttgcacctggtctagacatgcagaactgccttgaaacaaaaatagctgtgatagaagggcactagtaatgctaagaacagaaggttcctttttttttttttttttttgagacaagagtctcactctgtcgcccaggctggagtgcaatggcaccatcttggctcactgcaacctctgcctcccgggttcaagcgattctcctgcctcagcctcctgagtagctgggattacaggcgtgagccaccgcgcccggccaatagaaggttctctaagtgccctctctcctcatttacagcagtataagggaatgaacacatggctcttccctaaggcttgagcccaaattgttgctcttatgaatttattgccttggttgattttgtttgtttgtttccttgcttccaagaagaactaagctggggccaggccctgtgttcacacttgtaatcccagcactttggcaggctgaagtgggcagatcacttaaggtcaggagtttgagaccatcctggccaatatggtgaaaccctgtctctaccagaaaatacaaaaattagccgggcatggtggcacatacctgtaatcccagctacttgaactgaggccagagaatcgcttgaacctgggaggcggaagttgcagtgagccaagatcgtaccactgcactccagcctgggcgacagagtaagactttgtctcaaagaaaaaaaaaaaaaaagctggtaggtgccatatatgtcgatctccttgtcctcatcaatccctggtgtatgcacttacagtcccttaacccagtctgttctctctcttatgttaacctgataacatgaccctagaatgtcaagctaaggggaccttaatttaagatggtaagggatgagatggatgacaaggaacctgtttataacaaggaattatatctgtcctgggcactgctattaagggctgctgccctgctaatctctgtgggttgtttttgtttttgtgtgtgtgtttgtttgtttgtttgtttgtttgtttttgagatggagtctcgctctgtcacccaggctggagtgcagtggtgcaatctcagctcactgcaacctccgcctcccaggttcaagcgattctcctgcctcagcctcgcgagtagctgggactacaggtgtgtgccaccatgcccggccaattttttgtttttttagtagagacagggtttcactgtgttagccaggatgatctcaatctcctgacctcgtga

SEQ ID NO: 915892 - DNA, 4001 bp, Homo sapiens
aggaaacgctcgggtcaacgggaaggagtataataagcagggagacctagcgggaggcctgcgcgggagattgggggcgccctcgggtcgggtggggccttggggacgcgcgggagggcgctcacgtgcaggacgttgcggcggctggacaggtggcggccgtgcgccagggccgccccgcgcaggtccacgctactttcgggccggctacccgctggtccctgacaatgagggaggaaactgaggccacggtgttgtttccttcactgcttccctctccccggtgggctgtgaggaggtgggaggcttcctcacttctttactttcctctgcaccgccctccccgctgccgcccccacattggcgtgaggcggtaggcagcgcccgcacccatcctgcgcctctcgctcacactcacccagcctgaggagggcgctgtcggcggtggctctcggtagaacaccaggctgttacccgttaacaccacccaagacgggccccagttcttcctgcggggacagagaggggaggtagtggtagcgaacaggtcattctagaatgacacgaggagggtgctcttccaacaccctgctctaccctatggagttgacagcccaggccctagctgtattctgggttctcacctgagcttgcgccccccttgggcaatcttggtcatgttgagcagacccgacttttccacctcctgggaagtggagggaatgggatctgtaagtcaccctcgccctccatagtggccacggctttccctagggggtctcccaggagtgaagtcccttaaagttgctgggggagggctgggtaggaggatattcagaaagaggaagatgtttatgtggagcaggaaaaggggggagggggggcagggaggatcttggccttcacaaagaaatgggagattcacatgggggtcgtccaggagctgcggcagaggtcgaggggcctgcaaggctggagggtcaagctgcgaggtgcgttggctgaggctgagtgaaccctaggggagaggattggagaaacaggtggggaaacgctcgactcagggatccctggctgaaggaggaagaggggtgggatacgggtgagaggtggggggtgtggtggggaatggagaatgtcttacacaaaacagaaagtcataacaagctggctttttctgcatgtgactgggagatgggagggatctcacctgtgggtcaagcggttctggggtccctgtgtcagatctgaagccctttgcctgaggttgcaggacatcattgttcctcttcagggtctgtgtcccctccatggagccagggttctgggttaggggaggaggaaataaagctacatccagatgccacctctacccactctccacacccttcttatacttggctgattcttctgatcttctgagagccccggagagaaaacacactaccttgaggttcatcaggggaaggaagagcttgaggggacagtggagaagcaggaggtaaggtctcaccgtctcgctgcgactgcggcgcgggggcttccaggacttgcagccagtcagtgaatttatgtagaagcagcgtccagagttggggtccaggtgctgctcccaggcatccagcctctgcagcagggggcatgcagggcctgggggtggggaccgaggacagcggcgaaggtccaccaggttacagtacacagggggctctgacatgaggggctgggggcctgcctgccagaaaagggggaagaaggaggtggtcattctgcctgttgcccttcccatgcttctcttggccttcccacctcctgctccctcccccattgtcttctcaccgccagctctgggctgaggtgacccagggtactgggggagaaacctcaggccccagctgctttttaaaaattctctctctcacagttttctttgctcttctcctcacttcctgttgccaacttcccgcctcccccaccccacccccacctcagggccacaggaaaggggaacaggctttttgtggggtggggggaatgttgaagggggtgccccaccctcacatcctgcaaggtaaaagaagacagagaagggtctacagaagggaagaggagcccctttccacccacggttaagaaagagagggaagggctgggcaagtcacatctctagaggagacctgctgtagcctatcaggcaagcagaacacagaaaaaccctgccctgggctaggagtctggaggaaggaagagcacagggctggcctttcagtgcctccactgcgccctgtgccctgtcccctcagggcctttggtacctactgtcccttctcacctcctacccagtttgcctctcggctgcctctttctcctccttgctcagagtcaactgaatgccgtgacctcacagatgtctccccgcaccacctcagccactctccaccacattaacttgcctttagacttatcagtagtaccaagcgttatcttatttatttgtttttgtgtttgtcatccccaggggagtcccctgaagacagaggtgctgtctgtcctgtgcctagaacagggcccagctcagaagagctgtgactcactgtgctggcactggcttctgacggcaagtcttcctgggagagggatcttccgcttggtccttcctggaaaggcttcagaaggctggggctcagattgtcagtgctgacgctcctacacattttgcggggaagtggaggaggctgctccgagctagcctgagccctgcttgggagggcctgagacaactcctccagggaaccatgaaacaacttcggccctggaaacagaaaaggggagggtgggtggcaggtgatcagaggtgttgttgtaactgggtccctcatcttgggaactcacagggaagacaagaagggcagagggaggatgtggaaaatggcatgagacctagaagccttaggactaggaggacaggcagtgggatgaggatgccatggcgggggcaagaggtaggctgatcaaagaaaaacaagagaagatggttagcagaagcttgagggagggggacctccccaaaattcccagaagccagggaggtaggaaggtgatgggaggtaggaaggtgaagggagagggcttagcgcttactcaccaggagtccagagcaattggccggggatgacggtagttggactctgggaagggatggattcctctatcatataggctgctgggacgaagatgggtcgagaggtggagggagcttctaggcgtcttgccaaccaccagtcggagttggtctttcgaagcagtaggaacctatccccttcagccagagacacctgctggccatctgccccagtataagtaaaggcatagagggcacagagctgggatccccgaggagggcttcgggggcccagccctaggatcccccaggaacttggccaccaccggctggatagcattgtagccagcactgtcacctgtgagaaaaagggacactggagacccagaagggaataggcctggctgtctccaggtagacagacatggttctaggagcagtgttgcagggaggtgaggacgggagcccttgagttgggggagagggtagagcaaacagcctggtgaggatcggtgacaggttttgggggctgagaactcctggtggtgtctggtgaggaagtatgtaagtaacatgagagaggatgtggtcagcagggctgcatggccagcaaggcaggaaattagaggagatgacctaggccagtagttttcctccaagtaccttgtggggcccatcagaagattcaggagcaggagttggtcctgggtagtggtgggagtcttgaggtggacacaggaaggagataagaagaaagaatcaggttcaagacagaaacagggagacacaaggttaatgacaaagacaaaaatgtgtgttattctttattaaatttatgcaagcatcaatgtttccgttaccagtcacctcagaccatagc

SEQ ID NO: 915893 - DNA, 4001 bp, Homo sapiens
gtacacagggggctctgacatgaggggctgggggcctgcctgccagaaaagggggaagaaggaggtggtcattctgcctgttgcccttcccatgcttctcttggccttcccacctcctgctccctcccccattgtcttctcaccgccagctctgggctgaggtgacccagggtactgggggagaaacctcaggccccagctgctttttaaaaattctctctctcacagttttctttgctcttctcctcacttcctgttgccaacttcccgcctcccccaccccacccccacctcagggccacaggaaaggggaacaggctttttgtggggtggggggaatgttgaagggggtgccccaccctcacatcctgcaaggtaaaagaagacagagaagggtctacagaagggaagaggagcccctttccacccacggttaagaaagagagggaagggctgggcaagtcacatctctagaggagacctgctgtagcctatcaggcaagcagaacacagaaaaaccctgccctgggctaggagtctggaggaaggaagagcacagggctggcctttcagtgcctccactgcgccctgtgccctgtcccctcagggcctttggtacctactgtcccttctcacctcctacccagtttgcctctcggctgcctctttctcctccttgctcagagtcaactgaatgccgtgacctcacagatgtctccccgcaccacctcagccactctccaccacattaacttgcctttagacttatcagtagtaccaagcgttatcttatttatttgtttttgtgtttgtcatccccaggggagtcccctgaagacagaggtgctgtctgtcctgtgcctagaacagggcccagctcagaagagctgtgactcactgtgctggcactggcttctgacggcaagtcttcctgggagagggatcttccgcttggtccttcctggaaaggcttcagaaggctggggctcagattgtcagtgctgacgctcctacacattttgcggggaagtggaggaggctgctccgagctagcctgagccctgcttgggagggcctgagacaactcctccagggaaccatgaaacaacttcggccctggaaacagaaaaggggagggtgggtggcaggtgatcagaggtgttgttgtaactgggtccctcatcttgggaactcacagggaagacaagaagggcagagggaggatgtggaaaatggcatgagacctagaagccttaggactaggaggacaggcagtgggatgaggatgccatggcgggggcaagaggtaggctgatcaaagaaaaacaagagaagatggttagcagaagcttgagggagggggacctccccaaaattcccagaagccagggaggtaggaaggtgatgggaggtaggaaggtgaagggagagggcttagcgcttactcaccaggagtccagagcaattggccggggatgacggtagttggactctgggaagggatggattcctctatcatataggctgctgggacgaagatgggtcgagaggtggagggagcttctaggcgtcttgccaaccaccagtcggagttggtctttcgaagcagtaggaacctatccccttcagccagagacacctgctggccatctgccccagtataagtaaaggcatagagggcacagagctgggatccccgaggagggcttcgggggcccagccctaggatcccccaggaacttggccaccaccggctggatagcattgtagccagcactgtcacctgtgagaaaaagggacactggagacccagaagggaataggcctggctgtctccaggtagacagacatggttctaggagcagtgttgcagggaggtgaggacgggagcccttgagttgggggagagggtagagcaaacagcctggtgaggatcggtgacaggttttgggggctgagaactcctggtggtgtctggtgaggaagtatgtaagtaacatgagagaggatgtggtcagcagggctgcatggccagcaaggcaggaaattagaggagatgacctaggccagtagttttcctccaagtaccttgtggggcccatcagaagattcaggagcaggagttggtcctgggtagtggtgggagtcttgaggtggacacaggaaggagataagaagaaagaatcaggttcaagacagaaacagggagacacaaggttaatgacaaagacaaaaatgtgtgttattctttattaaatttatgcaagcatcaatgtttccgttaccagtcacctcagaccatagctgcgtgcttcctgtgcagactcagagagacatggtgacagagaaacagaaagccaaataaataccaagaccaaatcagagagaaagacaaagtgggagaaacacagagggattcagagttgaaatatcaccaccctcccaatccaggacacgattttgggagctgagaagccttgatactgtcctgtacacacaagcctcttgaggcaggagctactttagtgtgtgggttcattcatgcttttttttttttgagacgaagtctcgttcttgtcccccaggctggagtgtgatggcgagatctcgggtcactgcaacttccgccccccgggttcaagtgattctcctgtctcagtcccccgagtagctgggattacaggtgcctgtcaccacacctggctagtttttttatttttagtagagacagggtttcaccatgttggccaggctggtctagaactcctgacctcaggtgattcacccgcctcagcctcccaaagtgctgggattacaggtgtgagccactgcgcccggcctcatttatgcttttatcaaggattgattgagtgcctcctgcgtgcaaggagcagtgtcaggcactggagatgagagaagggaatgagcccttttggagcttaaggagagacagaccttaactaatgacacaataaacttaataattacaattgaatcaggaacaatggacaagtaatgcaagacgctatgacaggtagataggggactgatgccagcttctccttggtggaaggtgggaagtgaccttccctggattaccagcactttaaaacccacacttctgcttctgccttacctggccactcctcttttcctcttctctcagcttctccactgcacaatgtgaggctttctgtttgggtttggagaggtgggttaaggagcgaatgaccctccccactggtgatatcagagagccagctctcttcccctgagggctgggtggctagtactgggcttctgcctcagtgatcttcctagtttacttcacttcaacacatggagaatcctacccctcaactcttccttcccacttccaaaatagtgactaatttcacccatttattcacttatttattcatttggtgttcagtgcttgaatccaccctttttttgccttctctgaaactctctctcctatactttagcttgtttttgttagcttcgtcgcattcacttttaaacatatccaagtctctcccatctttagacaaacctccccttactgggctttccaggtaccaccatatatatgtctctctctctttcttcttctcttttttttttgagacagagtcttgcactgttgcctgggctggagtgcggtggcacaatctctgctcactgcaacctccgctttccaggtttaagtgattctcctgcctcagcctcctaagtagctgggattagaggcgcctgccactatgcccgctatttttttttgtatttttagtacagacagggtttcactatgttggccaggctggtctcgaactcctgacctcgtgatctgcccacctcagcctcccaaagtgctgggattacaggcgtaagccaccgagtccagcctctctctttctttttacagtcgaacttcttgagttgcctacactgtagaggggatctccatttcctgtcccctcactccgccaccttttcaa

SEQ ID NO: 915894 - DNA, 4001 bp, Homo sapiens
aaaattctctctctcacagttttctttgctcttctcctcacttcctgttgccaacttcccgcctcccccaccccacccccacctcagggccacaggaaaggggaacaggctttttgtggggtggggggaatgttgaagggggtgccccaccctcacatcctgcaaggtaaaagaagacagagaagggtctacagaagggaagaggagcccctttccacccacggttaagaaagagagggaagggctgggcaagtcacatctctagaggagacctgctgtagcctatcaggcaagcagaacacagaaaaaccctgccctgggctaggagtctggaggaaggaagagcacagggctggcctttcagtgcctccactgcgccctgtgccctgtcccctcagggcctttggtacctactgtcccttctcacctcctacccagtttgcctctcggctgcctctttctcctccttgctcagagtcaactgaatgccgtgacctcacagatgtctccccgcaccacctcagccactctccaccacattaacttgcctttagacttatcagtagtaccaagcgttatcttatttatttgtttttgtgtttgtcatccccaggggagtcccctgaagacagaggtgctgtctgtcctgtgcctagaacagggcccagctcagaagagctgtgactcactgtgctggcactggcttctgacggcaagtcttcctgggagagggatcttccgcttggtccttcctggaaaggcttcagaaggctggggctcagattgtcagtgctgacgctcctacacattttgcggggaagtggaggaggctgctccgagctagcctgagccctgcttgggagggcctgagacaactcctccagggaaccatgaaacaacttcggccctggaaacagaaaaggggagggtgggtggcaggtgatcagaggtgttgttgtaactgggtccctcatcttgggaactcacagggaagacaagaagggcagagggaggatgtggaaaatggcatgagacctagaagccttaggactaggaggacaggcagtgggatgaggatgccatggcgggggcaagaggtaggctgatcaaagaaaaacaagagaagatggttagcagaagcttgagggagggggacctccccaaaattcccagaagccagggaggtaggaaggtgatgggaggtaggaaggtgaagggagagggcttagcgcttactcaccaggagtccagagcaattggccggggatgacggtagttggactctgggaagggatggattcctctatcatataggctgctgggacgaagatgggtcgagaggtggagggagcttctaggcgtcttgccaaccaccagtcggagttggtctttcgaagcagtaggaacctatccccttcagccagagacacctgctggccatctgccccagtataagtaaaggcatagagggcacagagctgggatccccgaggagggcttcgggggcccagccctaggatcccccaggaacttggccaccaccggctggatagcattgtagccagcactgtcacctgtgagaaaaagggacactggagacccagaagggaataggcctggctgtctccaggtagacagacatggttctaggagcagtgttgcagggaggtgaggacgggagcccttgagttgggggagagggtagagcaaacagcctggtgaggatcggtgacaggttttgggggctgagaactcctggtggtgtctggtgaggaagtatgtaagtaacatgagagaggatgtggtcagcagggctgcatggccagcaaggcaggaaattagaggagatgacctaggccagtagttttcctccaagtaccttgtggggcccatcagaagattcaggagcaggagttggtcctgggtagtggtgggagtcttgaggtggacacaggaaggagataagaagaaagaatcaggttcaagacagaaacagggagacacaaggttaatgacaaagacaaaaatgtgtgttattctttattaaatttatgcaagcatcaatgtttccgttaccagtcacctcagaccatagctgcgtgcttcctgtgcagactcagagagacatggtgacagagaaacagaaagccaaataaataccaagaccaaatcagagagaaagacaaagtgggagaaacacagagggattcagagttgaaatatcaccaccctcccaatccaggacacgattttgggagctgagaagccttgatactgtcctgtacacacaagcctcttgaggcaggagctactttagtgtgtgggttcattcatgcttttttttttttgagacgaagtctcgttcttgtcccccaggctggagtgtgatggcgagatctcgggtcactgcaacttccgccccccgggttcaagtgattctcctgtctcagtcccccgagtagctgggattacaggtgcctgtcaccacacctggctagtttttttatttttagtagagacagggtttcaccatgttggccaggctggtctagaactcctgacctcaggtgattcacccgcctcagcctcccaaagtgctgggattacaggtgtgagccactgcgcccggcctcatttatgcttttatcaaggattgattgagtgcctcctgcgtgcaaggagcagtgtcaggcactggagatgagagaagggaatgagcccttttggagcttaaggagagacagaccttaactaatgacacaataaacttaataattacaattgaatcaggaacaatggacaagtaatgcaagacgctatgacaggtagataggggactgatgccagcttctccttggtggaaggtgggaagtgaccttccctggattaccagcactttaaaacccacacttctgcttctgccttacctggccactcctcttttcctcttctctcagcttctccactgcacaatgtgaggctttctgtttgggtttggagaggtgggttaaggagcgaatgaccctccccactggtgatatcagagagccagctctcttcccctgagggctgggtggctagtactgggcttctgcctcagtgatcttcctagtttacttcacttcaacacatggagaatcctacccctcaactcttccttcccacttccaaaatagtgactaatttcacccatttattcacttatttattcatttggtgttcagtgcttgaatccaccctttttttgccttctctgaaactctctctcctatactttagcttgtttttgttagcttcgtcgcattcacttttaaacatatccaagtctctcccatctttagacaaacctccccttactgggctttccaggtaccaccatatatatgtctctctctctttcttcttctcttttttttttgagacagagtcttgcactgttgcctgggctggagtgcggtggcacaatctctgctcactgcaacctccgctttccaggtttaagtgattctcctgcctcagcctcctaagtagctgggattagaggcgcctgccactatgcccgctatttttttttgtatttttagtacagacagggtttcactatgttggccaggctggtctcgaactcctgacctcgtgatctgcccacctcagcctcccaaagtgctgggattacaggcgtaagccaccgagtccagcctctctctttctttttacagtcgaacttcttgagttgcctacactgtagaggggatctccatttcctgtcccctcactccgccaccttttcaaagtcactcctcaatagagtcacccccgaccttgcctgagcatcctgcagtccttatgcaatccttatgttgcttgacatctcagtagcaggcaacacaattgacctttctctcctacaaacactctgctggtatccctcttacctttctggcagttccttgtctgtggcatgagaaatgaccttcctctgcctgttccttaaaccacag

SEQ ID NO: 915895 - DNA, 4001 bp, Homo sapiens
tcagctcagacccgtatctttccctcagaatgactttgtggtgctgagtgtctactgaaaacagaaccttaatgttgctcagagctaacttccctaggggacaaactcatgctctccaaagcaaggaaggaccaaattccagtcgaggcctgaaaaatgcttgccagtttctgttcagtgacagcatagttagtcctcaggttttgcatctgtgaagcatggatggagaaagaactgtctcttagaatttcacacatctcacaaaagagtaagatgctcttgttactaagcttgtgctatatctgctttgggagggaatatattcttacaaattaaaaaaacacaaagccaatggcaagattcacgatgcctgctagggactggacctctgccccctgtctctccggaccaacaggtgccatggtcctcttgatctcctgtgcctgaccatccctgcagtgaagatggccaggccaaccctgactccaggggctctaggtctccatgtgaagtggtgaccatgagccctccgggtgagagcagtctgcctttccccactctgaatgaagaactgcccagggcttgccagacacacacctcaagttaccataggtctagagtttaattacagattatgtttatgaaacatgctggctgggaagtcctctaaaagggaagaaagtatttcaggtcatacctaaagcacttctcctaatggtggctgaaattcagaccttgacattttgaaggcccactgatcagctgtcctagctgggcccccttgaatttttctcaaacctgtctcttaatacgttatttggtgttttccatgtttgctgttagttatctcatacctaaagggctattatcattattaatatttttattttttgagccagagtttcgctcttgttgcccatgctggagtgcaatggcgtgatcttggctcactgcaacccctgcctcctgggttcaagtgattctcctgcctcagcctcccaaataactgggattacagggatgcaccaccacacccagctaattttgtattttcagtagagatggggtttcaccatgttggtcaagccggtcttgaactcctgacctcaggtgatctacccgcctcggcctcccaaagtgctgggattgcaggcgtgagccaccacgcccagccctattattatttttgacaacaacagcaaagatctgcccatccgactgcaggaatttaatacacagcctttgtcagtggtagaaattctatcactgtatgactcatgagtacataacaatgtgctataccatacttcctctttgagggataaagcccctgcactctaagggaggatttcattatgcatttctcttatatcaccagaaaattatttagtggaagacagtttaatatttgacagctttgaaccatttttttttctctttcaaccagtctttttacattgtctgcttaaaaacaggaaaccacatatctccaccccagcacaacccaccatccaccagcacagaccgtatcattttggatctacagtctttttcttccaagcctggccaggtgcctgctcctactttgcaggaaacccctccaggcactcccggtgcgtgttctcagagcccttctgagaatattcaggattgcacttcctgggctgcagcgcaccctgtaccctccttttttaagcctcctcccctgagtcactgctacccttccctcctctaacttccccttctctgcagcctccttagcaatttcttatcataaagtttgttttaaagaagaactgcccctctaaaaaaataataaactgtcgagggcggtagccccgtctagaggtttccgactttgctctgtgcccacctgaagcctccccagcccgaggtatttgaacttacattcagtgcttcacgtctctgtccggggtgcctctgtctctcaactctgacttctgagtactggcagttagaacaggaaggaagtcaatgagaaaaaaaaatgttttagacctacttgaagaggaaaccctgggctgtctcaaatcctgttcctttgcactgcctatctcttgatcagccaacttgagcagcattcttgtcaattaatggcacatgtgcgagcatgacagcccgtgtgacgtggagatgcatgaatgtacacgcaagagtgtggagcctatagctatgggtattatgaataattgtgagggtatttctgataatcaggtcattgcagtgcataagcctatggaggtaaggagcctgaaaccagtagcaataaattcacatcggctttactttgtaccactcacttctgttcccactgggtccccgccagcttcattatcaaccagatacgttgaaagtttgctggcagtgaatgtagagtgctaagaaatgatgattgttaactgcatatactacggtcctaaatttaaaaatgtgtccttaaacagatttttggagttttgttggttataatttcaagacgtagctttgtattgcactacaaacagtcaaatattgtttttaatagttttggctgatttttcttcaaatgaaacaaacaagcaagcgaaagtactgtctttgatgaaacctaggaaagaaattacaaaaggaagtaaaacttcattaattcatagtcttccaactcagaatttgtgacaacttaacaagtgccaaaatagactttgtaccatatttgaggaaatggtttatgaagtaatttaaatgggaacaagtctcggaggccatgtttaaaccatctgaggaacagtttttaagcagccaagtcacattcatgctgtatattcccgtagctgttaccaataataaatgcttatttaggttaatatttcaatattcagtatttacactacatcaatatatttagatctgactaagcacacaaatttggagaaactgacgtttattttgttttcacctaaatgtactgcatcttcttcatttccctttgtaaattgataccacagggtttgccttctacttagagtcaatgaaatcggaataatcaagggagtcatttcacgtgagaagagattagcctagaaaaatatgaaaaggaaaatagtatataattaaaatgagcaaaaatactaaaagcctaataccactttattctataaattttaaaatagcatagacagaatacagcccttgaaacaatgtacataactttattgtaaaaacaaagcaaaccctaatttacacagaaggcagtaacttacacattctatagctctgcaccctcaagaggggatacatttattcattccataacatttatcgagcacctcttttctttcaagtactgttctagttcccttgtgcagcaatagaccgcaggcgacatctctgctgccctgtggaacttatgttgtacctaggagacaattaaaataacacaggcagaatacattaattgtaacaagaaatatttaaaaatgaaaaatggtaaatgcatggtctctattccaccactcatttctcatgttattagggaacacctcactaggcaaacctggctttttttttccctccagagcccagtgtatatcggagggtatgggagcaccccttcccagaaaaatctgtaaaatcaatacatattttacagatttgtattatagattaatgtatttattgggggatgagagagcattcataattttagaaagttctaaaaggactccaattatcaaaatatacttaattcctggtcatatgcaaggagccacggaaaggtacagaaataaacaagacacagtcctagacctcaagtagctaaaagatgtaatggggaagacagaagcagacaaatttaattttttttttgtcagcataggaaaagaaaaaatacatggtgtgttttgagagtacatgtaaggacatcaaggaaggctttttggaggaagtgaccactgcgctcagttaagagggagagtaggttttgagtagttgatgagcga

SEQ ID NO: 915896 - DNA, 4001 bp, Homo sapiens
cctatttccttaacttgaactaacagaaatttggaggcagaagggaccttagggatcacttaagaaaccactttcctggaaaacacatacagtctccaaccctaaatcccaagggccagggcaaacagatgccctgaacccccagcccgccccccactcaacactggaccctctcgacctggcactcaccacgtcccccccgggcgaagcagcagccgcattttgccagcacttttcggatcacacggggacaggcacagcgaccccctttgtgccccccccgcatggcgcccgggcccccccgcgccccccacccgggccggccatgcagggggaatcacggggggcggggcggggacggcgccgggcgcacaccccccctccctcctaccccggtccaggctgtgggagggggggagggaggggaccgggaggaggtgtccaggggtaggcggaagtctagtcttgaggagggctgggggctctagagagagagaggcgcggggcccggccgccgggctgggcggggagggtttccggaaccctgtcggtgcgggggcctagggtccagatgtccagtggaagggggagggatggtaggggaggctgggccgggatgcggcagccgctccagctgtctccggcctctggttaggggtggctctaggcccgggccggggaggaggcgagggccgacccccgagccactggcgctgtgcgggtcccagcggagcggagagctgaataacaggcctggccgcggggccgccacgaggcggggcctctgcggcccagctccgccctctccatcgcgttccccctcctgcctgcgccgggttcccgccccgatcgcccctcccccagacaccaccacgttcccactccacgtccccagcgctttttcccctccccagcccgtgctcccctgccccggggtccccctccctctcgcatcccgggctctgcggagcgctggggtcggggttcagcctgtctgcagggtctgcccaggtctccccttggcctctgcgatgaaggaggactcagtggatggggccttggcctgtgcgaagatgttctgggtttggggctgtccccggccgagtggacagaggccccctggtacggggtgcgtgtatggggagtcttttgtgggtgaacacaacccagatgccgccctctctcaggacccttctttcctccaggccccgggactccagctaagactaatcgccaattaaggcgaagtcctggagcccgggctggcgaggggccaggggtggggcgcggggacactctgcctgcgagggctcgggatcgactgggatgggggacacacattggactcgaaggcaagaagagtggaggtctctgcgattaaatgggtctcatgcaaattagatgcgaactttatgctaataagaatagaatatttttgaattcgccacttggcgcaggatagcaaactgtgccccaccccacccccagcttcttaccgggctgcagagccccggcgaggacctcatgttcgcgatcccttctgtgatctccctccgtacgttcagactctggctcggtacccaccaaccctagagggcttctccttgggggctgcggggacagaaccactgtaaggaacctgccctcctaggcagccctgacctcccccttccccttctcctacctgtcaaaacccacattgttataaaaggctcgcccagaacggggctatggccctcgtaatagaattcatgtattcctgcgactgccccgcagaactcgttttcggataagttgagttgtgggtgcagccctcctgaaggccccgaaagacccccgaccccaccgcgagcccccattcttaccccctcctgcccagggagggcgcatgcgcgcagcatgccccccatgacccccagtatccggtcagtgcggccaggggcggggcggtccgggggcttcatactgaacccccaccctgctccaagtttcagggtcgagggggcactgaagctggggggctttgaggcctgcgcgcgtccggggagttgctgctgcggaatccgccccctgcccggctccgcccccactcccaccccagccaaacttcgcagagtggctagggttgttttctctacaaccatagttgaacaacaaaaaaacaccctcttaatactaattccaacatcgaagtgacccagggtttctcagtgttactacagagcccgctggtgcatcccgtttccccaggtcctcaggaggcagagggactgggagtgcacgcagggatcaccccatcatcccctctcccctttccagcaggtccctctccccaccccacccccacccagtccctggaaaagaacgggtgtggcataaagagttgcatattttactttatttttattaaattaaaagctacagtctggcagcgattccagaacagggtaaggaggttcctcacaggggtcagagaagagcggagaaagacagactgacggagactgagacacaggagagaaaggacaaggttaagggagaactgtatctgatgaacacacacagccggctccatggcgggtgacggggagctcacatcagcccaatttctcctccccggcacccgaagttcagcggtggagcagtatgtgggggcggttaggaatcaagagaccctcccttccccaccctaggtcctttctcggcttggtcgtggagcacagcacataccagaaaaagccaagggcaatggaggggcagggaaaccgggagtatatgtacacggggaggggagaacagagccttggaggtcggcctctgccagaagggagtggctcacactgcattgaaacacttggccagtgggggatgggggaagggattgccccctccctctcggaactcccttcccagtcagacaggtcccctacaggtgtggtgtggggggcagggggcagagaggagaaagaggcttctgctgggtcctagtagaggcagacagcaggggccttggcaaaggcgatgtccttcagtcatctgtgatacccttcgctctcagctcctcttgcacccgggtcaggtaggtggggtctgggtacccaaacctgggagcaaagagaaatgagggtgagggttgttagctgtttgaacttgctattatccccatgctcaccctcattctaggtggctcagacacctccccacctcccctaagggaggacacctccaaatccaagataatttagcccagttctgcttatttttgtaggctaagctgggcacaccaggaccaggttgaatgtaggagaaactgagatggctgaacagtttggaagtggttctctccagttaggaggctccgtgagcgaggggttggtgggtccctcagtggaaatggaacaaaggggaggagccaagggaaaggaaatgaagaggggtcgcacagctggggtccccctgtgcagctggtcttgtggtggatgtcgttccaggtgatgacattcggtctccctgtggtcatggacgtgccgatagtgaaggtgagacgctggtcaaacgccttgcggaacagggtcagcaccttgttgccctcagggcagtccgggaggtaggccacccgtgtggtgccaggataccgaactcctgggtttgggtgttcagcctgggaggaaggtgaagcagagtgggcagtgagcagccaggcatcctaaggcccagatgccagaggagggtcatccaggctagtctctgtctgagcacccccagctaatgcgaacggggcagcaacaggctgacagctttccacagaaggagagattatacggcctcggcagcaagagcctgtttcagagcataatccttatgtgttaagagattttttctgctgtctcaatccctcaagtctccattcagcaacaaatggattctcagaagtgatggaagttagctggtccctacactccagacaactcagcaaaaatgtgaagacagaataatctatc

SEQ ID NO: 915897 - DNA, 4001 bp, Homo sapiens
aaggaaagaacatcctagggtgagcaaacgaatgccccttgagtgaaaggagcctccccagagcctgtcctcacacctgcgtcttatctccagggccctccaacagtgtggtcagcaaggtcagttccggcagctcctctcctgtggctagagctggctccaacatccagttctgggggccagaaatcaagtgtcagaggtcggggacagtagctgggtggccccaacttgccctctctgccagtgtccttcatagatgtcccacatgctttggtgccgttccctgctcacctcatatggtcctgcctgaccactgtctgcctcagtttccacactgagacaatgtttggaatgatccaaccatctcctcaggccactgacgggccctggggggcctggggaacaggggccagagctgaggccagagctggggccagagggggcagccagaccggaggcagcagaagccgatatactcccctcactgcccgcaatggaataggattctaatgggaggaaaaagagaggaggtgatagaccttgccccagctccagactcagggtccccagggaactcccagggtcttctcttcatgatgctcagcctctctctccaagggctcactctcttgccatcctcatttgagttggccaggatagaaaatttcaccagggcacccctgggagaaagcacagtaaggtaaacgcctggctctccaggcctggaacccccagttacatgtggaggttccccatatcctgagcatagcatagatatgggggtgggggcagccatctgggcagacattggaagctgggggtggccatctgctctcctacaaccctccctctttcaatgggtacagaccattctctgggaagaggggaggatgagctgggtccatctgccactcccagtcccctcctccaccaattgcagtaatcactataaaaagaaaagacttctgcagcccacctccccaacacatgcgtagacccaatagaggaggccagtgaggagggtccatcagggttatcgttggcctgtgctcagcgacagagagctgtgattccttataaagccccttgtagaaccacctcattctcattcctccattctcctgtccctcttcagaagtagattcttagcaaaaggtttgaggaaaataatcggttctaggcctaaggggattgtgggtgggtttttctcaaacccatttgacaaagggaaagagatgagttccctgccccttcccctatttccttaacttgaactaacagaaatttggaggcagaagggaccttagggatcacttaagaaaccactttcctggaaaacacatacagtctccaaccctaaatcccaagggccagggcaaacagatgccctgaacccccagcccgccccccactcaacactggaccctctcgacctggcactcaccacgtcccccccgggcgaagcagcagccgcattttgccagcacttttcggatcacacggggacaggcacagcgaccccctttgtgccccccccgcatggcgcccgggcccccccgcgccccccacccgggccggccatgcagggggaatcacggggggcggggcggggacggcgccgggcgcacaccccccctccctcctaccccggtccaggctgtgggagggggggagggaggggaccgggaggaggtgtccaggggtaggcggaagtctagtcttgaggagggctgggggctctagagagagagaggcgcggggcccggccgccgggctgggcggggagggtttccggaaccctgtcggtgcgggggcctagggtccagatgtccagtggaagggggagggatggtaggggaggctgggccgggatgcggcagccgctccagctgtctccggcctctggttaggggtggctctaggcccgggccggggaggaggcgagggccgacccccgagccactggcgctgtgcgggtcccagcggagcggagagctgaataacaggcctggccgcggggccgccacgaggcggggcctctgcggcccagctccgccctctccatcgcgttccccctcctgcctgcgccgggttcccgccccgatcgcccctcccccagacaccaccacgttcccactccacgtccccagcgctttttcccctccccagcccgtgctcccctgccccggggtccccctccctctcgcatcccgggctctgcggagcgctggggtcggggttcagcctgtctgcagggtctgcccaggtctccccttggcctctgcgatgaaggaggactcagtggatggggccttggcctgtgcgaagatgttctgggtttggggctgtccccggccgagtggacagaggccccctggtacggggtgcgtgtatggggagtcttttgtgggtgaacacaacccagatgccgccctctctcaggacccttctttcctccaggccccgggactccagctaagactaatcgccaattaaggcgaagtcctggagcccgggctggcgaggggccaggggtggggcgcggggacactctgcctgcgagggctcgggatcgactgggatgggggacacacattggactcgaaggcaagaagagtggaggtctctgcgattaaatgggtctcatgcaaattagatgcgaactttatgctaataagaatagaatatttttgaattcgccacttggcgcaggatagcaaactgtgccccaccccacccccagcttcttaccgggctgcagagccccggcgaggacctcatgttcgcgatcccttctgtgatctccctccgtacgttcagactctggctcggtacccaccaaccctagagggcttctccttgggggctgcggggacagaaccactgtaaggaacctgccctcctaggcagccctgacctcccccttccccttctcctacctgtcaaaacccacattgttataaaaggctcgcccagaacggggctatggccctcgtaatagaattcatgtattcctgcgactgccccgcagaactcgttttcggataagttgagttgtgggtgcagccctcctgaaggccccgaaagacccccgaccccaccgcgagcccccattcttaccccctcctgcccagggagggcgcatgcgcgcagcatgccccccatgacccccagtatccggtcagtgcggccaggggcggggcggtccgggggcttcatactgaacccccaccctgctccaagtttcagggtcgagggggcactgaagctggggggctttgaggcctgcgcgcgtccggggagttgctgctgcggaatccgccccctgcccggctccgcccccactcccaccccagccaaacttcgcagagtggctagggttgttttctctacaaccatagttgaacaacaaaaaaacaccctcttaatactaattccaacatcgaagtgacccagggtttctcagtgttactacagagcccgctggtgcatcccgtttccccaggtcctcaggaggcagagggactgggagtgcacgcagggatcaccccatcatcccctctcccctttccagcaggtccctctccccaccccacccccacccagtccctggaaaagaacgggtgtggcataaagagttgcatattttactttatttttattaaattaaaagctacagtctggcagcgattccagaacagggtaaggaggttcctcacaggggtcagagaagagcggagaaagacagactgacggagactgagacacaggagagaaaggacaaggttaagggagaactgtatctgatgaacacacacagccggctccatggcgggtgacggggagctcacatcagcccaatttctcctccccggcacccgaagttcagcggtggagcagtatgtgggggcggttaggaatcaagagaccctcccttccccaccctaggtcctttctcggcttggtcgtggagcacagcacataccagaaaaagccaaggg

SEQ ID NO: 915898 - DNA, 4001 bp, Homo sapiens
cctggtcacctaagccaccaacatgttatgccatgtaggaatattctactgaaaaacctattcaatgacactgttccaaacaagaagtttcattaaaaaaaaaaaattcttaaagccagaatttttaaaactaaaggagtttccaaaacaaagaaaaaaattttcccaaaggttacaaagtttcattaactatcttaagtcttttactaagcatcacctttctgcccctcagtgggtatcaagcgatgaataacaatgtcacaaaagaatgtttaccaagattggggctggggtgtcacctgtaatgattttgtatgaaaaatgtaaacgatcctgaaattggtgaggaagactttcaccttcctacaatctcactttatttatattaaatgtgtctcagtctgaaatgaacaagagcttaagaactgtttggtgtgcaaggtttgcttttgtttttgctaaaaacaaatctctccataagtcccttatttccaaatactatggaaaagtcactactactcaccgcaagtaatactgttttaaagcaaaggcagcgttagaacaacttctgggaaagttgaactcttcaacaatttctccccactgattcttctcagaaacctggtaaaacacaggcacagttgtctgaacgtgaacaatctaagaaaatcttaacctaactatgaaataaatacccattctacagagatctgtagatacctaaggcatcagtgggtgtttcggatcgatcggtaagagttactaagcaagggcttcttgaatcactgtgttttcaccagagagccctgtatttaataccacttgttttgtttgggggtgggggggtttggtgggtttgttttgtttttgaagcccggacaataaccaatcgcaagtccctctgtcgcccccttttaaatctcaacgcggtccgtttacactaaaaaaaaaaaaaaaaaaaaaagttcaaaaggatcaatacagttccggacagcgacgtccgcgggttggggggggggccggggctggggccgattccgatccctctcccagatctatccatctccataggcccttctttgaggcctacagcttctgcctagccttgaagcctaagatggctatttggagacaggtcctggtttcttttgttagctgtataaaccgagggcgacggggccgaggctgtgcccccggctgccgggattatttcgcagccgattatcgatgttaaacctgcccgcgctaattttgagttgcacgaaaactgctctcagagtctgtgtgtctctgtgtgtctccgcctgtgctagagcggcagcggcggcagagctgactcgcgagcgagcgggcgggcggcgcgggagcggggcgggcgcggggctcaggctggcgccccgcacgcccgcattccccgccgcggcgctcagaccccgccggcccgaccgggcaccgggcagggcgcgagccggcgccgggccgcccgcccgccggagccccgcgcccgccgcgcgcacgcgagccaccaggccaaaaacagccccgccgccgtccgcctccgtgccaccggctgggagcgaaaagaacgccttttgcccccgcgggccacccccccagccccaagcgcccactccggggtcaaaggagactttttggaggaggccagcgagagggaaatacaaattaaaacttccactcaccttcgcgaatccgcctaaagtagtgactctggtgtagagaccgtgaagatccagctccttcccacccaccgcagggatttttttaaaaggcgacctgcgggagagaaaaagccccgcacttgtcagccgggaccccgtgcccggcccgggcgggagagccccgttcgccccggctcgccccggcgctgcccccccggttctgctctcaccctctgctgtggtggaactgccgcagctcgtccaggaaagcgagtccctttctccgctcgtccggaggcgccttccccgtcgagtttgccattattttttcaaaggaggtttttaaaaaacccagatcggtgttttaaaagcgccccccgctcccagcgcttcctaccagagcccggagcccattcctcggccggcggcggcggggctcagtcatgggccggcggtggcggcggcggcggcggcggcggcggcggcggcggcgcagggagggagggagggagggggaggaggaggaggaggggaaggagggagcaggaggccagggggagaggagggaaggagggaggggaatttctaaaaaagtttaaagaaatcggagcgaaactagaagggcaggcgactgccggatccgcgcgaagccgcggggcgagcgcggcccccaccccttccttccctccctccccgtggcccggctctcgcccgcctctcagcgccgccggctgaggcagctcagcccggggacgcgattcaacatggtgctgctgccgggggcgcgcgagcgggcgacgggcaaggcgagccgatggtgaggggtctgggcggccagaggcccaagagtttcggcggcggcggcggcggggctagggcaggcggggctgggggtggggagggggaggtctgtgtggtggtttgtggaaagcgcggtgacagcgtgtatttcggccccggctccgcggggccctcgcacacattcacgcgcggcctcggccgctgaggccggggcgtccccgggcagaagcaccggcggcagctgagccgctgcgcgccgcccgcctgcttccctccccgccagcctccctctctgccgccgccacggcctggcagccagtgccacacagcgacccccgagggctggccgcggcactgcgcctggctccacaccgccccggcagatcctcgcggggaacaatagactcgactcgccgggcttagggttcgtctgcaatgtgccgcacatttcacacgcacacaaagccggcggaaaggggggcggtgcggggaaacggccactaccggttgttccagggttaggggtggaggcgatgttcgcgtccccggcccggctgttggaagggccgcctcggagtccccgcccgcccgacagaaccggtgtggcgctctgaagggaaaggaagctcaccggggtagcccctcacgctacgcaacattcacagatcggaataaagtcaatttgttaccttctgtttttgtaaaatctaaaggaatcggcttttatgagccgtatgctagtattttggggcctggttagcacattttctatgaattatccacacgctaactttagcaaactatacgttaaatacaatgtgaactgtctgtcctagttctgtggaaatagagtaatgctcttaattcatcttgccgctggttggcttcacatatcaaactggagtattctatgagcaaagttatgcaaactaactaaactggttgggaagcaatctatcgaacttcgacaataataattaaggtttacatttttatagtaaggtctcttcaagattgctgcgtttaaaataaataccgaataaaacgtttttccttgctttcaaatgtcttaaatgtaatcctcgtttaaaatattttgaaggttaaaaaaaccctttgcttaaatgagtcaaaacatctcaacaaatactaccacctaaatttgcatttacgaggggtgttggagccggctctttgctacaaatgttaattaagattacagtacgtgaaacgtattattattcccattttagtgacggccaccacgggcaaagtcactgcctaacccaaggtcacagggtagtaggggtctggatgggttatttcaggtagtcgttccaatgggaacattgctttggaggtgaaaaattatgtaatatagtgcagcttgcttccggtgctcactctaggaaacggacttatttcccaactaaagtttgtctcttaagtggggtcggaataaggttgtggctaggaagatcctgacaacccagggccagtgagtgtctcggaagcctgtga

SEQ ID NO: 915899 - DNA, 4001 bp, Homo sapiens
tagctcatcataccaacacttactaggtatagtagtaacaacttctcccacttgtaatctgtacaaaattgtggtttttcctgctccatctaatcccaaaattaaaattctcatttcccgagttccaaacagactggaaaatatacttgagaaaaagccacctaaaaaataataaaagaaaaaacatacacaatgtcattttgtgaactaggtatacaaaacatctaaccttgtcctttgagagctaaataccaaattaaatattataatttcctggatgcgtaggtgcatatttttcctcccaatgaaatatattattcaatatcaaacaagtaattagttatgttactatgtccttagttatgttactattgtgtcatgcaggcacagaagataaaccaaataataagagaaatatggccgcggcctttgggaatctcattttctaatcagcagaataggaatattttagcatgatcccctcactacccctaaaaaccaaggggccagtaaggaggatagtgggacaatgtaatcctcgcacaggaaaagtactgtacagcagcagtaccactataaccaacttcaatcagagttctccacgaagcaatatagctagtacaagaaattgagaaaaaagctgaaaacaataactatttttgacaaaaaacccacttttaaaaataataaagctctatccaatgcatcacaaaatattcccagaaagcttcctgtacaccaagtattgtgtaggataaaaagcacagtccttttcccatccagagccattagagaagattaaaaacaagttacattaatacaaaaaaaaatagttaacatcagaagtgatgccacactgttatttggcaaagacatggcataactaagagctgcgagttgaaaaatgaacaacaccatgggctagagaaccttgggaaagttcaacagaataggtgtgacttgacaaagtcctttctaccatttacaggtagaagagaggcggaacaaaactgaaggcggttatggaagacaggacagcgcctgtgatgcttgggagcaagaagtatgctccccagaaaactgtggagggatttaaccaagccaaagaatctgcaccttcatttggagggtgagaaacgagttaaagaatgtgcaccctcacttgggttctagcggggcgagggtgttacctgatgcttgtgagaatgcagttccctcaatcagcgggccaagaaccaagaataaagtttcatttgccgactagaaatacccgtattattacatgaaacgctacagcagattagcagacaaatgccaaactggccataaaacaacataagcaacacctgctctcaggtttttcaaactgacgccgtcccagcgcccctggtaaagagaatgattaagcttccactctggggccgcagctcatctttcaccaagaaacctcggcgaacctgcgactgacgcgttgccagcctccgcaagaacaactctgcccagcaagtggagctggggatgagggaaaacttcatgataagggtaaagaactcgaacccaggctctgcggacgtccccaagctgtccgggtccctggaccccgcaggaatcaaggggaaccgagagaggacggaggagaacgcgagaggccggatccacccctacagatgaagatccaaagtgagtcaagtcctccgcgacccgccccctgaggagctggctactctagggtatcctggccggcccctctcctcctctgcaccccagccctcggccgcggctccctcgagcgcgcccaggtgcccttctcgaacccctcacccatgatgaaccccctgtcctccctcgccgatcttcagtgattccttggccttcggctgcagctccgaggcggtttcctcgcaagcccagtcagccagcaacttccacgtcggactccaggcgggggcgggagcgagggtcagctgcgactgcgcgccgggaacggtggcctgagcatccgcgtcgtcgctttcgactcacggtccccgctcactggatgtagataccgtggaggccagaagagacgaataattcaaaaacctgaagtctctcctgcttgtgtttttctggacagaaagagcttctgaaatagagaaattggaatttttgttttaaattctgacaccaaaaagtggcgaatctgacaactgaaaatgcgagtcgggcctcgatgagtcgtcccggtcgaacgctggcgcaggctgcggcgttgcagaggacgcgtgtcccggagcgccctgcggggccagcccaactctccctaggtgctttctcccagaaagaaacaagactacgtaataataataggaatggtaccgcgctgccaatgcggagcagccttgcacctgaggccagtaaccagaggtttttgtcttcgctgtggcctgcaggacgaggacctcgccggctttttttctcgctgaccgagcagctgagaccgcctttcaggggtcggcagtgtggactggctggtcccgatcgtggggaccagggacttattccctcgagggtcgactgttggaagtaatgtaggttttgatagtgaagtgtgtggagaggaagaaggaagcacacctataggatgtggagaagggatttcccctagagaaatttttaaaggttgagcatgtatgttttgaaacttcccaaagatccattgaaaagtgaaccttccggccgggcgcggtggctcacgcctgtaatcccagcactttgggaggccgaggcgggcggatcacgaggtcaggagatcgagaccatcgtggctaacacggtgaaaccccgtctctactaaaaatacagaaaattcaccaggcgtggtggcgggcgcctgtagtcccagctactcaggaggctgaggcaggagaatcacttgaactcaggaggcagaagttgcagtgagtcgagatcgtgccactgcactccagcctgggcgacagagcgacactccgtctcaaaaaaaaaaagagaaaagtaaaccttccatccctaataccctgtatctcggtgatccccagtagtcactactgttaatactctcttaggttttcttccaaatcttattaatacctttgcatattatgtttttatttatggtagagattttcatccattcaacagaagcttatggactgcctttttagtttattttaaaagaatttttctagctttaaataaaaattgtatatatttacagtgtaccatgtgatgttttcatagttgtatatgttgtgaaatgataacatacccatcacctcacatagtcgtgtgtgcttgtgtgtatatgtttattttgtgctaagaatatttaaggtcggccaggtgtcgtggctcaggcctgtaatcccagctctttgggaggccgaggcgggcagatcccttgagcccaggagttggagtccagcctaggcaacatagtgagaccccatctctacaaaaaaataaaaaaattagccaggcacagtggcacttgtagtcccagctacttgagaggctgagatgggaggatcacttgagcctgggaggcagaggttgcagtgagccaagatcccgccattattctgctctcattctatgagttccactttttttgactctacatataagtgggatcatgaagtatttgtgtttctgtgcctagcttatttcccttagcataaattcacccatgttgtcacaaatgacaggattttcttctttttaaaggctgcatagtattcattatatatataaatatacatacatataccacatttttacatttcacgttttctttatccatcagttcactcttaggtgattccatactttggctattatgaataatgctgcaatgagcatggtgatgcagatatctctttgacatactgatttcattttctttggatatatacccagaatatatggtatatacgtatatattgtatatatggtacatatgcatatatgatatatatggt

SEQ ID NO: 915900 - DNA, 4001 bp, Homo sapiens
ctcagggtccaccaccttgcggatgatgctctgccgggcatcccactcctccttggtcatgggcttcatggcctggattcgggacttctgctcatccgtcaggactggaagggaagacggaggtggtggccaggccttgggaagcgaccttctccctctcaggtgctgggcagcacagtacctgggccatcctcttcctccccagctgatcggtgccactggtccagcgaggggcccggcagagcctccacctgctgtgcttccgccttctccttgcccttcttcttcagcttcttcctcttcttcttcttcttcctcctcttgtccttgtacttcccccgcttcttccggccatcactggaggaagaggaggaggacgaggaggaagaagaggagctagaagaactggaagaagaggaggaggagctggatcttgttctcctccgggccttctgcttgcttctctctgtgatgcagggagaaggtgaggctggaaggccaggaggggaagaggtaaaccttcgtcccctgctctggcctggggcaggcacagaccggctacagggtgagcgcttcctgaggggctttccagaacagagatggagcttcccagaggagccccttcctggctcctgcggcgcctggccctcacatctcaggcccggctgcacagaggcatgactgagcgtccccgaccactgctcgcccgacttccccgggtagtaactgcgcctcctctccccgatgcctgtggtcctcaccctccgccccaggggccgtgctggccttgcgaccttgggatgtggaggccgagcagttcctcgaggtgtctttcctgctcttcttctttctcttttccgacccccgtccccgggaccggctgcgactcctcgagcgcttgcgggagccgacgtgagccatggcgccgcgggctggcgacgaagaagacgcgcttgagccgaagcccccaaggccggccgcgggcgggctccaagggtggctctagcggggccggggcctggcgacgcccagtacccgtcaccgtcccgggaaaatgagcgaccctcacccacccccagcgctggggaccccggttttctccgccgactccagtccccgcagcggtgcctgttaagggcccgccccgtgcccggaggccccacgcctgcgcacccggctccaaacccctgggaactggccgccgtccgccgcgagtggcgtctggggcgctttcccgcgctctcctaccctccagccccgcgcccttcgcggcctcgccgcctcaagggggcccccggggctgctccgttcccacctcgaccgccctgcgggccggacagcccgccccgcgccttctcgagaggaagcggcggcgaggaggcttccggccggggcgctgcgcgggaggctggccggctgggaagcgcggcgccgctgcctttcgttctgacgccccaggttccgtcccgggcgcgcccacctcccgcagaggcaagcaggggcgccggccctcgagctccgcagcccctcacgcctgtgtctgccgaagctgcgcccacttccaaggctgccctctcggcgcacgcccgcagcacccacgcccccggtgccctgggaagaaggcgaccctcgcgcgcgccgccctcctccccggctggtcctgccctctccatacgactgcgagctccagactgaggcgccctggtctttccgacgcgcccacccagtgactcagaggtcgcaaactcgtgtccgtaggggccagaaagatcttggcagtgagcgcgggcatggaccccaggcccatccggaaggaagccaggattctgctccagctgatacgtgcaacgtggcatggggctggtgccccaccttcccagggagaccaaactcaagactgcaatatggaagccccctgagtttcaaatgtgtaacccaaagcgtggctgtgcgcttcatccaatctcgggcccccaagttgcaactcttccacaatgacagccgcaaacacaaagggatcttgcaaagcactttatatacgtcagcgcatttgactcccaaaacagctctaggaggtaggtgctaaatgaggaaacgaaggcaccaaaaggtgaaggctcacctaaagccacacagctggaagtggcagaagcagaatgggaacccgggcagcctggttcctggccctgccattcacccctctgccatctagaagatgctactggtggcccacccgagtccactggggggtgatgcctgctgctgagggttcacatctgtgctctctggaggcttcccttggctactggaaggcaccctgccctggagataagtgtctgggaagttattcactcctctctggccccctcatccaggagccagtaaccggtggtgtgggcacactgtggtactgtgggctctgcctggagctctccgtggggccagctgaggctggacgtcctctgaagccacttccttgcccagctgctccctcccctcccctgcttccctgactccctcgctgaagccccattccagaccctgcttctgacaaacctgaactaaggcagcatctttgcccatagaatgacccagaagctggcacaccgttgagccaagaagtgcagtaggctgcggggattttatttctgcccccagaccaaggcaacggagccctcacctgcctgccacccccacactgggcccaagcaagctcaggtgagcgcacatacatccaccgtggcgggctcctctcgggtgaagccatcaccgaagccctcatcgtccaccaggtcgggctcacggcagcacatgggacagaggctgttgcgcacagcagaggctcggagccagacgacaaggttccaacgctcaccagtgcccaagggccgggctccatgcagctggccgccacggtggaggacaccctggcccaccacgtgctccacctccaggggctccgtcagggctgtgggtgcctgcagatggcacgactcaggcctgggcactcacagctgccccaggccctgccgcatgggtcacacactcacctggaagaggcccccaaaatacagggcgccccctgtgaagaccttgcccaaggccacattgagggtgagctcggcattatcatagtggcagcccagctccaggtcctggcccggtgcgtatttgaccacaaaggcccggtggctgtcgagccggcccccgccacagtcagggtacagcagggccatcagcggctgcaggaagcgctcccgcagtggtgtcatcagcggctcgtccagcccgagctcgtgcagcagcacctgggaggggattcctggggtcagcaaggaaactagagggctgcaaccctgggcttccactccacggtgatcccactgtgaccttctttcgcagcccgggcaggcagcccatctgcagaacctctgacactgcctcctgaccccagccaccccctcctctgccaccggccaggcctcacccaccccgtagttgttcatggtgttgggcctccccttaggcatgtccgattgctcgaagtgctccagctcttccagcagggcctggcagaagggcgctgtgaaaacaggcacccggtagatgcgcttctcctctgtggaaggagggatggtctgttggcctgaatgtggccgtgggccggccaggcctgggcttcagtcttcctgtttcatcacctgtgccatggagatgaggcctttgcttttcagggctattgtgatgacttaaggaagtaacatgaggagcaggggaggccgattcccatgccccccacttatgcccggaacctttccccagactctacaagtgtccacagggctggccctgggagctcacatatgggtcctgaggcccagagaggggaaggaagtagcccagggacacccagcaggccagtgacagccaagtcgggatcacagagccaacttcaggctctctctgcacctcctttcatctgatgagccaccgaagtctgt

SEQ ID NO: 915901 - DNA, 4001 bp, Homo sapiens
ctgttgtaagactaacagaagcacccctgtgaaatgtctgtgacatcttaggtactcatacctgcgggctctcccagcccgcacagaaacattgctacccttaattaagaaaatttaatttttattattcccagctttacatttggtatgcaaagagcaataaactattaatctaaaatagttagataaatagcattaaactttatctaaaagcttgttgtaagttcgtaagacttatctggggaattagtaggtgcattttctttgaattagtaggtgcattttcacttcctttcagtttggccaattttaactcacaagggacaacactttcttaatggaccagacagcactcaccaatttcacaaagcaaattgaagttgtaaattaataactacattaagttaatgttttatgaagcacttactatttcctaagtattgggctaagcattttatttgcattcatatctcatatctcatttactcctaacaatcctataaggcagactgcatagttatctccattttacagatgggggaacttagactaagagatttcaaataacctgggtgacacagacagtaaagggcagagctcagtcacaagacggagcagaaagggtgtcagagcttataaacaccacacgtgccatcttctattttcaacaaagggtttacctaagactacgaatattcaaatgatcgaatttctgaaatcgccccatgatgtaaattcccacaattatattagaatttcgaaagccacctcctctcattgccttatttcagagaagaatctaaaactctatcatcttattccaaaaggaaaggggagaattaactgcttccctgaacttctctgccagtcttccttcagttatttctgttttcctgcctctcatttgtcttaaacaacagctattttgtattcattccgtaattgtgagcagtggtcccaaaggccccgttgtaaggaactacagaatactgccagtgaatactagcgagaaggaaaaagcaccgcaaacttccaactccattcacaaaaataccacagaaatacataatcgaacaagctaactccactgacggctttcctgaagcttcagcggtgaaagacacgagccgcctgtcgcttatggagggctgtcgcggagcgggctgcgatcccggagtgtggccccgcgtccacgcgcacctgcccacctgcgcgctccaccgcggggcagcggttcaagccgggaagccgcgagtattatcagctcagaggggaggggttcacaggaaccgggctaggtccgaggctgctgacaactggtttacacaaaagaaagaagaaatataggaagtccccgcagcagtgcatgccatgccgacgccgacgcgggcgcccagcagtgggtggaggcggatgctcccagcgccgggtgcaaggtcccccgctggctccctttcgccaatgcgcccggcccgggaccaagacaccgcgtcctgagcgccggcggcgaccccagctcccctccccgcgtcccgctccccgggaggacgcgccgggcgccgcgccgcacctgtgccccacggggcggccttgtcccaccgcccctcggaggcgatgctccggcccgagaggacaggcgcgggcgcttccctcggggcagcgggggcagacctggcgtcgcggggacgcccccagcgcgtcagacgccgcgcgcccacctggggccgtcgcctcgccaccggcaacctcacctcccgccgcagcctcctcttccgccgccatcgcaggagccacttggtcggctccgcagccccgcggctggcagcatggaggagccccgggcccgccctgccccggcccaggcggcggctctggagcagggaagcggggactggcgggccctgccgggtgccgcggcggccgccaccgcagcccgtaggcgcgcacgggacgccgccccgcagcccggccggcagcagctactgagcatgcggactggagccagccgcccgccgctctgggcgccgcggggcttcccggcgggaaagagacccgggccaagggcggagtcgctgcggacaccgccccgccgagccctcccgcgagcagcaaagcactaaaaggccagttgagtccttctagcaaccaccctattgaaaacaggcttccatgctcatagtaagctttgtcccagcattccgaagattgcagttgttagaccctcggggcaaaggtaaaggatgaatgaagataattgcacggtgggttagcggagggcacggggctagggttggggaggagggtgctggacgagagaccctgctcttttctgcttaaggaagggcttagctgcagagacgagagtgtagatgacagagagagggtcccgaggaagccgttttgcctcctggaacggttgggtaaatccagaaacaagatcttttgggcatcacttgacagccctacatcctatggccacgtgtctagaatacactggtttgctgccctcccactggtccctagacccattccttggtaatctagtagaagtaagtaaaggaaagtcacagtagagaagacaccaaatcaaactttgcaaccagcctaaaggtaataactttcctacaaggactcaattccaacgtcttaaccagcaccttatgtgtcctcagggcagtacttagggccattgtgagaggctgggcagagggtttggaagtgtgttcccaagcagaagtgggcatgacaggagaaaactgttgcaggcttaagcaggggctaggactttagaggtaagggagacgtgctgaaaactgtgctgtcctcaacacacaccaagacacatccctaatcaaaaccagtcttgaaacgtctcattcctagctttgacttggaactccaccccaaattctaccaacaccaacttctcctggcagctagaaacagtaattccatacagggtttcccgaatgtgatcaaaccttggctttccagacaagtgtacactattttgaggtggtttaccaaggggtaacaggtagaattaattagacctgggctttaagatctgggttaaaatgtaaatactattctatacatggccttgcttacaatgcattttcccccttatcggctcagtgagcctcacaacctctttcttaattcctgtcttagtagagaaacagaagttcagagatgtcgagtattttggccaggatcactcagctagtagatagtagaagcaagaccataaaagttaggtctccttcttaggagttcctattgtggtgtccagtaagcttgcctgtgaatcattgcagtccccgtttcttagaaacgatgattcacttccaccaaagcctgaaagcaagagaaggggaatccagaatctaaaatacgaaagcaggaagggtaataatgcacaaacaaagccgacctacagcattccatggggcacaaccctttcattgcttaataggtattccccttactgctcaggtttaaagcctgcttgctctctttttttctttatgctctggagctttactttctaagacatgatttttttgttttttaaagagtagctatataacccataggataaggcagagagacatataatgtcttgccagatggataggaaggtaatctctcatttccagtgagtggttttctcatattttcaacttggaaaaaaaaatgtgagaaaggtgattggatgatttgtataatagaatgctagagaatttgtgtaatagaatgcacacagttccttctggtcagcatggttcccctgccaaaagccctggagctgccttgctctccaggaatcattgcttgcctttcacttaatttgttcattaattttctttcattgctaagtactcaggcaagaacaaatattttaaaggtggaacaaatactcctttgtccatctggaattaggaaccacggcctcacaagctgtaaactcctgtccttttagcattctgctgggattg

SEQ ID NO: 915902 - DNA, 4001 bp, Homo sapiens
catgtctgtaatcccaacacttagggagggtgaggcaggaggactgcttgagcccagaagtttgagatcagcctggacaacatggtgagactctgtctctactaaaaacacaaaaacttagctgggcatggtggcgtacacctgtagtcccagctgctcaggaggctgaggtgggaggatcacctgaaccgagtttgtgtcactgaactgcagcctgagagacagggtcacaccctgtctcaaaaaaaaaaaaaatgtatttgcaactatggcttgctccttttcatcacaggtatgctttatctaaagcagcctccgccttccctctcaccaactgtcttgttacccatctagcttctttttttccggggggggggggggtggtggtacagagtctcactctgtcactagacgagtgcagtggcacggtctcggctcactgcaacctccgcctcctgggttcaagcgattctcctgcctcagcctcccaagtagctgggattacaggcacgcaccaccacgcctggctaatttttgtatttttagtagagatggggtttcaccatgttggccaggctggtcttgaactcctgacctcgtgatccgcccacctaggcctcccaaagtgctgggattacaggcgtgagccactgcgcctgaccacccatctagcttctttatagcatttgtcactacctgacactaccgtatgtatctcctttattatgtttacacttttattgtctcgactcccgatttgaatgtacattctttaagattagggatttgttgaacttatttgctgctgtaaatacagcctggcaggcagcaggtgctcgttaacgtttgttaaaaataatgtgtgagcaggctgggcgcgatggctcacgcttataatcccagcactttgggagaccgagggggcggatcacctgaggtctggagttccagaccagcctggccaacatggtgaaaccccgtctctactaaaatgcaaaaaattagctgggcgtggtggcgcgcgcctgtaatctcagctacccgggaggctgaggcacgagaattgcttgaaccagggtggtggaagttgtagtgagccgagatcgcctcactgcactccagcctgggcgacagaacgagactctctcaaaaaacaaacaacaaaaaaagtgtgaacaatcacataataactgaaccaccttttcccgaatctgcaaaatggagaccatgacggtgataaatctaccccacaaactggctgtcagaaattaagtacaaccaggccgtcataattttttactcccactctgatggcacacgaaaaaggaaatctttggaagtcaggcgccgaacgagtctgtgagggccctaaacccagctggctccgggatggccgccgctgccgggaagtgggttctgacaaatgacaaacagcagagggagcctgaccccggggcggaggaggaagtgggcctgacagaaaaaggagaagctagacccctggacttgaaatatgaaaaataaaaagcgcagcccttggcttcgctctctagtgaggctttgggaaccctgccggagtcggaaggagtagacggagagagaaaagggcctcctcacacaccctggacccttggcccactcctgccgcgcccccgcctcccacgactggcacccccgggccgccccaatccttcagcaaccggtcccctcccctcgcctccctccttctcgggccccagcttcctctctgccttccgccgcccgcttctctcggcacacacacggtttctctctgctcttcgcaatccccgctgtctccccacaccgtggatcgaaccctcaccggcatcttggcggcgcccgggtttcaacccagaggagcaggatccaggtacagcggagcgcttccggtctggcagcctgggcgaggtaggcggaagcgaaacggaaggggcgggtgcggacgtggagcttccggccttgcagttccgcttctggttgcagcggccgcgcggatctgaaggaggcgccagagcactaggcaggggccttgagtggtgcagcgtgaggcagcgcccagaatggagatgggtcttgaggttccagaatctgagatcaatcacctcttttgtatttttttcaaatgtcaccttttcagggccgggcatagtggctcacgcctgtaatcccagcactttgggaggtcgaggcgggtggatcacctgaggtcaggagttcgagaccagcctggatggtgaaaccccgtctctactaaaaatacaaaaattagctggtcgtggtagcatcccagctactcgggaggctgaggccggagaatcgcttgaacccaggaggcagaggttgcagtgagccaagatcgcgccgctgcactccagccgggatgacagtgtgactctctcaaaaaaaaaaaaaaaaaaaaaaaaaaaaaatcacctttcctgtgaagcattctccgttcattctattttcagttcacccaactccagccccatgccttatccttctctcccgctttttcccttagttcttacgattcttgtatttagtttactcttagtgcttgtgaatgccaaaaaggcagcacttcgtccgttttgtcacctgcgcccgtaacagtgacggtatgtaggaaacatcaatatttgagtgaatgaatgaacccaatgcactgcatctaaaaatggagaaactgaagggcactggactccaggtttgaatcgcagctccaatacatactagctctgtaattttgagcaagttaactggcctgtgcttcagttcctcacctgaaaatggcagtaacagtatttacctcatagttttgtgaggatgaaatgaattacatgtaaaatgcttagaacttacatgcttggagcatactgaaagcccagagttttaacttatttattactagaaaacttcttatgttaaaagtcaagttcattgctgcctgagagccatttcttctgccagttcccagcctgaaataggaccccatgttcccacatctgatttcacattcagctgactgggcaaatagcaccttttaggcaaggtcttttttgacaaagagcccaaagtagccccataatcactctccatttcttttctgcttttctttccatcctctctctgaggtttccttcctcatggtcagtctcacaggcccagcatggcagccccacgtgagcaaggccctgcctgcactgtgcatccctgttctatccccagtgtctggcatccacggaacttcagtaaatttgtgtaaatttactgaatttctgtcagccctgcctatgagacagtgaaatcctcgaggactggaattgtcagattcatctttgaaaccccagtgtccagtggggaaggcactggaatcgggtccttcactttttctccacaggcacataccatactctctagaagctaaaccagggaggaccaaggaagagggcaactgaaaatctgcctcttctttcttcccctcccatgtgacaataagtttctaagaattagcaaccctgggagatcaggctgtttccacactatctatcctctaagggccacaggaaggtccccaggcagcccagcacatccccatgttgcccactcatcatgctcctccctgagtggaccatggggtagacacccgacccttccctctagcctggcccccaggcataagctaccaccgatacttacaggtcctcacattttttttttttttgagatggagtctcactctgttgcccaggctggagtgcaatggtgcgatcctggctcactgcaacctccaccttctggattcaagggattctcccacctcagcctctcaagtagctgcgattacaggcacgcgccaccacgcccagctaattttttgtatttttagtaaagacaggctttcaccatgttggccaggttggtcttgaactcctgacctcaggtgatccacctgcctcggcctcctaaagtgctgg

SEQ ID NO: 915903 - DNA, 4001 bp, Homo sapiens
tacactttctgtttcctctactttcccccctctttctagtctctcactggtgttttcaaaaatatcacttttatgaatgcccaaaaccaaattaaatccttgaactttatccttaagctatgaatagtactaagggggctctcataagtaacaaccttcttgtctacctgggttctgaaaacattgataataaaaatagcaaaatatgaaagccaaaatatctgttttcttactgaaaaagggcacgctacagcagtcacattgttaggtctgatagcaagtggcttgttaagagcaaattccagaatgggaccgactcgtttgcaggcagtactgaactggggcctgcccaggtaagattcttgtcatggggaaacagagaactgatgccctttgccatcaggctaactcccaggaggatgaagagcagagccaaactcagcacacccagttgttttttcccatgttaccagtcaagtacatttgtccccctcagggacagcagagtgagtcaagggttggacagtggtcaggaatgtgcctaggaaagtccctcccctcctggaaaaggacattcctttctaatgggtagccaacagaatgttgtttattcacgtctagtgcatgctaaactgaaatgacagatttgaatagaagtccacaaaatatcatcagactatcatttagagccatatataaattatataaattctaaaacattcctttcttggcaaagaaatgatgttttcgtaataaacagtactcattgagggacatgttaaaggatcacattccatccagtcaatgttaaggatgttggaactggaacttaaagaacatcccatttggtatttttactatgttatttatgatgagacgtcagctagttgtttgtgaactagaacacatttttaagactgattaaatgattttaaccaataactcttcacatcaggtattaaaataggtctacggtatctatttaagccaagccgagccaaaccaaaccaataatacaatgttctgtcaactgtcatgatgaactctgaaactttgttaatatgttactagatctcaaatatgtactctgtcatctcttaacattaggttgttttttgttacacagatctttattaaaatattcacttaaaacttaagtcaatctgtatgctagagtttaaagccaaatagacttggtttattttgcattgtttgtactatggaagcaatattttacttaatttttacagtggatcaggaaaataactttatgccactagcatccataatgtcaagtgtactaacagtgaaggattctacaatttttcataactgttttcaacactctttactaacatgatttgttaaaatgtctgaatgaaactagattctgaatgcctaagttttcggccatttaaaggctgtggccgggtgaatgctctgttggagcactgatcataaagagatcaccccctcaattgtccccctacctcagaaccctctgtgggtctctgcaggccagagaggagcagcaggaatggcagcaggcctccaaggagccagattctcatcgttgcaggaggtacagtagttgggagaagaatcttcttgcatctgttgatcaatggacccatttgcttgtgtcacaagtacttctcctttgcccttgcagcttcatcctgagatgaattctcagagttctcctttgaggttttctttcagtctcatccgtaaccgttttttcccctgtctatgctgagcaacttctgttgcccaccaacaaccaatagcttgtctgagggaagaaatcaactccgacttctttgcaaaactgaaatctctgtgaaatagccagatgcgcacaccaaataagggtttctaaagagaacccaagttacttttcaattaaaaaaataaaatctctgatctagtctgtattcaggggaatgccgaagtcctgttaagtgtcagactcagcagttcagccttccctttcccagccaaacaggaaaaagcatgctctgtccagcgtttggggccaagtagcattatctggagccccaggcttccatcaaaactgataagattggcatgcgcagggcggctgggaacgcgccaccctgggtgtctataggctcatctggccctgctgataggccctgcccaggacgggcgttcacagagcaaagtgtgttttagagttattgtcaaaaagaaggctctttgtactgcttttccctggcacctttgaaactctccaatccagagattgtacctctgggttcaaagctcttcccccattttctcttctgaagacaggccctctgtccgcacagttccagtctccagtgaatcctaatgacgactgtcaggagactgcttatgtagagctgacataagttaaaatagggtccactgtgcaaacttaatccagcacagttctattaagcactctcttttaggtaggtactaccctttctagtctaaacatccttcttctcctcccaacccttgatataattatattttcttgcaaatattttgtatttatacttctggattcattatttaagaaactaaaagttagcaatccttgataattgtttttcttgcaaatatttacttctggattcaatttttaacttttaaggtaaactaagtgctgttcttaagtattctagaattttttggcaccctgaatttttttaatctaaattttctgatgatcacagcagttctgtctcattaacaaatattcagaatatttagaaagcacaaaggagaaaaaaatgacacataacccgtcacttggagacagccactaattaggtctggattttgatttatacacccttagacatacacacacacaggtttctagaactgaaataatatagtatgcagttttgcatactgtttattccccttaatattttaatgtaagcatgtccctatataatttaatacctattgaaacattttttaaacaaaggttcactatattccattacataggtgctgccacacaatgggacagcatgggtggatccatggacagtctcagaagaagattgataagtgactagaacatggactcttgaataagacatctcagttcaattcctggtgctccttcttcctaaatgtgtgatcttggacaagctacttaacctctctgtctctctgtttcctcatgtgttgaatggagataataatagtaccaacttcattttagtgttgatacattcatactccttagaatagcatctggcacctagaaattttccaacaaataaaaccaattattattatttgcaccaaagtttatttaataaatatcttatatttagcttgttttcaactacataaatttttgtgtgtttctcacaatttttaagatgcagttctagagatgtgactactgatccatggaatgcatatttttcagatttaatggcaaccactagcagtgtgtgaaaatatccctttaagactttaacaattcttaaggttccttattagcaactgttactttggaatattgagatgtcatgaagagaactagacttagaatatgaaaatttgaattatagtttgagttctacccacaatgctggctgaggtaactttaaaaaataagtaatttgtgcttagcctcagtttccttaaccttatagaaagttgtcaggcttaaataaggtgaaacttttcttttattgagcaagtactgtacttcaagacctttttgcatgttatctcaacccatgggacgaccatgaagagatattttaacctttcctttataaatgtggttgttgaggccctgtgaagtttaataactttttagtaatcacaggtgcttttctgtctcctgaagcccacgatcttaaaacactctaaaagagtgtgtcattttattattatcttctataaaggttttgctatttttcctatcgtgactgccacttccaggataagaccactggagggcagcagaaaac

SEQ ID NO: 915904 - DNA, 4001 bp, Homo sapiens
gcaccacccctggtagtcccagccacttgggaggctgaggcaggagaatcgcttgaacctgggaggtggcggttgcagtgagctgagatcgcgccactgcactccagcctagatgacagagtgagactccatctcaaaaaaaaaaaaaatatatatatatatatgtatatatagtcttttgctttatttttttttttttgaggcggagtctcactctgtcatctaggctggagtgcagtggtgcgatctcagctcactgcaacctcagcctcccaggctcaagcaattcacgttcctcagcctcctgagtagctgggatttacaggtgtgcaccatcacgcccagctaatttttgtatgtttagtagagacagggtttcaccatgttggccaaactggtctcaaactcctgacctcaggtcatccacctgctttggcctcccagagtgctgggattacagacatgagccaccatgcccggcctatttttgctttttgtgattgtgtatccctttatatattatatactataaattctgatagtttctattttgtgaatcagtagccatttatagtagatgtaaattccattaaaagaatgcaagtaaaaatattcatatgtatcgataattcaaattaggtatttttctcccgttatcatgcacggataagctgacacacttgtttatatgtctctatgacattttctagatagtttagatttggcatgtgttttaatctctccagtagccactaaactgctctgagacaagtatctgtatcttataatttttttgtttcaaggaaaaaaaaagacaagtgcatttgagttggtaattccaagaatggcagcagaagacagagcatctaaagcaggaggcttggaccaaagtggttctgttgcctgtaatcccagcactttgggaggccaaggcaggaggaactcttgaacctggaagttcaagaccagcctgagcaacatggcgagacgaccccaaaacccaatcgtctctacaaaaaaattcaaaaattaaaataaataaataaagtcgttttgttaaccatttctgggccatgataatcggatgaaactaaatcctgaactaatttcccgggcgctcttgggctctgggctaagaactcctgagagtatggtcagtggtctgctgctgcctggaagctcccggtaaaggaatgaaacttcagggcagacagcattcacttcaggaatggtcaaggaaagctaaattcgatctcactagacagcagcccgtgtaaggtttgatccccttggaaggccctttcctctgctagagctgaaagccctgtctccctcgttttcttttgctacgggatccagagaaaacaccaaagggcacttactgagaagctgaaaaaaaaaaaaaaaaaaagcaaactggaaaagagaagacacaacagctctgatgcgagggaggcctcggccccgccccctcccgccccgggagaaccttggccgagcctgcagcgcccgtaatccccaccgcacctgctgcgggagggcccgcggcagctgtctcgctgaggctagggggcggggggcaagggcacgaaacgcaaggacgtgcggtgtcactttctgcacgggctctaaacagatcgcagcaatcccggtaggtccggtactgaaagagaatcacgcaatttgcgctggggggcctcagacgcggaccaaccccctcttcgatctgccttctaaggcccggaaataagtctcagcctcgagaactagagcacttcgaccagggagtagaggaagcgttattgggcgtggtaccctgggttaggaaacctggctgtagacccactccaaggaccgcactcaccgaattgctgggctgaggtgggggttgaaagccgctgtcaaggcgtgacccggaagcagaagctgtcgggggcaggccctctgtttaccggactagaagaccaactaagatgggcgcctgcgcactgatgagtgttcgtcagcggggcgcgcctgcgcagacttgtgcagcagctttcgccctccagaggcctagttagggggttactttctccttttactcagaggctttgcgcgcaggctcagtgcagcgttctcggccacagccgcagggttcgggtcttggtcctgcagcggggataaaaaagctcaggaaccctgagtgttgggccgattctatatggttgcacctgcgtggaccaggccagcaggggtccatccacaatggttcagttgcttaggagactaaactcttagtaggaagtgtctttgacaaaaatacttacagcattattcataatggtggaacgaatctatgctccttagaaccctcctgtacatgtccaccctccttcaagtaaaccatatcaaagacaaactcaaccacccaagaggtgtagtattctaaatgtagaggaataaatgacctttataactcttattagggttaatgaaacttcccgcacaaaaacatgatgacacctctgagtgacagactttctgtgcaaagcataaacattttgaagtcagcagcacatggtggtggtgcatggaaggagtgaagcagcagcccatttaggcagactgcaagagttgtggtctgcccggtagcctgtttaaccagagtgccccacacctactccccagagcttgttctaagcaaccaaatctaaccaattagagatttaaagcaggcccagacagatcatgtacatcagtaagaggatggtaaactgaaagttcatgacctggtctgaggagtgggcctcctttgagctccagactcaaaggaattttgccaggtaggaatatgccctccacttcctgccactgcaccatggtgagatcgtccatttttcaaaagaagctgaaatacagattttttttaaaaagtgaatttttccaagttgcaaatgttggcaatgtttttattattattattattattattattattatcatcatcattatttatttttgagatgtagtttcgctcttctcacccaggctggagtgcaatggcgtgatctcggctggctgcaacctcagccttccgggttcaagtgattctcctgcctcagcctcctgagtaactgagactacagtcacctgccaccacacctggctaattttttttttgtatttttattagagatggggtttcaccatgttggccaggctggtctcaaactcctgacctcaggtgatccaccctcctcggcctcccaaagtgctgggattacaggcatgagtcaccacactggaccacatctctcaaatttcttggttgggaaatgctgaagtatataaattctgggaaaccatcagcatcttacaaatgtaagaatgagcggagtctcccagggagtgataaaataggctctcaatacaggttattttacttatttattgaaaaactgagtacacttttattttacttggcctgcaactcagtatatgcagaaaactactctatgtcacactcatgatcaatatcttcttatttccatttggcatgtcattgaaaacctagcccatcacttagctaaaaatcacataagagacccctagagaaatcaaactaactttttttccccccaaacaatagatctcatctttattagtcaaatcagtacctgctgatagggcagtggagcaagcctgacagtgatattcattaacaaagaagacaaaacttatgctttcaagtacaaagataaactttgaatggcagagagcctaatctgactatcatcagccaccaagaacacagaagagcaaataactcaagaagagagaagccaaagtgctataaaaattattcttttctgtgaaattcagttccacagcctgtatgagcaagggtccaaaacactggagagccaataaagctgctgggagggcccattcataatgggagatgcactggctgtgcctcccttgctgtgtccttccatgagcgtcctccactcttcact

SEQ ID NO: 915905 - DNA, 4001 bp, Homo sapiens
tgctgctcccttctgccaggagcccactgcttttgcacacaagctgcattttgcgcattgactcaggtcccagttgctcttcatatctccgtgaatgattggagtgcaaagatactgttctgagcgcttcccgttttctgaaagccatgtctctcaggcatgcctcgcttagttggcgatggggttggttgactgttttcgtttttttcttcttctcttttcttcttcttcttcttttttttttcttttccttttctccccctcccaacgccactgacaagaaagcactaaagatgcaggttgtgcgatcaccctataacataaggaaaagaacaggagaggttaatttgaacgtgtaggctagtggtagagggagatggaggtctggggaaagagtctgtcaggtagacatctcttttaacatgtcccagtattcggttcaccagtatctctgcacctcactactacccttcactccttggagacctgggcaaggccattttcagaggccagtgctgaaactaacaaactaggacttgaaatcgaccaactttcacaaattctttaaataaaaatccccttatctccttggagacatccccacttccacagacactcagagggaggacgaaggcaagaatacccccctgcccaccccaaaatgcaacctacctgcttccaaagtccattcgcaccagggcctgaccaggccgagcccctcagaaccagttggtgaagtcgagaagctcctgctcctcggggctgagcgggtcgtaagagccctcgtccgacgagtaggatgagaccggcgagccggccatggagttcaagtcgttggagtagttgggggagatggtgggcgacaggacgcctgcctggaaggcggcgctcaccgcgtcatgctcgtccagcagctgctgcagcgcgcggatgtactcgaccgccgagcgcagtgtctccaccttactcatcttcttgttggccgcgccgttggggacgtgctcccgaagggtggcaaagcccaggttgaccaacttgacgcggttgcgctcgcgctcgttgcggcgcgccacggcggccggctgctgctgcggcaggctgtagccaaagccgctgaagttgagccggcgtttgcagcgcatcagttcgggcgaagacgagcgctgtcgcttgacttgcttgggcgctgacttgtgaccgccccctgagggctggccgtcggccgccggtctcagctgcggcgcctgctgctgctgctgctgctgctgctgctgctgctgcgcgctctgcgctgccgctgcggcggctgcggccgccgcggctgcggccgtggcaaagaaacaggctgcgggcggcaggaagggctgctggggctgcggctggggctgctggccggcgccgccgctctccatcttggcagagctttccatgcgcagcggcggccaaggagtcgcggaatcagagcgatccgggacgcgaggtgcggggcccgcgagggggacacagagagaacttgggtgcaggaacagagagggaaagaaaaggaaatatgaagcgggagccctgacggaagttaaaaaatatatacaaaatccccgggagacttcttagagtgggagcaaaaaaagtgaaaatgctttttctcctccctgcacgccgcctcctcctccctcccctcctcccttcgcgggttggcttcgggagcctcgcgtggcgctcgcgtgtgaggctgccgctggcgccttcttgtttctaagaaaaaaaaaagcagaagcagcagcaaaagtcagtgctgaacgcgctctgccgcgtctcgcgttcctctcctactaaggctgcgctctcttgcgccgggtctcggtctctccagccgtggctcaggctgtttttattattttgttaactcccttcctttctgatttccttctttcactcgccctccctggccggatccctgtcggtgcgccttccacgttccctggccagaagtgagagagtgctgggctgccggagtgcgtccgccttttcaatgggacacccagccccacgcgcagccctggccccgcctcgccccccactccccgctgctgcagcgagcggctgcagcccccactcccccccctcctcttacctcttcctcccacccactccctaaactccccctcctcctctcctctccccccctcccgttcctttctcccgctccttgcaaactctccattcagctgggtttgttgttgcagtgcgtgcgcctggcgcgtgccggactcccggctgaataaacaggcggcgcgctcggggcgggctgctgccgggggtggctttaggaagggggtggggggcgtcacaggagggacaaatggctctaggaattgaggtgtataggtggaaagacttggggtgaagctctcttggattctactaagaacttgaagcaaagcgcagggaagggtttgggcagaaaaaatggcacaggaacggtgtggaggtgaggagggagtggggctcgacttttcctgttttctctctctcctcactgttattctcttcgggttcctcggtgaccctagaaattggagcaaattacgattgaagtttagaaacatggttgggggagggactccgtccagaacagtgaaaaaaagtgctggactatgtgaaaacgtgggttctagtcccaaggcgtcctctcaatgctctgtggctcctcgaagtggcatcctctctgagccttcgcttcctcgtctgcagccacagaatatggtctctaatgtcccattcagctctaaaaactaggatgtgctccccataactgagcaagtgtgtggggggccgcggggaagcgacaccgaggagtggttgtgagccgtcctgtaggtgggtgtatatggcagggacgtccccctaggatgacctctggccccctgtaccatcgccccctaccgccaccccctccccataaagattatttccggaccagcttagcggatatcataaagaagggagtgctctgggatactcccagaccctcggagaagaaagatgcggggcgggggttgagtgatggcgcttagggcactggtggggattcctggttcttcggcgccgccgcgggcacctcggcggccttggcgcagccaccatcccgccccaggcgtgtgcccggcggcccggtggcaggcgactgggagcggagcccggcggggccgcgtgctggcgccgagagggagggggaggcgcttgcagccgtcgctcgaccgcttggacagcgcctgcccaggcgtccttcctgggccttcggccctggcgctctctggccagaaccccgtccagcttcaggacgtctggggacgcggcgctgcggagaaagcagaccaagcaataggccccatctctttaaggatctggtccggagagaggctggggcatgtctcaggtcttgtctacataggcagaacgaagtggagggcaatcatccatttgattttccagtagaaataatccgagatctgggtgcaggaatgattgtggtgaattatccggataattggttctaattgaactcccctttgtggaggtggatctttctaaagggccaaggggatgacccagggagctgctcttggtatgtgggctggctgagtgtttctggaacaatagtgatgatggtgggcagtaatgacgggcggctcccgaagtgaatcacctctcttctctacctcagtttcatctttgcagaataggtaggcttcagaggtataggaccaaatcgtgccaacagaggtcaattctgtaacctttcccagccacacagccccttctccccatggtaacctgtggcttgatggcctcacaggactggctgaaccccgtgggattcacacctcaggcctttctccacatccctgaccaaggaaagggcctaagaggtctctggaagtataggaggtgagcacccaaaagcagagtcacaacacagcctgggcaccctgcacctccca

SEQ ID NO: 915906 - DNA, 4001 bp, Homo sapiens
gtgtaccaagccacggattccctggcaccatcattcacacagtcaacaacagcacatgctggcaaattcgttctcaagtaccagcttacagtctccttcacccaaagcaggaggtcaacaattactttccattacattttgaatacaattcccgaaggaaggaatgcaagaaaatgttcctctcatttttaaggactgtttttggctgtttggggttgtttctgttttggtggcggtaaagttcttctttggttaaggtttaatgtttatgtataccatttacccacaccacggaaggtgggaaattccagttgttctcgccctttgagtttttagaataatcgtatttacaatgaggtgctcagaatctgaaacagtttgcattttagaagtataggaaaagagtctccttaataagcacctataagttgcaggcacgtaaccaataagggcaggggagaaattcccaaatgtcaaaacaactcccccatcccccaaaccccagcacccatttctttttcttaagatttaggcctggagaagatgccagattaagaatgcaaaccaccttcgaagaggaccttaggttgagcgcccggctgcgcgctgtgcggcgggcgcgggggtcctggccagttcgggcgctcgctagctgcccccctcctcgggctcgctgctgggcgaaggcgccgaagaggccttggactccccgtcgctgttgcattccgccctgcgctgggggacggcgccggccgcgccctcgagcccccaggcctggcgctccagcagctcctgcaggtgcttgatgtagtcgatggcagcgcggagcgtctccactttgctgaggcgcttgtctgccagctcccggggcaggtggtctcggaggcgcgcatagccctcgttcacgcagcgcacccgctgccgctcgcgctcgttgcgcttgcggaggaaggcgggctcgaaggcgctgtccagcggcacgggcaagtactgccatccccgtgcgcagccgctgcgcgcccactcccagcacgcggcgtccagacgcagggcgaccctgagggggtccctccgcgggagtccgggcagggtccccggaacgcccaggggcgcggtgcgcagcgagtatggcaaggccagccgttccgccggtttacgcgtctccatcatttgccggaaagcacacaaatcactcaagaggtcaatctctcaatagaagaagacgaaacagaatcttagaagcagaggtgctggtgcagactgcctggctcagtgggtctgtctttgcagaagtttctgggtccagaagttaggttcctggacaggcttcagggaaacggtgcatgattcctgaagttcattgcactcctcgatctttttatgatttaggcagaggtggtaggcaaagacgtaggatctcctaatccacacttcaaaccccgtcttccccactgatcttctttcagaagataacaaagggggttcctctgcctggtcccccagcctggaaaggtgagctcacaccagagtcatcttccaaagccaccaaaagcttttcaatgcctgtaatccaccactctaggtcttcaagagatgagtcgttcgccaagagcctagcaatcttcaggatttgagaagagctcctcccaggaacctgcagatctggcggcggagggaaagtggaccagaggctttctccttgaaaatcacttgactgtcctttgtggtttcccgcgaccaggtctaatggaaggagcttttagagtgtttgcaaacttaaacttgctctttcatttctggggtcttagcctcatcaaaggaaaaactgctctcttgcggttataaaatgtgtcaagtcaaggaagacccggggcgaggcttgaggtttttcttcttccaaaccgaatcttttaaaaactcaatgaggcatgtttgaagggtataggaaaaatacagactgtagcaaagaatataagggtctgcatattatgttccaacatatgttgttttatggttgttgagggtgttttatggagatgcgactttttaaaagcacatcaaaagactgaacaataacaaacgcgcttagccggttatttctcacagtgcttactgtaaacacagcttaaatactgcttcccagcctcctcttctaatctcacccaggatataaggacatcatctttccatagcgcaaagagtgtttttccattggattcttcttctttaaaaaatgtcatttattttctctcttgggggcaggaaagcaacatttgaaaggtggagactccaagttccaaggagaaaggatgatgtctttgaagacttgtctttttaagacacaacccctccaaaatgaataattaatccatccgtgttggtaaacctttgaagattaaagtgtcattaaaaatccaactgtactggttaacgtcaaagaatatgttatcacactgaaaatcagatttcctcttctgcaaaccagtacattaaaggtgtcttctactttaaaagtcctacttaaaaacaagagaagcaaaaaccccctacatttatgatgagagcttttgcctattcctcagcagacaaggtgctgccctaacatgtttttctttttagtttggcaagtcctgttcttccctgtttgttctaaatgatccgcctgaagcaactcaaaaaacaaggcaaataaaatagaaataattattcctttcgggtataagttagtcacatttttaaaggtgtagcttggctgggtgcagtggctcaaggttgtattcccagcactttgggaggccaaggcgggtggattgcttgaggccaagagttcaagaccaacctggccaacatagcaagacccccatcttttaaaaagaagaaagaaaaattaaaagttgtagctcctgatgaggtttgtactggcaaatagcctaatatatcatcacaatttctcagtagaattgagaaagccctttctattaggagaaaagtccaccactcaggcaggtaggctgttataccacaaggtgctttttggccatgtcaaagattttaacttttaagagtgacaggaagataatgaaatattttaagcagggaggtgacatttgaagatttgtgtttcaaaaaagataactgtgtctgcagattgaggactagattggaagagagcaaaaggaagaacagttgagatgccatttctccttctcagattggcaaaagtttaaaagattgctaagattcaggggaggcaaggatttgaggaaagggtgggagcataaattgcttcaagaaactattaaaattattattattattattattattattattattattattttgagacaggtctcactgtcacccaggctggggtgcagtgatgcgatctcggctcactgcaacctccgcctcccaggctcaagggatcctcctatctcagcctcctgagtagctaggactacaggcttgtgcctccacatcccagctaaacaaactgttaaaattaatagtgcacatcacatcctttgattcagatatctgtgccgttttgtcctaccaaaataaatgtagcaatacctatttatgtgtacaataatctttattgcaacatttgtagcaatttaaaaaaacgaagactccaggcaaggtggcttatgcctgtaatcccagcactttgggaggccaaagtgggtggatcacttgaggtcaggagttcgagaccagcctagccaacgtggcgaaaccctgtctctactaaaaatacaaaaaattagtcaggcgttgtagcaggtgcctgtaatcccagctacttgggaggctgagacaggagaatcacttgaatcctggaggcggaggttgtactgagccaagatcacgccactgcactccagcctgggtgacagagcaagacccagtctcaaaaaaaaaaaaaaaaaggcgaggctgggcacagtagctcacgcctgtaatctcagcactttgggaagccgaggtgggag

SEQ ID NO: 915907 - DNA, 4001 bp, Homo sapiens
agctgggcatgcagaggctctaccacatgggtctgaaatgacaggaggaactgtagtggctgcccaggggcagggcatcccatcccagcacatgggtgagaggaagcatggataaggtgggcagagagacaaggcaggggctgtggcttttatactgtagtttctaccctttaaagatgttctgtccccatcccccaactgacgagaaggtcaagacagagtggccagaatgaaggtaaagctcactccagagagggtgacaatgtctcatacctcaggctgggtgggggtcgagctgttctggactatgctgggatcggaggctgggtgcccttaactgggtgctcagcagcaccctaactcctctgctgtgagtggcaggtttgggggtgggggtgggttaaagggcagggttggctgggctctatggtgggtcagggaggcagacatcctgactggaactcaagcaactccaggagcagggctgagggagggtgggagccacccacctgttgttgagcagggccagcagctccccagcatgatacaggtcattcttggagacttggctaaagcggaactcgttgaggttgcacagcgtgacagcagggaaggtaagctgagaggcagccacctcgtcgagcttggtgacatggtggtagtggaagtagtactgcacacgctccgtgcacacacacagcagcacagccagggagcccaggaagcacagggcccacagtgcccgcttcagagacagccgctcgtaggagaagatgtgggccaggccgtgcagtgtggagctgctggcgaaggcctggatgctcaccggctggacgccacccacctcctcctcctcggccttcagttccatccttgttgaggggatcctgggggaggagggagggacagtctatcattgtcctgggatgaaagtacacatggagcccctccacatgtgcccatccagaatcctcatctccagaggtcaccactcctcgggcagaagacttccctgctttgcaagcccagaggtggctgaccaagggacacatccagggttcctccaaatacagaggcacagggggtcaggtcaggccaagagaatgctccccagagaagcttcccaggcccggggagaccccagatatagtcatccgaggttgagggggaagtcctgatgcacccataggcaggcgcaggagttccctccagatgtggggtcactctgggacaagaatatccaccccatcctggagatgaaaactcacccagatgggctgaccccggggtaaggagctcctgtcctggtcacgggtattccctggacggggctgtggtcctaagggctaaactggggccagaaaacccccagggaggtggctacatctagggaggggcccagcctgagtcctcacctgcgggtgtctccagttctcacataagcgcaggctgtgtgtatgttgggagtggggggtggcgggctgcccgaggtggatgtatggagggggggcgcggttccctatgacagcgagctgtccccgccccggacgcagccccccccagtccagcttctcgtcgcagtcagatccccagctcggcccccgcccccctccccagccaccgagccgccccagcagcaagggaaatccagagggaggagagtcccggcttcggggtaccgaggagcctcgcggccaaaggcaggggtatcggaaacccacctgagggggcttcggcaagccggcagccggcggcgggtcctggggcgctggaccggtggcgggctcagcgccgagtcgcggaggggctcatggcccggggccggagcccgcggccgccgcggcacgccgcgcagagccctgcagggagcgccccgcccggccccgctcggctccgatctgtccgcccgcccgcgcgcgctggctcgctggctcgctcgcctcggctcggtctgcccgggctcggcgcggtgcgcggtgctctcagccctgggatctgcagggatccatcgtccggccgggaggcggcgggaggggagggggaggggagagggtgcgcgtgcgcgcctacgagtgtctgcgaggctgtctctgggctggtgtgcgcgcggggccccggatccgggagcgggacccagggctccccgcgccgcctcgcccctcctcgcggccgctttcggcggcgctgcctctctccagtcccggagccgtctccctgcctgcgaggccctatggcttgtgtgtatgactctgtgtgtggtgtgtgtgcgcgcgcgcgtgtgtgcgcgcaggagggagggtgtctgcccctagcgtccctctccccgcgctgtctccttcggatcgatgctcctgcctcttgctgctgcttcctctggtggcacacacgcgcgtacacacacacatacacacacacgctccgagtcacacttgactaattcaagcacttagcccatatggagacagacacacataccgaccagagtcacaccacaccattcacaaccacacccccccgcaacagatgtccacgtatcccgggggcctgacccacatggcaagcactcacctgctcttatccctgctcccacctgcatgtgacacatatacacgtgcacatatgtgagccaacacgcagccttgaccactcagatcccatccttgtagctttgggcttgtggggggcatggtcgcaaccccttactgccaaatctccaaagaaggagcagagaaaaggaaggaaaaatagccagaggtcaagggaatttggacagaaggaaggaggcaaagggagtgaaggggacagggtgaggaagggttggaacggggagctatgctcagggatggagcagaagtctcagcacagaacgcaggcctgggggctgctcctgtggctctcacctttctccttccctgcctccctcctcttctctgagaggccttggggaggggggccctccctatccaattaacagagaaggagcaatcaaggggaagttgttaatttgctgatgctcattaggggctcttagcacagaggctgttgaggtctgatggtgtcagatgatgaggaggagggtgcgggggaccagagttctgtctctagtggctccttcgctctacttgcaggctggtgcggctcggggagaaggatggtgagaggtgtattcctaggacatggtgccgggctttaagttagaagaaaacctgtaacgagaaggggatggcacattggaaagaagttggatgagaagttgggagtagtggacatctaggaaaccagagaaggggtctggaggtccctagtgggagagtggacttaagattgtggaggagggaggtcgagatccatttactaggggactggacacggagctgccaaaaggaagggaggatcttccattcaggtcttggggagctgttcagcggtaccaggcagtgctggagggttgctatgcccccgggcagccactgggtggcagccctctcccagatacttagaatcaactcgtggggggcatttgagagtgggaaatcacctgggagggtcccagagacctgaggaagcatcaggcagagtctgattcctgaattccaaatatcctcagggggaggggaacactattttggagcatctgtaatttccccacctccccgcggctcgcaggctgactgacacgtggagcctcttcaaatggctgcaattgcttcagtcacctgggatgttactgagggagcagcgggggtggagggaaggtgatgaggtgaggtggaggcaggcgaggactgattgaggccaaggagcagcctcaggaggagtctgggggaagacagaaggtatgaatcaggagaatcagcttccagacctggccctgccattcattagcataggcaggccccttgacctctctggacctcggtttcctcatctgtaaggcagagataatatttatttcacaggatttttcgaggattacatgagctaacgcatggaaagtgctt

SEQ ID NO: 915908 - DNA, 4001 bp, Homo sapiens
gtgggtgaggtccagagatgaggcaaagagagaactccaagggctcctagtccccagccccatgaccaggtcttgcggcacccagccacaggctccaggctggacatatgcccatgcctacactccatccggagttgtatgggattagaggtgtctgaggccggctagcagccctgtcttgcgccggttcagaggacagggctgctgtacagtggattgctgctgccacctggtgggcctgggtgagaactgtctgctctactctcgggcccagaggtagacacattcctatggctcctggcctgaggcccagtggcccaaacccccaggcccctgtatgcctgcagtcatcccatgatgcacgggtatgatgacaccccctgcccctacgctagggagggggtggaggactgagggatgggtgtgtggggcagggaaggcctggcatctgggagctggtggggcaggagagcagtcaggccagacagacctggaagatgaacttaggagagacagtggggtaccaggtggccccccagcagggaaagccctggacccctgggtggggggccaagcagaaggacagttcccagtgagagcttcccctaggaagagggtccctggccacttaaagctggggagagggatatgatttagagacctgttatttaccctcagacacacacacacacacacacacacacacacacacacacacacacacagagctggtgggggtggggcgtccataggagggcacaggaagaccaagtgaagatgcaatgaagtccctgctgcaggagatgctgacaagggccatggtggggtggggttgggggatatccccacccctctactgtcaccctttcactcccttctcttgtaccaccagagaccaggcagcacccaccccagcttcagtccatgggtgctagtcaaaatagtgaacaactggccaggcactggcgtccaccaacagatcaaaggttgacctcacagatggagcaaggtcccgggccctgctggaccatgaggaagtcttgagaagggcaggtaaagctggaggacatgttgggaggcagcagcaaaataccaactaagacagacgtgtttcaagattctaacaggaaaagcagcactggtgtggacctgggaataccagcccagctccaggccccggactcctgggtgagctctggcctgtgtcagccagatgaggtagggggcagcacagtcatcagccccagccccagccccagccccaaccccaggaggtgacagtcagggacagccatggcagacactcttggggtactgtggcaggcatggggctccactcaccactgagaagttgtgagggccgcagggtcccccttggtaggagcaatagagcagcatgtcctccagccggtggcaggagcgattgtagaagcggtgcaggttaaagggctccccagagaaggcctcagggcccggtggagcgaggggcaccccggggtcatcactttcatccagtcccagcatgggggccaaataaagcaagtcagggtagctgagctgggacagccgcacagcattagtgttgcagagggtgactgccgggaaggccagctccgtggtggccacttcgtttagaagggtcacgtgtgggtagctgaggtaataagcaacgcggtcccctacctggcacaggaaggcacccagtgccaggacaaaggccaccgcccacagcacctgccttggccctggacccccctccacaaaaatgtggttggtgccatggagggtgcagctgttggcaaaggccaccaagtccatgggtgaatgcccctcactggcctccttcctcactgcctccttttccttctcttcttcctcctcttccgattctgagatgtcctgctgctgctgatggtggtggggaccccaaatatctcccaagggccctggggcttcctctccagaggagaatgacatggagcagaagatctggatgggcattttctccaggggcttcctggtgccagggatttgcaggaggaagggggaaggtgccagaggggaaggcgatgtgactccaggcagagtccggcagagccagccacccagcccgtcagccaggtatctcagcccagctggccgtccttcctcaccagggcctctgtggcagtgtggctggggcggggcatgggaggaggaccagcctgccctgccagggagggcgggtgtctgggctgatgaataattgatggcagtgggaaagggaggctgatggagagcagggggctggagcccctttcctgtcaccagctccggcagcacagagagggtttaggacagagtggaaaccctggaaaagcctagggctgggattcctggaacccacccctcccaggtgagacgggacctagcaccatcctttgcacccactgccatgatgatcacagcgaccacagtccctacccccccaggacacacacaacacacactcatgctctctgtcatcctccaatctgttcctcagcatatccctcagtgtccccatcccaattctgggtcctctcccttattctccctcgtccagttattcctctgggatacctgagcccctccgtgccccaccaccaggtactctctcagacctccaattccagtccccgaccctgtttctcttcccctccctccctggccccagctctatttcaggacagcattaccagccctcgtcctacccacctatgctgagatgtattttggttcctttcctctcccctacccctcctgtggcttgtgggccagcccaggttccattagcagcagtctctcactgaccacagactcatttctgaccagttcccggcactagggggagggaccctgtctcctgcagtgggaaagcttcctggcagatcaccactaccctttttggcctgccccccgccccccgaacagtttagtttgttcgaggaattctctggtgggtggaagaaattgagatcagtgctgggggtggggcagggggacctgggtcaggtagagagtattgggaaccaacttggggttcccaccaaaaccctcagccttgcagactcccggcctcagtctctgaggctcccctaccgctaatttaccattccctgcccccaggcccctggcccctctgtgtgttctgattactcagggccactggttgaggaacttgagccatcagccaagtctccagggccaagaaggtgacccgaggggaggaggggaagcgggggagggaggtatagcagattaatgctttctctgcagggccagaggaggagcagtggggctagaccggggctaggtgggtctgcttgggcctccccattccttaagcatcccctagccccaggccatgttccccttcctcctcctctcttctccctccctgctcccaccatcttcccttctccatttgcagagaccctagagtgtgttggggatgtgaggcagggtgtcaggttctagcagaactgagtgatgtggaacctttggcctcagctttgctgccagggacaaagaggcctcagaagcagagtcttgagctctagcccctctccatccttctgccactgccctcagactggcctaaacaacagccactgtcctcctctttctgccactgccctcctcttttgcctaaacaacagcctctcaactggtctccctgcctccctgcagtttctccccacctttagttcgagttgtgtgactctgaccattcttctgcttaaagaccttctctagccaggtatggtggcacgcacctgtagttccagctgcttgggaggttgaggcagaagaatcgcttgaacccgggaggcggaggttgcagtgagccgagatcgcaccactgcactccagcctgggcgacagaacaaggctccatctcaaaaaagtaaagaccttctctcactccccactgcctcctggcaaaatttagtcctctcttgtagccccacaaagctgaa

SEQ ID NO: 915909 - DNA, 4001 bp, Homo sapiens
agaattacggaaattaataaatatgaagcactttgaaatatgtctggcacatgtaaagtgctcaataattgttagctgttattattactggccccaattaaatatccattatatattaatcccaaagggcagcgttatgtaccacatttttaagtaataaacacacagtcattatctatagcaaattcatataaaaattcatttatgcagttaagtacatccccaaaatcatgattttgtttgtacttcacactcaccagctttttgaaaggaaatatatcatacattattctacaatattccatggaagattctactgagcaagtccacaatgatttagatatgggggccaaaggaatgattccttgggttctattcttcaccagcatatcaaactcgacatgctgcctgcaagattctgccatataagggcagtgatccacaacaaacactgttttatgagattcagaaaaaatcttcattttgttttaacctgtaaggggaaaaacatattagccaaatatttgtacataacatcttacattttttctaattttctcaagaagattgtctttccctcaagaagacttggtagggaacatgaataatatgttcaaagaaatctgtccgacaaaggacagtttaatgaggtcatgaccagaaagcaagggtatcaatacaccatattaggctgtcactctaccaggcccagacaaaaataccagtgcatgcatttttggttttgcttttaaaatgaacttaaaattgtcagagggaaacattttgacatttaattgtatttgattcccttacatatacgaaacataagtgacaaagactcttgaaatacaactttatgatccttgctaattgacattagtcacatataaaccccaagccagcatttttgcacttccctccaagaaaaacgtttgaagggggactggcgggtaggggtgcggaattaacaggaaagaggagtgacagcaaaagaaaaggccaaaacaaagataaacatctcctaagataaccgcacatcaggtcttcgccttaggataaggaccccaacttcacactctccccttagcttttgaaacatcacagtaatttaccaggtagagcagaaaaacttagttgttaccatcacactggtgtgtagaaggaaatttaaaacttttaaaactttttcttattaaaacagagcatacggtactcccctgcttcgctaacaaaatcttatactgaatagacaatccacattcgaaaagcacatggcaagcaaagccaaagtgttaaatcaaaacgaactgatttcttacgatccagctattttcacctcttgctttcaagacgcatctccccttcatgcaaaactctctttgagaaaccttctagacccactttgctggagggtggggggtggaaaatacaaggtgagtggatagggaagacctcaggatcgaggttcgcttactttcgtgcctggtcctgcagtgaaaacgaacagaggctatggaccacagcctctctggaaaaggctgctggctgggcggggagagtcagcgcacagtcgggagtgtctggtgccacagacaggggactatgctttccccgatcatctcctagcacaccggtccttcccaggcttcctaagagcaggagcgcgcgtgcgcgtgcacacacacacacgcactcgggctcgcgcgtgcgcacagcgctctccgatagcccggccaagcctcccttccccctcgtagggccaggcgtcccagtcgccgaacaggaagagggcggggccaaggaggaaaaaaaaagcctccacccctcgagattttccacccgctaattttcccagtcacccattgggaagcaggatctgggcgacctgaaagcctccccaacagcgaagtaccaaccacggccccctaagcgtacgacccacccacccggtctccccttctctgtctctccacccaggccggtttcccctggaaaaactcgcgagactttgcgagaggccgagcgaaagcctgggaagggaggaatagggagggacatagaagggccccgccctgccttctggggcaaagcggagagtggtcggttctgccccacagtaacgcgaggaaagaaatctcgcgaggctggagttctccgggagcgccggtcggaggcggtcggcggaggtgtctaccccgccggtgatggcgttgaacgccactggcttcccggccttccgtccgctgcctccgtccgattctgcgtctgcttgctgaggaggcggattaggggggcgcggagtctcttcccttgagtgcataggtcccggttggtagagggtttgagtccgcatcgccacagctgaaggctgcgagggactaagagcagagtaagtggactaaatccagggacgggagcaggggtgggcgagtcggaggcgtcctttgccggggcagtccttcgccggggccggtgccttgcgcctcttgaaccaccggcgcccggccctgtccgcttcccgccgcgggctccctgctcctgggagccggacttcctctccgcgccccccgactccgagctcctcttaatggagatgcggtgcggaaagttcaatgaaaagccttggctctaaccctgtggacacaccttccgtatctgctttcatcctgccttacccacctgcgagttcaccaccggacgggggaccctttcagtcacctgtttgcagcgtttaatgaagataacttgtttcttgaaactgctctccaaggggtattactcttttctggttctcttcctgcctttcttctctatcccatctctgataatggttccagtatctgtcctgctatccgaactagaaaaccaggaatcatcattggttcttcatttccacttaacactgcactgtattattttttttttcgccagaattagtgcggttgccccctctgccccccgccctccactggtttccctactataatccttccatagagttattctgaaatacatatttatctctgtcctttccttaaactttttagtaaccgtattgctgacagcatcaaatcctaattgttaagcacatcatcattcaggatcttttacagtctgccccaatccattttaccttttagtcctgctttaatatcctaccatacaagactatactggctatttccccaaacatgccatgcgctttgacagctctgtacttttgtacgtgcggatgtctaggatgtttactgttcctctattttaccacctgtcaaaacccaattcataaatcattgtcttctcagactcccccaggtgacattgataccgctgtgctcccaacgcatttgaaacttttcttctgcagtatttattaggttgtattatttgtttctgtctctcctgccaatttgaacctgggtctgtctggaatcatgtcttactcatctctgagaaaaagtccagtacttggcacatagcaagcattatttatatatacatatgtatgtttattgaaatggaatagttctaaggaattcaccgtaagagttcttcatcctttaaaatcatagaattttgggccagaaggaactctgtacattagcttaaaggtcccgacctattttgattatgagaaaccctgtacttctaatacacatgcaattggacttttagtaattgttggttgaaattatgtataatgacagaaaactactatgcttttaaatgattttgtattttatttttacagtatctatttatatttgagaaatggagcagaaatgttttagactacagacagtgcttggagtatgtgcattcaggcaactcttctactgactccttagcctgtaggttagaaataactggtttagattaggttagttccttcttgaactgtcacaactctttgaacatatgtatgtgaaacttatattcagccacaattctaagggaacgtgtaattttaaaaaaatcctccagtgtcattacttccaaaa

SEQ ID NO: 915910 - DNA, 4001 bp, Homo sapiens
acagtgcgatgtaaaagtaacattatgaagaaagtaaaggaataaaaagaacggctactccatagacagagcagccccaagggctgctggttacccctttttactgttatttctcaatgataggctaaacaaggggtggattaatcacgcctcccctttttagaccatatagggtaacttcctgacattgccatgggatttgtaaatggcgctgatgggagtgtagcagtgaggatgaccaggggtcactcttgtggccatttcagttttggccggcttctttactgcaacctgttttatcagcaaggtcttcatgacctgtattttgtgctgacttgtctcatcctgtgacttagaatgccttaactgtctgggaatgcagcccagtaggtttcagcctcattttacccagctcctgtttaagatggagttgttctagttcacacgcctctgacaccatctctatttaaaaacaaacaaacaaacaaacaaaacaaaacaaaaactggcaaagatagcacaccctatatttaaagtcagaagggactgccacctgctggtgatcgggtaggaatggacagatagctcacagaccaaacctaaccctaaaagataacggcaagtattaaagagctaatacattcgactttagggcaacagtattgattctaattaagacacggagataactgcatatgataaactccaagaaaaaagagcattttagaagaacgcatttctgttaacaaaaacctcaggttaaaatgcattctgagacataaatgcctacgaactcatcacaggtgaggccagtttgacaaagatgcctgccagatccacgccgagcttctgaaccctaaaggttctcaaagactaccagttgcccaatctcttcaaaacactagcgccacaaccagacattatttcacattgcaatcatttcaaagcgattcagccgccagctgcacggcgtcgatcaaagtgagaaatgccaggcttcgttttttgacatacaagatcaaagagaaagtcaccctcggctgggtcgcccatcccaaagggtacagacgcccttgtgtcattcctagccaggggtaaagccgcctactgtccccactctgtctccgctgccaggcgcatctctccaggactgtctggggcgtgcgcaatgcccgtgcgtcggttgcccgctagactgcaagctccaggagggtaaggggcgcgcctcttccctcagggtcgccagcgccgacgcgcttcgaggaccctgtcgcggggttaaccagacccgggctccgctcggcggacaccgcgccgaggccatatccgcgccgccctccgcccggctccgggcccaacctcgagacctcccacggagagctagcgcctgcgactgcaaagggcggcttctgaggcgaaagccaccccgcggcgggcggtttcgggctttacttttatttgggggcgagggaaaggaggagacgcacgactggaagggcgcagcgcagctctgcaccgaggcgcggaggccggaagcgcgggcggcccctccccctgccgctgcgcccctcccccaccgccaccaccgcgcgcgacccccaccaggcgcgcgacccgcgctgcgtccccgccggcgccacgttcccgcgtccttccccgcccgggccacggggcacgtccctccccgccccccacttacctgtggctgccgcctcgccgctctccggggcgggaacttccactcccccctcccaggtagatccgaattcactacccacttccccaccccctcacgcagcgggggacaagcctccttctcgggggtcaggcggggcggggagaatcagtgtcacttaacagccaactgtcctaagctaccgtttcctcggcagtcagggccgctactggcggcatgatctacacaagcctgggggcgggggcgggggcgggggaggggaggggggcaaaactgagcactagtgtgcgtttggggtaggctatggcgctgcctccgcgcgggccgccgtcctgcgtcaccgcgctgcccacgtgacgcgccgccatcttgtacgcggtcctgacttgtggctaggggttcctcggaacgcgttcctcaggctgcagcgggagagggacggtgcctgcggttccgtttctccttaggagctgtaccccacccgccctacgtccgcttccggaggccatgagcagctgggtgctcgcggggggcgttttcatcgattagtggcggcgctgtcaactcacctgccaattgaccttgaccgacgccggccctgtcctcttggaaggagaaatgaagagtgaaggctttgacttcctcagctttttttttttttttttttttttagatggagtctcttttttttttccgagattgagacgggggtctgtggcccaggctgtagtgcagtggttcgatctcgactcactgcagcctccaaccccgggattcaagcgattctccaacctcagcctatggggcagctgggaccacaggcgcgcgctaccacgctcggcttgaagagatgaggactctatgttgctcaggctggtcttgaactcctgggctcaagtgatcctccgcctcggcctctcaaagttctgggattacaggcgtgagccaccgtgcccggccttactcagatttttcttaatcccataaagtaacaatgagttgtgtcctttaacccatgtggaaggattttctacagaaacggatttacaatgagacataacgatgtggccgggcgcggtggctcatgcctgtaatcccagcactttgggaggcccaggagggcggatcacctgagatcgggagttcgaaaccagcctgaccaacatggagaaaccccgtctctactaaaaaatacaaaagtagccgggtgtggtggcgaatgcctgtaatccaagctacttgggaggctgaggcaggagaatcgcttgaacccgggaggcggaggttgcggtgagccgagatcgcaccgttgcactccagcctgggcaacaagagcaaaactgtctcaaaaaaaaagaaaaaagaaacgtaacagagtgttaataaaatgttatgccgtcattttaatgcattacaaaaacttcagaatatttttgggtctacctctctggaagggagttatgccttattcttaatttttaaaatttccttgtaaaatgctgttttatggctttaatgatagtaaacgacaaaagataaacttttttagtatgctcttgacaaaagttccgaaagttttctgaaattttactagtttgagatccccaatttaggaaaccgatttagtggagagagctttgcctatttttggccctttgggtcggagaatgtgatataaagccgaagatttactctgccagacagtcttaagaggtcactaacgtttagctattgacattcagcaaaaattgtggattacctattaaatgctagaccaggggacaactgttattaagtcagtgtttcagcattactgaaagaaaagtggcctataaaggtaagggagaggaagagtttctcagataccagccttcgatgattaacaaagtccagcctcaatcattctggaatccagaatattgatggctggaaggctggttgtacaagtttattgttctttggtgtttggttttttcttccgtggaccacagaatgcttaacaaaagttgatcagtaaaaagcgggggaggggctaggcgtcgtggttcatgactgtaattccagcactttgggaggtgggggagggcagatcacctgaggtcaggagttcgagaccagcctggccaacatggtgaaaccccgtctctactaaaaatacaaaaattagccaggtgtggtggcacacacctgtaatcccagcctctcaggaggctgaagcatgagaatcgcttgaacctgggaggcagatgttgcagtgagccaagatcacgccactgcactccagcctgagccacagagggagact

SEQ ID NO: 915911 - DNA, 4001 bp, Homo sapiens
gaagagaaggaatgtaaaagcaaaatctacgcaagagcaaagaagttattaattggctatattagtccaattcgttattaaatgatacacaactatcaaacaaagggcaaagccctgtcccttttctgtacagaattaagaactggtaagactacttagcagagcttgcaaacttttctttagcttcttttcttacagacatgttacatttcgcaagagcctccacttaccttacaacttccatgtgtaagtacaaattgtgtttgatttccccagcccttggcctaagatattatgacatagctttagtttctgagtctggacacaaaggaaaaaactgaacatttttcactttcctgaaataacatgtctattttatttacactatttaaaaacacattatgtaagttaactaaaacaaactgcaaccacccattcgacaactcttcgagaatgactggggaagccacatttaacaaaacaaacttcattttagtatatttctgcttagaatgcccataaagactgatatcgctacaagaattacactactgcaaaatttttaaacacaggactcatgtgagcttgctgagaaaactctgcacaccccctacacacctgtacttaatatgacatgaccctcagagatactaaaacaccctctgttaagcagaaaacaaacttttaaagttaggaaagtagcaacgcgggaatctgggtaggaggtgccctgggttgtaaacaccccagtcagagaacataacaagcaattcagagcaacatattaagtccctatggggctccaacttggactgcttaagtcccaagaccacatcctggtgtctgggaagagtttgggtaatagaagagagggagaaggaaaatcagagaagcgatgaaagcgttctatttttctccttctcaacccccatcccagcatcttggaggctggtcaccagtctgggtgccatatccaccagaagccctaaatcaatatcccaaccacctgatacctaggctaaagacatgtgtatatcagccatctccttcccaaacacctcttatcgctctcaaggctcatatccttccagaagccatgccttatggcgactcagctcacccatactgtcctcttaaattaattcacttaattttctccaaatccatactttctctctgatatcatgtccctgatgttcttttaattaattcaatcaaaatgccatgaccctcatttccaataatccaccccatctatcttttctgccaaacccaacggggtgttgtgtcaccagatcaagatctttgttctcatctactcattcctacctccttcctattacccttttccaattccaagctcctaatcccactctttgggaagccctgggtttctaacttagtttagtatccctcctctttctcccattccaccccatcccatgatccttccattaggctccactagactacccttccctcaggattcaattcccctctccttgccacgccctgtgccccccggggctacttacaccaagttctccccacacttcaagcctctggccccgccttccccccaaaggaaggaggcgggagtagggagagaagggcggcgctcggcaacgtaaaagcgatctcccattagcgctcatcgccgccaatcgaggcttccttctctcccattggtcggctttggcctatgccccaccctcttcctcagacagggcccggccaccgcctcagcgcccccgtccaacacagactgggaggggagaccccagcctggaacgctgggactggccagagttgaaagggagactcccgtcagatcatggactagctaatgttaaaaggacttaccggctggtagctccgttgcctcccgcctgcccgcgctcggtcctacaatctgtctccagctcctcctttccccccttggcggaacggatactttcctcccgtccggccaggcgcgctcaactctcgcgagaagtcatgggtccgcgggggaagggcgagatccgtgggggctgagttggaaagcggccgagaggcgggggctccgggaaaagaaggggccgggcttactgtgggcagggctggggagggagactgagcgagtactgtccacacaggtcacacgtgttcggctgcagaatctagcgggagaaagaaaggaaaaaggagagaggatctttacaggtgcctgtagtggtggttactactatctttcagagtcatcgcttccttaacggcaaagtaatttaaaatacccttagcgctagaaatgaagtccatgtacggacaaagcaatccacccgcacagcaattctaacactaccattttactagccctattgccttgggtgaaaaccttctctgagtctctgtacaatgggactaacaatctcattttattcaaatagttgtaatgatcaaatgagatacatgaaactgcttggggattttttaaaatcactatattattcagcaaatattttcacaaaacgtagggcatactacatgcaaagcattgttctgcagtcgaatgctctatccctgagctataccccccgtgcaaagcattgttctaagcatggggttaaggagttaccaacccaggtagaatttatatttgagtgaggaaggggagacagttaaaaagccaataaacacaaatatttcaaatagtgaaaagcgcttcaggatagtgagacagaaggtgactaggagtggggaagaagctttactcctagtgtttgagagaagacctctttgaggaagtaacacaccaggagttgaattatgacctgggaagatttcgggggaaatatcaaatgcaaagtctatagtcttacatttatatgtcttgttcaagacaaaccaggaaaagaaaaaagaaaaacaaaaaacaggctgggtgcagtggctcacgtctgtaatcccaacactgctaggccgaggcaagaggatcgcctgagcccaggaatttgagaccagcctgggcaacatggcgaaaactcagctctacgaaaaaatataaaattagccgggcatggtggcctgcacctgtagtagctattcggggggctaagtgggaagatcgcttgagcccaggaggttgaggtggcagtgagcccacatcaggccactgcactccagcctggacaacagagtgaaaccctgtctcgataaataaataaaataaataattttcttaaaatttaacgaattgtagttgacttaaaatattatctatggaatctctgttctctccttttgcagctttatgttactcagctttctgaactttctgtctagcatctcatctatcctcacagcaccctctgagaggtaggaagaatctgggtgatttctccctagatacctaaaatgaaacagatgtaaaatctttctttcttatgtagtgaattgagaaaagttgagaggagtcttggcttccaaactattctcccctaaaacaattcctacttaaaagaatacagtgatggaaacataccttaaatatataagaaaaatttgtatgttggccgggcgcagtggctcacgcctgtaaatcccagctactcaggaggccgaggcaagagaatcacttgaacctggaaagcggaggttgcagtgagccaagatcccgccattgcactccagcctgggcaacaacagcgaaactccgtgtcaaaataaataaataaataaataaataaataaataaataaaaataaaatcagagggaaaaggattctacaaatcgtggtggaacaattggctatcgctgtatacatgcaatagctaatatttatagattttactatgttccaggtactattctaaattgatgttttttgtttgtttgtttgtttttgttttttgagacggagtcttgatctgtcaccaggctggagtgcagtggcacgatctcagctcactgcaacctccacctcctgggttcaagcgattcccctgcctcagcctcccga

SEQ ID NO: 915912 - DNA, 4001 bp, Homo sapiens
cagtgttatcactctagctttctgctagatggtagcactagtgagaaaaaaaaaatcttgggtttaatagtgccctagtcaaagcaatcaccaattctagggcagaagaccaaaacaagggactctgctctctcactgggtaattttctgtactgctgccaggcaaactggaaatgttctgaatgtccaatagcaatgcacttactgtgaaatactagaacccagctcagtagttaatgctaacgggtcagcaatgaattggtctcaatgtgctataggggcaacttcttggccagggagaaaggcttcagctgattgcagaaaaccaaaggttaatacaactacgtactctggtttctcttcatgtaatagctttactgatatttcagacattatttcccttctcaaaagtaaaaggagaagagaaggaatgtaaaagcaaaatctacgcaagagcaaagaagttattaattggctatattagtccaattcgttattaaatgatacacaactatcaaacaaagggcaaagccctgtcccttttctgtacagaattaagaactggtaagactacttagcagagcttgcaaacttttctttagcttcttttcttacagacatgttacatttcgcaagagcctccacttaccttacaacttccatgtgtaagtacaaattgtgtttgatttccccagcccttggcctaagatattatgacatagctttagtttctgagtctggacacaaaggaaaaaactgaacatttttcactttcctgaaataacatgtctattttatttacactatttaaaaacacattatgtaagttaactaaaacaaactgcaaccacccattcgacaactcttcgagaatgactggggaagccacatttaacaaaacaaacttcattttagtatatttctgcttagaatgcccataaagactgatatcgctacaagaattacactactgcaaaatttttaaacacaggactcatgtgagcttgctgagaaaactctgcacaccccctacacacctgtacttaatatgacatgaccctcagagatactaaaacaccctctgttaagcagaaaacaaacttttaaagttaggaaagtagcaacgcgggaatctgggtaggaggtgccctgggttgtaaacaccccagtcagagaacataacaagcaattcagagcaacatattaagtccctatggggctccaacttggactgcttaagtcccaagaccacatcctggtgtctgggaagagtttgggtaatagaagagagggagaaggaaaatcagagaagcgatgaaagcgttctatttttctccttctcaacccccatcccagcatcttggaggctggtcaccagtctgggtgccatatccaccagaagccctaaatcaatatcccaaccacctgatacctaggctaaagacatgtgtatatcagccatctccttcccaaacacctcttatcgctctcaaggctcatatccttccagaagccatgccttatggcgactcagctcacccatactgtcctcttaaattaattcacttaattttctccaaatccatactttctctctgatatcatgtccctgatgttcttttaattaattcaatcaaaatgccatgaccctcatttccaataatccaccccatctatcttttctgccaaacccaacggggtgttgtgtcaccagatcaagatctttgttctcatctactcattcctacctccttcctattacccttttccaattccaagctcctaatcccactctttgggaagccctgggtttctaacttagtttagtatccctcctctttctcccattccaccccatcccatgatccttccattaggctccactagactacccttccctcaggattcaattcccctctccttgccacgccctgtgccccccggggctacttacaccaagttctccccacacttcaagcctctggccccgccttccccccaaaggaaggaggcgggagtagggagagaagggcggcgctcggcaacgtaaaagcgatctcccattagcgctcatcgccgccaatcgaggcttccttctctcccattggtcggctttggcctatgccccaccctcttcctcagacagggcccggccaccgcctcagcgcccccgtccaacacagactgggaggggagaccccagcctggaacgctgggactggccagagttgaaagggagactcccgtcagatcatggactagctaatgttaaaaggacttaccggctggtagctccgttgcctcccgcctgcccgcgctcggtcctacaatctgtctccagctcctcctttccccccttggcggaacggatactttcctcccgtccggccaggcgcgctcaactctcgcgagaagtcatgggtccgcgggggaagggcgagatccgtgggggctgagttggaaagcggccgagaggcgggggctccgggaaaagaaggggccgggcttactgtgggcagggctggggagggagactgagcgagtactgtccacacaggtcacacgtgttcggctgcagaatctagcgggagaaagaaaggaaaaaggagagaggatctttacaggtgcctgtagtggtggttactactatctttcagagtcatcgcttccttaacggcaaagtaatttaaaatacccttagcgctagaaatgaagtccatgtacggacaaagcaatccacccgcacagcaattctaacactaccattttactagccctattgccttgggtgaaaaccttctctgagtctctgtacaatgggactaacaatctcattttattcaaatagttgtaatgatcaaatgagatacatgaaactgcttggggattttttaaaatcactatattattcagcaaatattttcacaaaacgtagggcatactacatgcaaagcattgttctgcagtcgaatgctctatccctgagctataccccccgtgcaaagcattgttctaagcatggggttaaggagttaccaacccaggtagaatttatatttgagtgaggaaggggagacagttaaaaagccaataaacacaaatatttcaaatagtgaaaagcgcttcaggatagtgagacagaaggtgactaggagtggggaagaagctttactcctagtgtttgagagaagacctctttgaggaagtaacacaccaggagttgaattatgacctgggaagatttcgggggaaatatcaaatgcaaagtctatagtcttacatttatatgtcttgttcaagacaaaccaggaaaagaaaaaagaaaaacaaaaaacaggctgggtgcagtggctcacgtctgtaatcccaacactgctaggccgaggcaagaggatcgcctgagcccaggaatttgagaccagcctgggcaacatggcgaaaactcagctctacgaaaaaatataaaattagccgggcatggtggcctgcacctgtagtagctattcggggggctaagtgggaagatcgcttgagcccaggaggttgaggtggcagtgagcccacatcaggccactgcactccagcctggacaacagagtgaaaccctgtctcgataaataaataaaataaataattttcttaaaatttaacgaattgtagttgacttaaaatattatctatggaatctctgttctctccttttgcagctttatgttactcagctttctgaactttctgtctagcatctcatctatcctcacagcaccctctgagaggtaggaagaatctgggtgatttctccctagatacctaaaatgaaacagatgtaaaatctttctttcttatgtagtgaattgagaaaagttgagaggagtcttggcttccaaactattctcccctaaaacaattcctacttaaaagaatacagtgatggaaacataccttaaatatataagaaaaatttgtatgttggccgggcgcagtggctcacgcctgtaaat

SEQ ID NO: 915913 - DNA, 4001 bp, Homo sapiens
caaactatttcatttttctggaaatgtaaagtgtaccatgccctaagatcaaagatcaaagttcttttgttaaccgaaatatttatgtgtatgttcaactcgaaaatgcctgaaatagcatgtggtagaaaggggctgctaggtaaccactccagaaacataaaagggagaaaattacacaactgctctctaaatatacttctgtgtagaagacctcagagatccaagaattacatcaggtcaaatattctcttgagaaaaaaagaagaatctttcctacctccattctatctcatatgtgacgtcatttaaaaatccaccaaccaaaagtattactttcaattacatctaggtaatatttactaatggtatttgttttaggcaataaaaatttccctaaattaaccgagattataaagcaagaggcacgtcttcatttgacagtagactgattcaaacttaaagagttataaccaaccaagaaaccagttgttgtatatatgaaccacaaatgaagtctatggaaaacatttgcaagtttctttgcttagtaagaaagaatttgcacaacgggagaatcatatcaaatcttatataacttcccccaattgtgttacataagatttaactatagttgacactaccattttaaactaatcagtagcatatttataattaccttccctaaaaaactattaataaaaccaggagcacacttacaattaaaaaatcaaacacaactgtatcttacacacatgcatacagtacagtgtttaaaagaaaaaaacagattttttttattaatggtccactttcttcaaagaggcctcagggtaatggatgttctttctagaattcttcatcagaaaaatttaccaaataaatgttatagcttacatatcatagcaaacaaaaatgctaagaaaatgagttgattaatttcaaaagtaacaataatctagctgaagcagtaatgaacaagtcacctaagaaacttaaaacatgtaaaattcaaatgcccagaaacatacaaactgattaaaattaaaactttatttacttaggatcaaacatttaaaaccaaaataatcctcagattgagatttcattttcgattatactgtaatttcttccactattcccgttcccccaatattcccaaaactaaaattgtttctgttttgtaaacattccacacatccataacagaacaggtaaaaatagggttaaaaatgtatttgcaaatatgcagttcaaataaatgcacttcccgtgagaacaccactaggtgctgatctttaccaccgtaaatataaacctgaatccagtaatactttaaaactgaaattataatcaagaaccacaaatgaaaatcatttttacagaaaattaagtccacaatttttcaaaaaatcgaaaaaacagagaagagcttgaggtcggcccaggagtacaacattagagtaatgtttttcttgaaaattgtgagaatttaaggttaacacaaagaaacccctcaagaacgaggaaaattaaatctagaacccaaatggcgtccaacaagaacattagatcttgaaaatgaatattgcgcttgcgcagccaccgccccgccagctgcacaactgcagctagagcccgaccccgcaagatcacgtgctcccatgcagcgccgcccgcagctccgcaaccgcgcaggcgcagacacaactcccgcagccgccataatgcggtcttgactcttcagaaatacaatagtaatttaagaaaatgtggttttaacagcccctgggattcacatataccttttggggcggaagctgagggagggggaaccaagttccttcctacagagccgtcccgcgcagccgtccccgacgttgccgcctcagcttttcgcgcgcttcagtcgccgcgccgccgctgccaccgccgccgcctccgcagattcaaaaacaaacccgcttctcccttgcacgcgccggggccgttatgcaaattaatatgggcggggctccggggggtcgtgctatgtaccccgcccactgtgctatcagccaataagctcaaggactagccattccccatgcaaattctggttttttatttgaatgagggacattggccccgcctcctgcgtggaaaagagaaggaagcccgaggtggtggcgctgcgtctctcagttgcagtgtgaggtgtgttttttgagtggatcttcctcaatcaataagtagcactttgtgagcgccctctatgaggcttagaaaagaaagaaggaaggaggtaggtgagagtttaaagagcagagggaaagattttcataaaagccaggagtatgttgatttattcatcatttatgttttaaattcacagaatgtactttgaattgtattaataatgaaggaatgaaaaaaacatactttctttcagttgcttggtaacagagcaagcactttttatcatactctctcaccagaagttgtattcatcccatttattcaatttcatgctgggagtcggcctttaatgaattccacaggaggtagtggacaagtcactgccttactggttaagagatctgggttcaagttcaactactgcagcttccttgccggttcctcggaataagtgtgttactcagttttctcacctgtataatggcaatcatgactatagttgaactaggttggaagcactaaatgatagaataaatgtacatatgttttggccaggtgccgtggctcaggcctgtaatcccagcactttggaagtctgagggggggtggatcacctgaggtcaggagatcaagaccagcctggccaacatagtgaaaccccgtctctactaaaattacaaaaattagctaggcatggtggtgcgtgcctgtaatcccaactactcaggaggctgaggcaggagagttgcttgaactgggacctgggaggccgagattgcagtgagcgaagatctcaccactgcactccagcctgggctacagagcaagaccccttatcaaaaaaaaaaaaaaaaaaaaagaataaaagtacatatgttttgcaaggcaagaatagcctgaaaataatattagatggtaccgtgtggttattgtttttttatgtaacttctcattatatgaatgtattggttcagtatttatttagcaatcactgtgttgtagatctgttaggtgcctgtcctcaagaaatctgtactctagtgaagaagacagaaaactgaacaagaaatttttgtaactaataagaaattagaatagggttgttaatacttatttttataactggaaccattcaatttacttaaaatataaggtggcctttagaaatatcacctagggccgggtgcagtggctcacgcctgtaatcccagcactttgggaggccgaggcgggcagaccatgaggtcaggagatcgagaccatcctgggtaacatggtgaaaccccgcctctactaaaaatacaaaaaaaaaaaaattagctagtcgtggtggcacgcgcctgtagtcctagctactcgggaggctgaagcaggagaatcacttgaacccgggaggcagaggttgcagtgagccaagatcacgccactgcactccagcctgggcaacagagtgagactccatctcgaagaaaaaaaaaagaaatatcacctaatccagacctagagaattagaaaagccttcctagaagaggtcatctctatcatgataaatgatttaattaattttttgcctaaaagttggacctcattgggacagcaatgaggaatcatttaaaaggttttaagtcgggatataacacaattaaatttgcattgtttaatcgctaaatgttgtaacatcattagcacagtccttagcatatactcaataaattatagatgctcaattataatttatttattataattttcatagtacatcagtgctcaattataagtagatgctcagaaaattagaaatattgatattaaatgttacactc

SEQ ID NO: 915914 - DNA, 4001 bp, Homo sapiens
gagataaatactgatcccagaatatattttaagccactaaataaatggacactgatttaattaggaaaaacaattattttgtttaaaaaaaatgtaaataacaaatataaacacaaggctgagacaagtcaacaattttaaactgttaagtcatgtacatatagatcttatattccatcttcatgaacatcaaaaatcaacataacgaagacacattctagaataattttcaaactgaattccacagtgccttaagaggccaaggttctacaaataagtgaactagatctggatctaatacaagattataattgtcatgtacgatctcgtttccaagttttgtttatcttaatagcataattattgtcattttattaaatacacatgacatgtgaataagtttacaatataaaataagtacataacaataaaatatcacgtgtccttttgtttcttaagccttgcagaattaagcagaaaccataagtatcccttttatatattggaatcctccctaagagtttaacatgcaaaaagtttctgtttttagaaagctgctctactcagaaagtttagaacttactgttctatgtcatataagtcagggatatattcttaatactctacggacaaaaccaggagtatattataccagctaaaaaatattttaacaggtactgcaatttaagtattgctgcttaaagtatgccttttctgctatctgaaatactacgtgaataagaatttcattctcccatctttctgggtaaccacagacttacagtatctcaataaacatttctactccagaacgatgttaagaaagctttttaaactttttgaaattaaatttacaaaatcattgagctatatttcttttaaatatactacaggtttgaattaagactaaaatgaaaatataacttaattaactgagtacttcagctctgatggtatttgaatacattagatatattttttaaaaagaggtatccatgactagatgtgaatttatttctaaattcaaaatctgaatctgaatgccaacttaagcaaaaagtaatttgaacaaagaagcaaagcagcattaaaaatgtcaaagagttggatactgggaggaggcagcatgatgagaaagaactgcaacccataatgccaaaaaaaaagattttggacagtattaaaaattttttttcatgatttatataattacccttctttccaaaaagcttccacacaatacctcacaaaaccgtagaaaaattgtagtctttgtgcaaaacaaggcttacttatggatcctttaaaaaaaaaatctattcagataatatattgttttaatttctacaaataaataccaaacacactaaaatagcctacacaaaaggaatattacattaattagggccagaaatgcactactatggtgatcaaatgttctggcaatgacagaacataaaatggtgagaaattacaggaatttaacctttgaccccaccatgctatgtactgtttccataataaaggcttaaaggttctaccaaacatttcaactttttaaaaaccaagctctaagttcacccctctaagtaaactcagttaaattcctttttaaaaaagaaaaaaatgagaatgtttaagataaaagagtaattggttcttacctctggtcctgatgcatgtgacaagtctcctcactgacatacttgctgcctaagcagctacaaagactaggttagcagccattttgagacagctgcacagtctcagttgcacaaaagtgtaattaagatggctgcaatgtgcactcaagaactcacacagtgaaaactcagctatgtaacaaacaaagcccctcccactttgtcagcctgcaggaaactgaacatagacaacagctaatgcatatactgcaacaaacaatgcagctacacaggacacagaaaaagaaaacagaaggcagcaagccagttttgtaacataatgcctgtgaatcccgtcttgcaatacagactttgggcacatccagatcccaaacaacttgaaatccatgccacatattagcagttacagagatggagccaaatcacacagagcaaacatcagggaattcgcttgaaagaaagcctccatttcagtccagaaaaaaaaaaaaaaagttaaaccttgctcaaggccttttttttttttttaccttttatagttttatcatgaaaagaatttcaattttataatttctagaaaattgtttaaatcctgaaaatgacttgattgattaagttaatttcaatttatagaaggctaaagattttctccacagaatctaaaagccccaaagtgctcaaatctagcagaacagttaaagcctacaattaaatttttgaaccttgataacagaatctctagaagatggcaaaaagcttattgagtaatttaccatagatataaaaataatttcttctcttcagtagtacagatggtcacaaacattaacatccccaggtgagtgtttagtcccagggcaaattacatttcatgccctgacaaagacctcccaactttttgatgtgagtgaaaagcaaataaaaacaaagaattataggcaccctgatggaaagaagggaattttaaaaaagagtaaaactcagtctaatagatatattagcaagacaaatttgaaagagctccaacaaatgtgggttggcagaaacatatcaatcaaagagaagggaaggacaaaagcacagagagaacctgttcacatcagcaatagaatccacattttctttctctcttcctcagtctaccttcctaaaatctagctaacctgtgtatcttgttctatctatcactaaatataggtatttactaaaaagttttaagggtataggggagtaatagggatatagctaaaaggagattggccctatgacttgacaatggttcaagctgagcaatgggcacacagaatttattatctcattctatttcagtatatatttgaaattttccataataaaagttttttaaattacttatctttaaaaggtccttatgtattttccatgaggcaaaatgaataatgtatgtaacaacttcagtatatcagaaaaaaaaagttaaacttgatccaagccatattaattctttaaaaatacaactgtgattctcaagcaaagactattcattaaaagcaagatttaggccaagcacagtgcttcacacctataatcccaacactctgggaggccaaggcggaaggctctcttgaagccaggagtttgagacctgcgtggccaacaaagcgagatctctgtctgtctctacaaaaaaaatttttaaaacattagcaggtgtggtaatatgaacctgtagttccagctactcaagaggctgatgcaggaagatcacttgagcccagaagttcaaggctacagtgaacttgaaccactgcactccatccagcctagtcaacagagccagatcctgtctcaaaaaaaattataattaaaaacaaaagcaagatttggtaaattgagaaaggctggaacagaattgatattactgtagcactggaatctatgtttaattggggggtggggaaagatggtacacatagccaaaatattcagagctgcctaatgaacactttcttacattctggaagcaaagtgtttttaggaagtctgatccacaaagatttaaattatggaacacactgtcaaatggatgatatcttcttcaagcctcccttctcttgccaaatacttttccaatgtaaatcctgactacttttttcttagtctaaacatagtctaccaagagaaagctgctggctactaataatacaggttggacatccctaatccgaaaatccagaattctccaataagattaaataatttcacaaaactgatacaagcagaaatacaacccagacaacacttagtaccagctgacagagctttatccatcccttcacacattggttctgtttctgt

SEQ ID NO: 915915 - DNA, 4001 bp, Homo sapiens
ataactaaatacatgcccagagggagagggagcttcaagttccttataactcagagtattcagcttgcaaacctcccctgactgggaattcactagctctcacaacaaccagtcaatgttcaggaagttctattcagttattctgatttatttatttattttatttatgaaatggggtctcactccatcacccaggctgcaatacagtgacacaatctctactcactgcaacttctgcctcccaggctcccatcccagcctcccaagcagctgggaacacaggcgaacaccaccacacctggctaattttttgtatttttggtaaagaaagggttttgccatgttacccaggctggtctcgaactcctgagctcaagagatccacccgcctcggcctcccaaagtgctgggattaccgcacccagtccagttattctttctgctgaagaatctgtctcttagtgcttcaaaccacttttagttttagttttggtacccaaagccacacaaaataagtctcacctcttttccacaagtgagtttttatttaggggcagctattccaccaccccctcaccccttctacaggctgaaggtccccagtcctcaaaaacatgtctgttccacatcacatcttatctgcatggaatcctagcagctctcctctaagtatatttcactcatctggttgacagatggtgaatataaaaagtatatttcagtttgtgtctgccccttttaaactgttgctcagcacaggatacagggcaacggtctgtggaccgcacagagatcaggccagctctgcctctcagctggcgatcagctcgcgtctacctgtactatcaagcaccatcacgttttgtttttgtctctaccactaggcaaacaattcctatattctgcttatagggcagagactatattccattcatcactataatggtaattcctagtaccttctacaaaacaactgctcaattgagcccaacccaggaattccaggttcttccaggggttgctggattagtttctcctacatgcttggatcaagaaggagaagggctctcttgctcgttttgccctccagttttactccatccagcagttttcttcccatctagagactcccggctctggtccggctccctttcttccacgacttctccctcttgtgtcccccgcaatcgttcacacaagccacacatctcacttgtgccccaagcctgggctcctccctcattctacgtgctattttaggatccactcctccaagaagtcagtcctgaccaaccccattctccttcccacagctgccacatttggtctgtgaaaaccttgttgtcccctgccccacacagtgagcagtgagcaagcagggcccaccagagtagggtctggaaagtctcgtccctcttgtccccccgagtggcagaggctaacagccgccttctcaagcctggctggagcacagggtgcgcccattcccaccttgagtgtagagtttggagcacggattcctcaagctcggctcatgcccttcctcctcctcctcacgccctggtgcgacctccgcaggtacgcttcaacctccgcacggcgctgagccacaagagaccagctaaaagcaaaaccagaaaacttacttggctccatatcaagagactcgggacggacgcaggaaggaattcccgcccgggtcccgtatcccccgccgccactacgcgcgaacctccacagtccacgtaaccagggaggaacggactcctcgggtgtctcgggggcggcgccccgcgcccaggctggctggactcggaagctggaggagcgcccgcgttccactgccccgggggatgcccacgccggcacaggagagggggcacacggttaaaacagctcccacctcccccaaccacagtccacgaccagcctctcagatgccaccactctcccggcaggctccagaccacctgggtcggaggctgagccgggaccggaagccgcaccgccccccgcgcgccgggaagctcaccagatcccacggccccggagggggcacctgcccagctcgccgggcccccgcacgcatgtagccgcccacaacatccgcgtagtcacagaagcacacgcagatagtcatgcgttgctctctgatctgggggctgctcctttcgtggttatgtctcggattttaagagttgatggtgatgaagatccccctcatgtggacgagtccattcagcccaccaccgagaacgctgtggtgtttcggcccgtacaactcacttccgccatagagactggagggaaggaggagccctacgggctctcggccgcctccctaggccgagcggagtcatcggcggcgagcctggccgggagacgctgacgcggtgcccaactcagtccggactgagaggtctggaaggaacactgatcaccgcaagatgaggggcgtaccccgtagagagaggtcctggagatgagcccacaccgctgtactgcaggacgcccagtggatggcaaaacttgagtttgttgaatgtgcgtaacagacgggatccctggccctccacccacacagatgctggagaaaggggcttcatctctcagtgttgcctttatgcagcagcactacttgataccccatggtgaccaatctggtgacagtccttcggaggctagtaattcggccattgcttctctgcgtgaccctcaacatcactcatcctttctgatgctctctataaacaggtggctgttgtgaggatcacaggagataactcatatgaaagatttctgtgacctgtaaagtctaatatgaatacaagtgtatttttagtgctgtgtaacttcctggagcgcatttggttctccatgtagattgtaagcccagagcagacagggcttcgagagctcggttaatgcacccacctccaataggaggcagtattttttttttttttttttttttttttttttttgagacggcgtctcgctctgtcgcccaggctggagtgcagtggcgctatctcggctcactgcaagctccgcctcctgggttcacgtcattctcctgcctcagcctcccgagtagctgggactacaggcgcccaccaccacgcccggctaattttttttgtattttttttagtagagacgggttttcaccgtgttagccaggatggtctcgatatcctgacctcgtgatctgcccgcctcggcctcccaaagtgctgggattacaggcgtgagccaccgcgaccggccaggaggcattcttaaggtgttagctggggattaccatgctcattttctggcccattggggtgcctcacgcctgtgatcccaacattttggaaggcttaggacagagcatcacctggggccgggggttcaagaccagcctggtcgacatagtgagactcccatctttaaaataaaaattaaaaatttagctgggcgtgttggtgtacccctgtagtcccagctacttcagaggctgaggtggaggatcacctgagcccaggaggttgaagctgcagtgagctataatcacgccactgcattgcaggctgaatgacaaaacaagatcctgtctcaaaaagaaaaaaaaaaaaaagtcgggtgtgatggctcatgcctgtaatcccggtactttgggaggtcgaggctgatggatcactcgaggtcaggagtttgagaccagcctggccaatatggtgaaacctcatctctaccaaaaatacaaaaaaaaaaaaaaagccaggtgtggtgtcaggcacctgtaatcccagctacttgggaggctgaggcagaagaattgcttgaacctgggaggtggaggttgcaatgagctgagactgcaccacggcactccagcctgggcaacggagagaaaccctgtctcaaaaaaaaaaaaaaagctgatttttctaacacatgcttttatttcccaaaacgataatagataacatttattaggtggaatggaaaggtca

SEQ ID NO: 915916 - DNA, 4001 bp, Homo sapiens
aacgagggcagttaaaggaaatgacagatgtgggagcggggggaggttgctggcaagctcatgggtagataggtaagggatacagcttggaggagtgagacaccatcctcaggccttccatctagtggcatctccattttccttctcaaatctgttgaaagtcatcactaaagatcccctgggtcacagggaagcagtcgggtgaagactgggcttaatgtggacccaaatccctgggtatccttgttgctcaatcccacttgttctaaggtggagacagtccccaccacagactgcaggctcctcccaacccttcctctccctcccctgctctccaggtagcctctggcagtcagtctgctcccggccgtgaagccagcacctccgccagcccaccaccagttccttctcctgggctccctcctggccctccaccaagcggcaacatctcccaggacaaaggacacagggtgatttttggcagcagaaattgggaaggccagagaatgggagggaggcaggctggcaagccggaagagctggagctggagtgtggattaggagccctcagtagagctccagatttggggtgggggtcgggtacttgtggggccagtcttgctggaggctaagggtgggccctgaattggcaagatcccacctgccttcagggaaggaaggaggttagctctggagcagctcagtagatttttgtctcacaattccttgggccagattcaacaaagttctgggaatactcaaaagctctaaacaagattccagagcactggggaactgggcgcaggaacaggaacacttccttggcctgggaatgagtcatcactctgaagtcccttgaattggttggcactcactttaccactccaagcacaccttcctcccagggcctccctgagaccaggccagctccctgtctccctgtgcaccccgactcccttcctcttgctctagggtagctgctgctcctccccacccctgactttgttccagggctccccctttccctctcaccctctctccccatggcatttcctctctttctgtaccactcagttcagtctcccactgggccttggctcaagccctttccaaatcccttccaggctgagctcttctcccttgttttttaatcactaaggaatgggctacaatggatactaaaagaaaaatttaggcatatgtggggataggggatggtgagagtcacaaaagaaaccattgtctaccctctcccattcctcccctacctgagggccaggcttatagtccagctgcaggggacatctctctctctctctctcacacacacacacacacacacacacgcacacgcacacacacagccccagccatccctcaccccagctccctctctggctcagccccccacaacccattggtctccaggcaacggcacaaagggaaagtggagagaagggcctgggaggcccaggcagagctagctgtaacccaatccaaccccgatactttgggggttggggggccagactgtcagagaaggcgacctggtgaggagggatgaaagaaaggacagaggctaggaactaggctcaaactaggatagtcctggtcagtctgggagttactaaggtaagatgggtatcagggaccccagagaaaactgagaggcacagaggaaagtacaggaaaccccaagggaggcataaagggtcgccaggagaaaagggaaagatgagatgcccacactgaaactaaaaggcacagaaatggaaagggggcatgaggctctttgaactgaaaatggctgaggtgtcagggacccgggaaggagggcaagaaaagaaatgggccctacccatacagaactagaacctattttagccttggagctgggcaggatggcagagggagccaggaccagaccttcgcagaagcagagcgggaggcccgcaggggacagccttgaagttcctcccacttggcgtccagtatggcgtcctgcaaaactctgactccctctagtggttagatctcccatgtgcaaaccctatctgtgggacgcaaccttgcatccgagccactaggaagggatttgtccccctcgggggtacctagaatgagcatctcaacgctgaggccccataagagttaacgagttatagctaaggagtagtacgtctctagccacatattggaaacctactgttagtctgacccagccagggttctgttaagcacttttgttcctgaatcttcagtttattgaggactctgtttccttaggtccttccgtatactacccccggaaccattcttccttcccatttccccatcttgcagtgggtgatggccatgaagtcctgttccattcgagaaccagccagggttttgttggcagaggcccagtacaggagctgctccagtccacaagccctttggatatgaaaacaccttagaccccctttcccccaaaatgcgcgtgcacacacacacacacacaaaatattttatgcttttaggggctcttgaaccccttaattcacctgcgtctgggagccaagccttctgctaagaaagcaggggccacatgcaccccacctagccagaatggggtaggcagtgccatcatctcggccatatttgttcagtttgtcttcctctttttgtgcccccccagctctgctatccagtttcaccagcttccaggtgctccatcttctctcccctcatagggactagagtaagactccttagacacaacagtgcactgattcagactttaatggaggtgctcatttcaatgccacagaggtggtggcaactgtggaacgtggcatggggagtgagaggttgctctggtgcagctggaggaagaacagggaacctagggttggggagagatgtatagaggaaaactcccccaggcacacagcctccgctctggaccaacgcaggcttcagtgagtacacacaaaggaactgatgtcaaggccctttctatgacccttcccattctagcaagacctcccaccccagtcatcttgggatctacagccacatgaaatacagacacatcgttcccccaagtcaggccagttttaggccattgagttatggggaaatgattaatgggatgaatgaaaaacaaataaaataaataaataaataaatacactaaagccttattagccaggcgtgatcacatgcccaacactcccctccatcccagcactatgcacagttcacggctcatatgcaaagtggaagacacgtgggacaagagcaaagcacaagtgacacatggtccctctctaacacctcagcacaccaaccctgacgctcccatcacagatgctgatcattcttccacggacccccttttataataatcctcattcacatttctagtttctgagggaagagagaaagagaaaggaagaagtggaaagtgcggaaccccaatgagtagggcacagaaaggagggcgagcagagacagcaagaggtcaggtaagccaaggagcagcggagcaggtcaatcagggaagttctgggcaccctggggctcaggggatctcagggggtgaactatcacagatcaggacagcaaggttccaggaggatgagacagaggttccacgtctccaggcaagcagaggaatcacagcacactgggattacggaagttatgtccggcaaagcgagcttcatcccccagctcttcctcaattctgagagagatgaaccacaaaggaagtggtcagggatgcaggaggatcctgcttctctctctaggggtcccccagactccaaccacccccacaccacctgcttttgtgtcctgccccaaggcttagcattccctggctttcccatgtgatctctgggatttgtcaatcaggccatcaataaacccaggaagcaaaaaccaatattatctgttggactgttatccaggaaatggactgttatccaggcccttggtgctacagatggtct

SEQ ID NO: 915917 - DNA, 4001 bp, Homo sapiens
ccaacatcattctggacctgccagactaacaaaccagtccaaagtgactcctagataacaatgcagcccagaccagcagataacgatgcactggcctaagccttctgagaatccgggaccttcagagaggcctcagagatcatctcatctatagccccttcatcttaacaatgaagcccaggctcaaagagaagtgacttgcccaaggtcacagaggcacagccaggtctagacacaggtctcctggctcctgttctatagtatttcccctgcatgaagctgtttcacagccctctgtcctgggccaccctcacctgggatgggcctgggagcccagccatttctacaaggtcagggaagaaggccaaaggttagttgagggaaagaggaaaagggttactcaagaagggaggctcaaagaggaattcaagttttagaaaatgaaagaaagtgcaaagaagcaaaaagacaactctacaaaaaataacataataagggaggtagaggtcagaaccaactgccaaaagatggtgtaacctgaacagaagcgttttcatcctcccatcatgcccaggtggagagacttggagaaacacctatgatctgcaaggaacgtatctacctgttccaacagacttcaacatgaaagggtgcacaccgtggggaaactcccaaccaccaacagatccagaaacaacctccaaaacccagcccagagtcccaaggacagccacaggctgaggtccaataaacattcgaagcccccccaaccaatctgacatcccactggatcactaccatagcaacacagtggcaaaaggtgcccctcaagagaccatcccaggtgtccatctggcagctaccccctaccccagttgccaaagcaactcctaccctcctatagcacctcaggtaagggagcttgaaggtacctaccctagtcaaaataagcccatgcacaaagggagatctttgagctcaaagcagtaactaaggcctccctatatagatcacagctccaggggcagcggacgctccggaaattggagggtggagggtggaggtcgcaacttgcctggagtgcctgtaaggttgctcaattctccatttccatcctcccagaacccctttcttcccaactcccccttctgtgttcctgttttcctcctcactagttttgggataacccacactactgggccccagtgccctctccaagaaataactatgtctgggatagggaaaacagggtcagaggtgacctgcagtaggggaatgaaaaccgtcacaaagacatggccttccctcttccacgctggaaaacctccggctcttctcaaaaatggacctctctttgcccaagcctccgtctcccccaggttcatcagccacaatccctctttccacctaccacacccctttcccgtttcccacttcccgtctattcctaaagcccccaaccccaggctccggaacccgtgttctggtcctttggagctttttcctggaggcttcatgccccacctcgctgccatctctcctatccattctgccttcgcccggaaccccactcacagcatcccccgttttcctccgccaaccccggcctcgatgttcctcctcttttgagtctgcgggtcccggataccctctggccccacaggcctcctccggagaccctccctccttccccaccttcccgatcctcccgaaaccctggcccccgactctcctcggcgggccccaccccctgagcccccggccctcaggccaggcagagcccgcagtggggggacgggattgggaaaataacaaatggaggcggcggcggcaggagggggaactgggaggggtgggggtggggagccgcaggccggagcccgggcgggacagaaccccgcgggcccggggcccaggcggccgcagaccttacctgctggtagctcgggacggctggctggctccgagcgggattccgggctccggcgcctctggggggcggcggcggcagctcccccgcccccctctcctcttctcggcctcagtcgccgccgcgacgacggcggcggcggccccgacccccccggagggcggcccccatccccccttttccccgcctggccccaatcgcccgccggcccccggagcaaaccccgatccccgctctgctccccacctccccgggctcgccgcctccccctggccgcccggaatgccccgggccgcgccgcccgcccccgccgcgccgcccggccccgcggcccgcccggccctcggcgcggttccgacccgccgccgcccgcgcccgcctagcgcagcccgcacccgcgcgatcccgggcccctcggccgcctcgcccgcggcccccgccccttccccggcagtcggctccctctcccccctcctagcccctccccgaagccgcggtccctccgaaatggcccggcccgaggccccgacccggcgcggggctgcggacgggctgggcggtgcgtccggcgactcgcacaggaaagcggacggcgaagggagggagcctgggagagggggatgggagaagggaggaagagggagaaggagggagcgcggaggaacggaggagagaggggccaggagggagacgcgagggagggagcgcgaggcaagccgcgaggggggagagagggggagccggagagggggaggcgcagcgcgagttggccgaggccgaggccgagggggccggggcgcggggagggctagccgtggcggaatgtggggagcccgcgggcccggcgcgggagagggctaggtaggaggggctgtgggtggtgagggcagatgaggggaggctgaagtttgggggcgagcgggtctgtggcagaggtgaagtgggaggagtttgggggatcctggggtagagattgggataatgggattggattggaaagatggagctgcctgggggctttgtgggtgcctggtgagaagtgagagaagcttggggtgagggatctgtggcagagatggagccagacgggtttgggggctattatcagagagaatgggatggaagtttggggtcataaggagagagaaaaattgaaaagatgacatatatagaaagatggggcttctggaaaaagtaaagcttttgggggtgattagtgttgacaaaagagtcataaatataagaattgggggtggggggatgaaggaatgctggagagagagaagtccagaggaaacgtcagtgaggagagagaggagggaacgcgtgaggaaccttaagaagggatgaacgaggtgggcccaggtgccaattctagggaaaataggttctgggtgagaaaggagggctctggatgggaaagaagggtgggagacaccgggctggctggatcctgggggtgggggctcccagtagagccgaggagggtttacttgggcgggcagaatggggaagagggggataagaagattggaaggaaatgtaagctgaacaaggcctatggctggcggcagtatggaagaggaaagatcatggatgggaaaagaaaatggagatggggccggtgcgggggctcacgcctgtaatctcagcactttcggaggctgagtcgggtgggtcacttgtcaggagttcaagaccagcctggccaacatggcgaaaccccgtctctactaaaaatacaaaaattagccgggtgtggtggcgcatgcctgtaatcccagctactcagaggctgaggcaggagaatccttgaacctgggaggcaaaggtttcagcaagcagagatcgcgccactgcactccagcctgggagacagagcgagacgccgtctcaaaaaaaaaaagaaaaaatggagatgggaaacgagggcagttaaaggaaatgacagatgtgggagcggggggaggttgctggcaagctcatgggtagataggtaagggatacagcttggaggagtgagacaccatcctcaggccttccatctagtggcatctccattttccttctc

SEQ ID NO: 915918 - DNA, 4001 bp, Homo sapiens
ccattaccaggaagggaaagcaactggaatattccttttgtaagttctatttacagactacaaagagtccaacatcatcttagtatgatcttacaacacgataacaatggaagaacccaaaacattaaaggcttcccagaaaagaactttttgatattaaaagctgataaaccacaagaatttctaagaccatgccacactctgggacaactcctaaccacactgtaaatgtcaggcatctattttctgaataccaatggcttcaagtgttttgttttgtaattttaaaatgcccagattgtttttaaacatagagacacagcttgcaactccaaatatgttttcacccaatggacatcatttgttttctgatttatctatggaatactttcagcttttggggggaaagaaaataaatttttttatacttacaaaagatatacatgctgccagtaataaaatcctaactagcaagtcttcaaactgctcaatcacaagttccagcaaggtttttcctgtaagaaacaaacacatgtgttttaactgtcatcttaccatcagcacaccaacagaggaaaaaaaacagaaacagcatgttaagattaccttcttcagccggtaactctgtagaatgtagaaattcgtcaagcaatgtgtcaagagggaggttaaaaaaaaaaagagagagacattttagcacttcgtttttctaaaaagaactgctacaattctaagcatcaatatctttaaaacacagacctagctataagaatatccgatttttttagcagagggcataccacgaagatatctcaaggaagcatgcactctttgtaatcaatggcctgaggtctagccctaagcgtgaaatcacttcgggctcctgaacctaggagtggtttcagcgatgtcatcacttctgccagatgtgtaactttgggtaggacaagaacggtcagaggccttccaacgacctcgactcctcataaatcggcaggggacgagaaaacgtcttgccgggctcaacctagctgcagaagccacgtccctccctccaccggggccggctgctgctggagagaagcctccgagccttgcgcgccgaaaaggtcgagggcccgagaagcgaagaggtccagggaaggcgaggcgaggaccgcagcccctttctctcccgcggggccggcgcgctggcccgaccctccgcccgcagctgtcggcgggcgcggagccgaagcccacgaggtggagcccggtcagccatcttccctggctctcccggccgcgccgggcccctgcagcggagcgccctgcacctaccgttggagccccatctctccttaagcttcttgacctgttccaggctcagccccgtactctcgttgacgccgaagtggcccagcacctcctccaccgtcttggtgtgcgcgttctccatggcttcgggggcccggccggcctcgcctcccgtccccgcggcctcctcgcctccgcctcgcactccggccgcgggctcgtgccaccccgggagcccaggcgcggacgggctctcccctcctcctcttgcggccgcttccgcctcgccgggcgctgaatcaccccgcgccccctcccccagacaaccgcccctcgcgcggccccgagctccgcagggcgggttgggggctcctgacccaccctccctcccctcgccagaagggagggcctccctcgccctcagccgcccgccgggagggcaggccgcggcccccgagccccctccccgctctcttgaggcgatcagaggccccgcccgggccggaggagggggcgcccggcagaccactgagggcggaacgcggcgagggaggcgagccggcggggcggtgcgcggcgcgctcgcccgggtccctcagcgccgcacgcccgacagcggcggaggaaactgcggcgaaggaaaaggaggtggcgtcggggacggctccgcggcggctgctctaatagcatttatcggccgctgcctcccctttcgccgccgccgcggcatgtggacgccgctcattggccgagagcgcccagcgcggcgcgggcggcgcggccccgccccctcctcccggctccctcctcccgcgcgcctggcgcccacgctgccgcgcaggccccgccccctcccgcgcgccgcccctaggaacccggatcgaggccgcgcgcgccgcggtcgcggggctggcggaggggaagctgggtaccctcttctgtgcctgcggttctctgacccacccacctgcagacgcagggtggggcgctcacagtgggcacgctgctctggggccggtgggcggatggttggaaggcgaggccgaggagctgggagcgcggtccacgcggggcgtctcgaggcgccctcgggctgatgtccttggctcgcctcctcgccctcggtcgcccgggctgcgctctgcatcctaatctggctccttcagagcccccctcagaaaccaaggggaggaattccgcagttcacttcccacacaacccaaatccttcatctgtcgcctcgggaacaccgcatcctacaccccctgccgccagctccttcgcacgccagccccgattcttccccagcgggttctgggccctgacgagggaacccccctcgcgggggggagggagaagagttgattttattattaatagctgacgcagcgcttgataggtgtctgcagggcagtcacagttcacgccgctggagctgccacacagcagctagacttgggctaggaggtgcttcgctgtggctttcagatgaaggccatttcatagactcacttccctcgacaggagaaaaggggacttgaatccaaagctgctcttaaaccacagatgatttgctctgctcgggaggacaaagcgcaggtcacagcaagataaagggaattttgccaatataaagaagctacattacttaacaaggggatgggaaattgcatggaattcatgaacaaaacatgaacatattctcttcacaaagaagagcagctttcttcacggagtaggttgcagaatgaagcaattagtccacttttgtgtttaacaataacgcaccatccgcatgagcaaaagcagagcagaaaaatcacctcagttgtctcaagtggctgggcttcaggacttaagataaattccttcagcagatgcaaattacagtgcatcaccagctgaaaaaatcaggcacgtcatgtcatttaattatttccaaggagtggacgttggcatgtagttttgattgatacttggaaaagaaccaacaaaaccctacacgaaacaaacaaacaaaaaattatactatatggcaacgcactgagagaagccaggtggaaactggttaggtcacaggatcagagccgcttcaagaggggcacgtgagtgcacggtgggagtgtggtcatggagggctggctgttgttgccctctgagaccagctctgcaccatttcgtaccaattcttctcccttacctcctctgtctctttcaggaccgatagaagcactgcaggcaggagaaggatggtttacctttctcagcctggaaattagcttaggcatttgatgttgaatattctgtgccactgtcactgcttggggttgtaagcacctctggtgcaattatgagcttctggaggagttcctgacctcagcctttgtatggaatgctcttcccacagatcttcttcacttgtgtcgttctctttccattcagatcgcagcttacatgtcccctcctcagagatgtctttgctgtctaaagtggctacccagccacagtggctcacgtctgtaatcccagcattttgggaggctgaggcaggaggatcccttgagcccaggagtttgagaccagcctgggcaatatagcgagactccatctctactaaaaaaaaaaaagaaaaaaattagctgggcgtggtggcctgaacctttagtcccagctactcaggaggctaaagagagaggatcgcttga

SEQ ID NO: 915919 - DNA, 4001 bp, Homo sapiens
gctgaattaatagatctaccagctgagaatagcatactaatgtacaaatctctaagatgctatataacatctcaaagtcggtttgcataatgaacaagcttcaaattttgtcaaattactgtctattaaagtccatgggaactgttcccgatactcttagttataccttaagtatgcaaccaattttgtcaaattactgtctattcaagtccatgggaactgttcctgatactcttagttataccttagatatgcaataccattttaatgtattaatagttgggatcaatcttgtagtaatcaaacccaactacatcaaaatggtgtagcatatctaaggtataactaagaagctggtgtttctagtggttccaatttgaaaagatacagaaaaccttgaagagttaacaggtcttgcaggcaaagaatatattccaaatagtctaaagaagccctgttgggacatgtgtgaatactgactctggcttcctcaagatcatgctacttcagagaaatcaaagtaactacctatcattaaaataattaacaattcacaatgaattacataggttacaaaggttttaaagaatttttaaatataatttaaagttatttaattttggaaaagactttttgctattacattatatattatctaagcaatagcatggcataaaatgtttcaggaaaaatattaagaaaaatacttttgcttaatttctctagaattagctttggaatatatactaatatactttaaaattttacattaataatttctcatccttaataaaataaattgtaatccccattcatcctcatatgtgtcccttcccatccctgcctttacaatttggaaatgctttcctggaatgtcctaacctttattttatgtttaatctgattaatttatgaaaggcaatcttctgaaatcatttcaaagaccataatgccagaaagttataatgaattctcctttttgattctcaaaaggaaaacctgccacaaatacaaatttatgaaaccaaaggcttctgtgaacacaggaatattcaacataattcaaagactaaaaactagtttcattaaaggaaatgtctgttaggtgaaaaactaacttccatctcttctatttcatttgctttaggaactcctgagctaattattaaaggttaggttaagcctcatatgctaaaaccaactcaatcaactactgagagtgacaactattttaagccacccagcaaaatgaaggatagtgatctgagagtttatttccaccaaatccctgggaggcatccaagcctggttccatcctctatagctcaaagggaagacaatctttttatcataaacaggaagcagtagtatatataatggaacaaaatatttcatcccgccaatctaaaacatataaattaatttgcaacatttatgtgttaatataaaaatactttaactgtattaatctgataactaacccatttttaatgtcactataattatgtcataatcatacaatcgccaagataatataagcatgctcatttataagccaaatatatagaactctttgcacaaagaaccaaaaacaagcataataaaactcaccttcattgggagatgttttcaatttggtgcaaattccatagacatctccatagctttcctgtatttttcgtaatgcatctgtggacctgagctccatgagagcccgcagctctgcgagcgtaattccaaagtctccatcatgattagcttccttcaaagagtttttcacaccactgtaagcaactgagttgtttgccatgtcgcccattacaagtataatatatcagaaggaaaatgtttcccaaaagaatttaattttcacttgatgtatttccaagatgaaaatcttttaagtatgaaaatctttcttaaaccaaacactcattgtatgactttgtaaagcagcatcagcagcaacatttcccagagaagtatcttgacctttggcccatgactagtttctccatatcaatcatgagatatacacatctgtaagaagaaaatatttaaaagttaataaaatctatcttaagagtattatgcatgtaagcatattttctaaatgtcaccaggtagctaaagtagataatttaataatataaatatttttgaactccagtcttgtgcttttaaagtgctttgcatgataaaagatcaaagtacaacttttaaataaaactgtacatcagaagacattagattacattattaaataaaactgcacttcacatgactgaattttatgatccactcagtattactgttattgttccaagcactatgctagttgttttaaattcattctctcacttaatcattacaatttaatcccatgaggtgttactccttcttcttctagtgataagagcagacttcaagaaagtgagttttctgcccagctaacaaatggctgaaatgtctgaggtggactgtctccaagcccaagttccttttaacattatacttggatctctctctccaagtctttcatatggaatagcccctgaaaggacaaaaagcataacagatcctttaatattatttcctgtaattctcattggccactctgtgactctaaaatcttttggccggcaaaaactatactctatatgatttgtcacatgttaccacctcaggtcttcctttgaccccctatctaaagaaattctctactcttttgttgtccttgcccagtcttcttattacctgaatttatcttgttcatttgtttatatgttatttttttccctccatctacagtattagttctgagggcagagtttgcccattactacatcttgagaacctagaactgtaccagacacatggtagacactcagtaaaagtttgaggaatgaatacatgcattacatttatttcttcatcatactttcaagtcctcctattatactaatctgcctaaagataagctctcctctccatacaatcacctcaaagttaacatgcccaacaatggactcatctcattcactcattaaatagctctgccaccaccattatccttaccacctcggctaggaatcttaaatcatctttgattccatcctttccggcttcagtcagttactaagttaattctacctttgaaaagtctcttctgtatataaccccttttcttcctgatcttcaagttcctctatgcaaattataatcattaaccccttggttcttcctcattctaatgtctcacacatacaatgccctaagcattttgctgctacatttagtttttgaaataggcatcatgccactaaatctaaacctacaagatgaaaatgcagtcccactgctgctcatgactgtctggctccattttacagatttaacgtcttcccacctcaagcaatctacctgcactccaaaatatttttaaaatgtttgatgattagaactagaaaagattagaatggcaaatgcaataaatcttcagctatgaaactgctatgaagatgtctgtacatcatggtgtatggtcctcatacttcagcatatatcagaatcacccagagaatcagttagattgctgggccccacacctcaagcatctttagattcaggcagattaaggtggggctcaataatctgcatttctaataatttttggggtgatgctgatgctatcagtctagggagcacacttgtgagaatgactgaactggagaatgggctaaaaacttagaattcatatgagtgagttgaggatggctgggtgagaaaagtttgcttgccttaggttaaacttgcaaagatgtgacagttacagattctgcaagacattttcttgcattgcctccttcctcccacttcacaaatccttatgcttgtctaattattaccaattttactcatctcccaggcaaagtgggttccctcctacgcacacatcaattataataataatccaacttgaaaaactggagagggtggtt

SEQ ID NO: 915920 - DNA, 4001 bp, Homo sapiens
acagtcttacctcccctttcttacataaatcagataaactatcatctaggatctaacccaactttctgcaataaagaaaattattatcttaggaaacaataatcccattccctgactttaactgtcataaatttttcattttactgagccttaacctaacagcattccctcacatagcaatagcaaatacaaaaacctacaagttttggagactcctaaacctaagccataagaccgagtcttaaaaatactcaactagccaggcgcagtggctcatgcctgttatcccagcactttggggggccgaggtggggggggaatcacccaaaatcaggagttcgagaccagcctggccaacatggtgaaaccccatctgtactaaaaatacaaaaattagccgggcatgatggcatgcacctgtaatcccagctactcaggaggctgagacaggagaatcacttgaacccaggaggtggaggttgcagtgagtcgagagcgaaactccctctcaaaaaaaaaaacctcaagtagtaggcttttgtcaatcagaaattctgcatcctaatttcttcaggtgaaactgcactgtgtgattttaataatcgaacgtatcagaagaaaaattctgctttaggagaacatgtcaccttaatgtgtaaaactgcaaataacagaagttcctttgtgcatagatgcaataagagcaacttactgtttggttttgatgggacctctttcatcaataggttctccaatgacattcatgattctgcccaaagtctcaggaccaacaggaattttgattggtgcaccagaatccagtactttctggcctctaaccaagccttctgtaccatccatagcaatagtccttactgtgctctcacctgttagatacaggcatcgcagggttatacataaggataaattggtatcaagacctaaatcgaccaagactccttctcagtacctaaatgtggcttcagcaaactcagaagaacgaaagtcattttgataaaatcatcatagaaggcagacagcttggttttggggatatttgggctacacaaggtctttactattcctaacaaactctacttacccaaatgctgggccacctccaaaaccagtctggtctccctgccttgcacttccagggcatttagaattggtggtagtccctcatcaaactggacgtccaccactgcgccaatgaccgccacgatgcgcccggtggcggcgcctgcttttggcgaaggagatgtttgcgccgcatagtccctgactaacagacaaaagatattggaaggagctggggtcaggccagttaaaggtcatcggaagccaggacttaacacacaaggagaggaaaactcagccgaagtcaggcctctttccgcttgtacggaacgcgtgtccaagagggaaggccgcgcagcgatcgataaagcgcctgcacagccttcccatccgcatgcacaagaccccatttttcgagagttcagtacccctattcaaccggaaggtcaacgcacctgcccgcaccttttccgtcacacaaaggactttatacaaaatgggacagagctgggtcgaagaaacctcctatgggtgtcccattcttgttctccagccattagagagcaagacgcggctccaggcatccttttaacaccacggatcccttaggcccgagctaccatcgttccccggctcaaggtcatggggcggcaaaatggaacgttagctcctagagaaaagcacttaccaggatggaccgccgtcggagcggcccgcagtaagagctgagctgggggcagcgacgctgaaggggtgagtctccgcaaggccccggaggccggagcagcggccacccgacccacaaaccccaacatggcgtagtccgggtggagactgaaggctgcagcaaccgcagccgcctgctctcctgccgttgaggcgaggcctacgctgcagtaggcaggtccattgggtgaactggctgctcatcattctctgtgctgcttctacaggttaatacacgctgatcttctcatccattggtcaaaactggtgctaatctgaaactcctttttttattggacagtgtgaggttagagggcgtcactctgagcctcaaaacttaattggatcatagcgacgtccgttggacagggtaatcagaggaactacgtttaggaaaggggccgagttcctgttgaaagtgcgtggcctgtctttgcctgtccttgggctttctccttagataggtccttgatctaggtgacagccataggggcggtggttagggaagtggtagtgcggtgaagcaccactgaaggtgagcgtggcgaagtcaggagccctctttagagccaaaataaggtttttctctcgaagtagtgagattgcaagctcccaggcgattgcacagattagcaacctagacaggatctttatcatttaaacctattaaaatgaaataaactaatgtaaccagtactttagcagggcattgaggagactcaataataagataaataagactaagaaccttccttttaaggtccaggtgaacaaacaatgcaataatgtgatggttcctggttagcataaactgggtgcacgaaagacgaggggataaaattgggtcacctagagatacagaattgtccaccttgaaggaagctgagagacctcagctatgaaatgtgaatagaaattcttagggtaggctgggagcggtggctcacgcctgtaatcccagtactttcggaggccgaggcaggtggatcacctgaggtcaggagttcgagaccagcctagctaacatggtgaaaccccgtctctactaaaaatacaaaaattagctgggcgcggtggctcacgcctgtaatcccagcactatgggaggccaaggcgggcggatcacgaggtcaggagatcgagaccatcctgactaacacagtgaaacccggtctctactaacaatacaaaaaattagccgggcgtggtggcgggcgcctgtagtcccagctacttgggaggctgaggcaggagaatggcgtaaatccgagaggcggagcttgcagtgagccgagatagcgccactgcactccagcttgggcgacagagtgagactctctaaaaaaataaaataaatatataaaataaaataggctgggcacggtggctcacgcctgtaatcccagcactctgggaggccgaggtgggcagatcatgaggtcaagcgatctagaccatcctggccaacatggtgaaaccccgtctctactaaaaatacaaaaattagctgggcgtggtggcgggcgcctgtagtcccagctactcaggaggctgaggcaggagaatggcgtgaacctggaaggcggaggtttcaatgagctgagatcgtgccactgcactccagcctggtgacagagcgagactccgtctcaaaaataataataaaaaataaataaataaataaataataaaataagtaaaaagggctgggctgggcacggccagcccagtaatcccaacactttgggaagccgaggtgggtggataacttgagcccaggagttcaataccagcctgggcaacgtggtgaaaccttgtctctaaaaaatatgtaaaaaaataaacacacacacacacacacacacagacacacaattagccaggtgtggcatgtgccagtagtcccagctactggggaagctgagatgggaatatggcttgagcccaggaggtagaggttgcagagagctaagattgcaccattgtactccatgctggctgacgttgtgagaccctgtctcaacaaaaaaagaaaaataaaaaagaagaaaaaaaaattagggctgaaaaaaatcctctgggtttgggtttggcaactaggaaatcattccatggtggagtgggatcaaaactaatttcagtggactgcatcaaaacataggattttggctgggtgtggtggcttacacctgtaa

SEQ ID NO: 915921 - DNA, 4001 bp, Homo sapiens
tgagccaccacacccagccttaattacttttaagttaatggatgtcttcaactcttgtcctatctagaactctgatttttgcctatatgtaactctaacccaattttgctgccgtactattcaggttttcttgggtcaaaatccaatagttctttaaggcttttagaaaaagaaggggtggttcttttctaagggaattataccttattatcttctttgtaaaatgcagctcttagggggattaagtatgttcatttacaaattaacatacataaagagtttaatgtggtgctggcatataataaacccacaacaaggggtggcaattaagtgatcccaccattggctatctaaccatggcaactctgcaattgttagcctacaacttgggcaaaggcactatccagaatcaggactccaaaatcatcacgggctttttcctcagtgtagatgagtcacaggggtagtaacttaactattcctttccttaaaccttcttttccttgtaacagcagaatctggggaggttaattaatccttcacaggaaagctggcaggcagggtctcatgctggccccactagcttggccttaccccacctttctgggcctgctgcctcaacagaaaccctcatctctagcccaccatttgtgacttttacaacttcaccagcgtgccgggatgcgagaaaggtactggtaaataactagtgattccaaagcaaccagcctctctcttctgccttagctatcccaagccacaacctaacgggaggcgatgttttggctttttttcccacttctaccatgttcaaggtttactttttaaattgaggggtgctgactagagggattggtgactttagacgatccactatctccattgctcggagcacctgaggttctggggcctaaagtctggagatttcagaataaagaaggcacaagtcaggatgagaagagaaagcagagataggaggggagagcctgggggttgtcacaatctgaaagggccagagggcgagaaaagagtgtttgcagggactgggtggaacaggtgaaaagcagcactccaggatctaactttggccagctccaaggtatcctccccctgcgagacatccaagatggcgccaggcccgcgcggttggaggtcaccggcacgcggaagagccaactctaaggctaagggatagcggaagcaagaaagggcgagaggaccagggtgggagcacgcaaggtaagcgcctcaaagcatccgcgcaaggtgaggtgtcccgcgcgcgtgcgcagcgcacagagggctctaggtcccaaggccttacctgctcccactgcagagaagacagagaggggcggagcagcgggaagagcgaaaggaaggctcagcgcatgcgtgacccgggccaacgagtcgctcagccacggatagagtgattgcaacatacaggatcagctcaggcatcacagcgccgcctgccagggctgtggcggtatccggccggttgctccacctggcgttcgagaggagaaactacagggagcgccgactgcagaaatgaggccaactccgcggagtaagccgatccgtaacgtggactgcggtttggtctgtaccgcgtttgggatctcggacttgcgtcccctttccgagcatgcgcagtcgtcacactgccaaaacaaaactcctactcagaattcagtgttaacatacggtcgggattggggttcagtgcctaaaatgcagcaggaggaagatcttgggagtcctgctttctgtcgcgccgggactctggcatcactggatggcaaaccggctccatgggcgaatagtcagcaaaatgccgcagctgcttctggtggcttcgccctttcccccactccccgtttcctcctttccattccggtgataaaccatgagagaagcagcatcagcgagccagaagatagggttaaatatgatccgaatccctctttcctggctcctgggacagtctaggaataacgggcacctgcgacccgctgtaaggttgcgaggtcactccaggcttgcccgagcctctgctcaggtttcaactacgcgagttgggataagcagcgccctcccctcccgcccccatgctctcctgaacgtgggttttctctcccctttcgctcgcccttcccctgatggaaggaggtgggggaggcttcctggccctcatctttcctaggcctccttgtctcccagacaggacctgccctgccctttggaacagggcgacaaggcctatccagttccaaacccctgccgtccctgcatcgtgcttgaacgcagcacgagaaagacgggaaaagctcaccaaaccccataaaaaataaaaaataaaaagaaagccgcggctgtaaataaaggcaaatccgccactctctgaggggccgtttgtcctcccctccttggccccgtccttcccgccgccccctcccggctcccgggccccgcggcgccccggccccgagctcctccatttaatcggatttgggagaaggggaggataaatcacggcagcagctttacggtcccggaggagaggcgagccgcagacaggcacaccccggccggcgataaaaaccgccgctgaaagcccacggagcaatttcccgggaccccgagcgacgccattacaggaatgtaattttgcccggatgaggccccgagtttaattatcctcgcggaggaatttcaatgcggccaatccatcttgcaggcgggcggcagagggatttatatgggcccgttatttcacaccgatcctccatctgcatttttatggccctgagctcctgaaagggaggggaaggagtggggagaaataggagaagcgggcgagaagaggagggtggtagactgcctgtctttcctaaattcgcatttccagctccatcaggattctcacaggttcctctgaaatccccaaatctccagttttagttgttgattgcgccccgagcgggcaggtacgtgggaaatggaactgggatctttgggaatcaatcaacaggtatttatcaagtaccaagtggtgccaggcactgtggagatgctgttaggagaaagacaggctagcaaagacacaagtttatcccctgaggtctccagacatctccattcccaccaaaacggaattcttttaagctgtcagcttcacatcctcagtggcagagaaagtccacagttcttaggagccaccacccccaaacggctgttgcagctgttgcgacaatttagacactcagatatggctaacaatcccagaggaggatcagagaaggggcctgggaggaagctaaagctggctctttccaaaagttgttacagcctgcgatgtttaacactcccttgccctcatagaataatgggttctgcgttcagacaaatctgggttcccaaattgctgtgtgatcttgagctagctgtttaaccccctctaaatctatttcctcctatgtaaattgagaagaataatagtacttatcacacagccaatattgggataatacatatgaagcttttagcaaggtacttggtacccagtaagagttcagtaattgctagcattaaaatcatcatcgtcaccaccaccaccaccaccaccaccatcaccaccatcatcaccatcatcatcactgcttctatagttaagggcattgcaactcaattctgcactgctacctatatggactgtttattgcaaggtccttgagatagtatctcctgaaagagactcaactacactttaaaaacgttttcacctgcataagtcatacaaaacaagttattttacttgctggtgagtggagatctgaggggaggctgagaatcctgggactattactacgaggcttgaagcaagaaatcaaatccgcaagggagcagtgaggctccaaaaaggaggtttgtaaggggaggggtgaatttgaagacagcaaaagatccaagagaagcttagctgagggtcggag

SEQ ID NO: 915922 - DNA, 4001 bp, Homo sapiens
cgtgaaaccctgtctataaacaaacaaaaaagatctctgggaataaggctcaagtgccctgtatttcaaacaagtttcccagatgattattaggtatacttaacgcaagagcgtgaccctaaacccagtcttgaaactgtggtagtggtagaggatagacttgaacttggatcttttaagttacatgctttctaatatgtcacaggctgaaatactcagtgaatgcttagggctattaaataccacttcattaaatgaactgaactcagattgtcccaggttaaaacacttctgaatccaacatcttaattgctcttaatttattttttgcccaggctattgtggaactcctggcatcaaaagatcttcccaccttggcctcccagtgttgggattacaggtgtgagccaccacacccagccttaattacttttaagttaatggatgtcttcaactcttgtcctatctagaactctgatttttgcctatatgtaactctaacccaattttgctgccgtactattcaggttttcttgggtcaaaatccaatagttctttaaggcttttagaaaaagaaggggtggttcttttctaagggaattataccttattatcttctttgtaaaatgcagctcttagggggattaagtatgttcatttacaaattaacatacataaagagtttaatgtggtgctggcatataataaacccacaacaaggggtggcaattaagtgatcccaccattggctatctaaccatggcaactctgcaattgttagcctacaacttgggcaaaggcactatccagaatcaggactccaaaatcatcacgggctttttcctcagtgtagatgagtcacaggggtagtaacttaactattcctttccttaaaccttcttttccttgtaacagcagaatctggggaggttaattaatccttcacaggaaagctggcaggcagggtctcatgctggccccactagcttggccttaccccacctttctgggcctgctgcctcaacagaaaccctcatctctagcccaccatttgtgacttttacaacttcaccagcgtgccgggatgcgagaaaggtactggtaaataactagtgattccaaagcaaccagcctctctcttctgccttagctatcccaagccacaacctaacgggaggcgatgttttggctttttttcccacttctaccatgttcaaggtttactttttaaattgaggggtgctgactagagggattggtgactttagacgatccactatctccattgctcggagcacctgaggttctggggcctaaagtctggagatttcagaataaagaaggcacaagtcaggatgagaagagaaagcagagataggaggggagagcctgggggttgtcacaatctgaaagggccagagggcgagaaaagagtgtttgcagggactgggtggaacaggtgaaaagcagcactccaggatctaactttggccagctccaaggtatcctccccctgcgagacatccaagatggcgccaggcccgcgcggttggaggtcaccggcacgcggaagagccaactctaaggctaagggatagcggaagcaagaaagggcgagaggaccagggtgggagcacgcaaggtaagcgcctcaaagcatccgcgcaaggtgaggtgtcccgcgcgcgtgcgcagcgcacagagggctctaggtcccaaggccttacctgctcccactgcagagaagacagagaggggcggagcagcgggaagagcgaaaggaaggctcagcgcatgcgtgacccgggccaacgagtcgctcagccacggatagagtgattgcaacatacaggatcagctcaggcatcacagcgccgcctgccagggctgtggcggtatccggccggttgctccacctggcgttcgagaggagaaactacagggagcgccgactgcagaaatgaggccaactccgcggagtaagccgatccgtaacgtggactgcggtttggtctgtaccgcgtttgggatctcggacttgcgtcccctttccgagcatgcgcagtcgtcacactgccaaaacaaaactcctactcagaattcagtgttaacatacggtcgggattggggttcagtgcctaaaatgcagcaggaggaagatcttgggagtcctgctttctgtcgcgccgggactctggcatcactggatggcaaaccggctccatgggcgaatagtcagcaaaatgccgcagctgcttctggtggcttcgccctttcccccactccccgtttcctcctttccattccggtgataaaccatgagagaagcagcatcagcgagccagaagatagggttaaatatgatccgaatccctctttcctggctcctgggacagtctaggaataacgggcacctgcgacccgctgtaaggttgcgaggtcactccaggcttgcccgagcctctgctcaggtttcaactacgcgagttgggataagcagcgccctcccctcccgcccccatgctctcctgaacgtgggttttctctcccctttcgctcgcccttcccctgatggaaggaggtgggggaggcttcctggccctcatctttcctaggcctccttgtctcccagacaggacctgccctgccctttggaacagggcgacaaggcctatccagttccaaacccctgccgtccctgcatcgtgcttgaacgcagcacgagaaagacgggaaaagctcaccaaaccccataaaaaataaaaaataaaaagaaagccgcggctgtaaataaaggcaaatccgccactctctgaggggccgtttgtcctcccctccttggccccgtccttcccgccgccccctcccggctcccgggccccgcggcgccccggccccgagctcctccatttaatcggatttgggagaaggggaggataaatcacggcagcagctttacggtcccggaggagaggcgagccgcagacaggcacaccccggccggcgataaaaaccgccgctgaaagcccacggagcaatttcccgggaccccgagcgacgccattacaggaatgtaattttgcccggatgaggccccgagtttaattatcctcgcggaggaatttcaatgcggccaatccatcttgcaggcgggcggcagagggatttatatgggcccgttatttcacaccgatcctccatctgcatttttatggccctgagctcctgaaagggaggggaaggagtggggagaaataggagaagcgggcgagaagaggagggtggtagactgcctgtctttcctaaattcgcatttccagctccatcaggattctcacaggttcctctgaaatccccaaatctccagttttagttgttgattgcgccccgagcgggcaggtacgtgggaaatggaactgggatctttgggaatcaatcaacaggtatttatcaagtaccaagtggtgccaggcactgtggagatgctgttaggagaaagacaggctagcaaagacacaagtttatcccctgaggtctccagacatctccattcccaccaaaacggaattcttttaagctgtcagcttcacatcctcagtggcagagaaagtccacagttcttaggagccaccacccccaaacggctgttgcagctgttgcgacaatttagacactcagatatggctaacaatcccagaggaggatcagagaaggggcctgggaggaagctaaagctggctctttccaaaagttgttacagcctgcgatgtttaacactcccttgccctcatagaataatgggttctgcgttcagacaaatctgggttcccaaattgctgtgtgatcttgagctagctgtttaaccccctctaaatctatttcctcctatgtaaattgagaagaataatagtacttatcacacagccaatattgggataatacatatgaagcttttagcaaggtacttggtacccagtaagagttcagtaattgctagcatt

SEQ ID NO: 915923 - DNA, 4001 bp, Homo sapiens
agttttacttccttctggaaaaagatgaacagcactttcttctcctttcactgacattcagttgaaaaggatcccaggtacactctatgactggaggtagtggcgcttattgaaactggaaccttcatagtgattagtacgtttgctcaaacctgtaagactgaagtgtgataagtgtcttggcttgagtactaaccggaaggaaaacatctacctgttacaaatgtaggagcctgctgcacctgcagctgttgcctgaatgttttgggtgctattcacagctcagcgcagcatccatcaggtgaatgggtacaactgcagaagtggctccaggaaccaggaaccgccctgcatcttacctgcaccctcgcctgtcactcaggagtctctccatgactttgcaactgccttatggggctgatctggtattagatatctgatatcaatggatatcagatctcgggtagggctgatcccttttgaaattaaggacaccttaggaagattaagggaaacagtcaggagatgaaagtggtggccaggaaataaaatgttcgcctgagtggatttcaattcagtcagtaagtacttgcttcacggtctcccttccacaccctgttctttgccttcttagcacttatcacagctcataatcagagtgtgtttaatctgtctcctcccacactggaagctccaggaacacagggactgtgtctgccttgctcaccaccgagtctccagcaccaaaaacagtgcctgaacatagcgggcagtcaagaaaagcttgtctgttcattcaacaaatgcctatcgatgccaatgactgccaaggactgcgttaaggtacttactctcagaggttgacagtccttggtggagacaaacaataaacaagtaaatggacaaacaaatgtttattattacttgttggggagacagcttccactcgacaaacaatgactgagttcttaagtccttacacacaatggtatgtacagcattaagcatcagtgaccaaaacacaaaaatccctctcctcaagcagatgacatccagctccttcccatttctggctctgtctgggctcctcctgttccctccaacaaggaccctctccccagatcttccccacggctggctcctttctatttgggtctcagctgaaatatcaccttctccgggaggcttcctcgacaatcccttcacactcacctcccgcccgaatcaccttcacatcaccccgtttcttctttatggcaaaccttttctggttgacctatttatttggttaatgcgcccccctaacccccgtaaagttccaaaaggactccaagaggcctttgtgggatttgttctcccgctgagctcggtgcccggagctgatgaagaccacacgggcgatcctaactaactggggcagagcagccgccgaccacacagacggccggcgaccctggagtcagccccgcgctccgggaagctttggccgctgagctggggtgtcatcttccccgtctggacaatggggacggggcgcgcccttcctcggtgctccccgcgggagggccccagcgatgcgcgggattgggggcgccaggagagcaggtgcggcccgcgtctcccgggcgacactcacgtctcggaactggaccaggcctttctcgcccagggcgctgaggcactcgtaggccgtgcccgactgcaggaagagctgcgccaggcacatggtctcgctccggaacagggaccccatggcgggccgacccgcgcccggaggggctcgatgggcggcggcggctccgagccgcgcgggcccgcacactcagccggtgcggcccgggcctcgagctcttcctgtggcctggccgcggccccgcactatggggctccagactgcagcggccgcccccggttctgccaccgcggccgccgctccagctgccgccacagcagtccgcgaggtcccgcccccaagccactgccggttccggttccgcccccgcgtcccgccccccccgccggccgaccaatggacgcccgaggttgtcgccgcacgacgtggcggcagggccaaccagcgcgaacccggcgggtacgaccactgcagctggcgctccgccggactggacgcagagctaaatcccgcgcggctccccggctttcctggaggagtctcgccgagtgtgcacgccgcgaagctcacccgttcctagtgcacgaccctgtgctgctgcgtgtgtgtgtgtgtgtgtgtgtgagagagagagagagagaaacggaatctcacgcagtcccacaggctggagtgcagtagcgcgatctcggctcactgcaacctccgtctcccaggttcaagcgattctccagcctcagactccccagttgctgtgactacagacgcgcgccacccgcgtccagctaatttttttgtatttttaatagagacggggtttcaccatgttggccaggctggtctcaaaactccagagctcaggtgatccgcctgcctcggcctccgcagtgctgggattacaggcgtgaaccactgcgcccggccctgctgctggttttttatggatagggtttccctctgtggcccagggaggagtgcagtagcacgagctcggctcgctgcaaccttgacctcctgagctcaagcgatcctcccacctcagcctctggaggagctgggattacagacgcgcgccatcacacccggctaatttgtttttaaaatgtttatagagaaggggtttcatcatgttggccaggctggtctcgaactcctgaactcaagcaatcctcccgccttggcctcccaaagcgctaggattacaggcgtgatccgccgcccggagggatcctaggcttcttcgtgaagttggagtgtgcagccagcatcccaatccagttttcaaacatttcccaccgacctcgcaagactcctcctgctcagttgcagtctccccttcccgcccggcctggccaccacaggacaattttgtctcgctaaatttgccacctccaggcttgtcctgtcgatggaatcacacagcacccagtgtgtgttccccacactgaccgggaagcagtggccccccgccccaggccgcaacctcaccgctgtcccagtcgagtctctgcttacatatccccttccttgagactgtccctggagtcacatccttgttctatttccttcactgcacctgccaccatctgaaattatcttgtctgtgtgttagtgccagtcttccctgctagaatggaagctccaccaaggtggggacattgtttctgccactgtggtatctccaagccccagcacatagtagccactcaataaatagttcatgaatgcatacataaatgtataaacttaaaaaagttaaaaccatagacactccagaccccattctgccaaactgagttttttccttcttttaagtacaaaaggcgtcctcacaaagcccacaaaatcaagctaaattacctgtcatttggaagttttaaatttattttccataaatacctgaaatccaaagctagttacactaggctgggtgccctggctcactcctgtaatccctgcactttgggaggctgaggcaggtggatcacttgaggtcaggagtttgagaccagcctggccaacatggcaaaaccccgtctctactaaaaaaatataaaaattagctaggcgtggtggtgggcacctgtagtcccagctactcgggaggctgaggcaagagaatcgcttgaacctgggaggtggagcttgcagtgagctgaaatggcatccctggactctagcctgggcaacagagtgacactctgtttcaaaagaaacaacaacaacaaaaagatacagtaagaactgtgaaggtgaattcaaaggctgaagttcagacaataattgactcagaccccagctccgtcagtccagtactgacccagattcctgagtcagccctagaggggtcgggtgaaggcccaacacc

SEQ ID NO: 915924 - DNA, 4001 bp, Homo sapiens
ggacaacactgagcccccagcccctactacaaccccggcttaggagggaaaaagacgctagtaaacacccgcctttctgccttcaggaacccgaccacgtcccctgctgcaatctctctctcctagcatttccgaaattggggcgggggttgggataagtgcgcagggtgcccgccccctgccaccagcaccgccaccccggatctccagggtccagcctgggtccagccctcacccaccgatgttccacaggcgccttctccactgcggcctcgaacagcaatgcggatcggccaccacccgcgcgccggagaggtctggcgggggaaggaggaaggccgggacggggccgggcactccccaccccttcccttccccaggtgggggagggtggaacgctgccggaggccacatggagccccacgatttcaggggagttcgggagcccccgccgccgcctcggacacgaacgcagaggggtgcgggggccaaggcccacttgtctccaccccgtcctccgatctttcccaggactcggagggggcggggagagagccccgacagaccctgatgattccggaggagcccggtgcctacccctttaaccggcacgggggacgcggccctaacttctcccctccagagatgtcccccatggagggggacatgttccggaaaacgccaccacagcctccagacccctccaacgttcacacctaaaccgggagtggaggagctgcccgagcatccccacgctgcgggcggaggatcgtgcggaagggggagccggggctgaccatcgccgctacccgagaacccctcccaacacgcgtggggaggggaggccgcccgctccctccatcttgaccgccgggggagggggcggggatgctgcgggaggctggacaggcctgacaatcccagaggaccccggctgcgcccaccggccgagcctcggggctcaggcccgagcgagtctcccccgcgctgccggcccccagcccaccccgggtagcccggcgggtcacggggcggggacggcggcgcgggccgcgggggaggggacgccgggcccggagcggagggggctggggtgccgacacccacctgcccaggccgggcctcccgccgccggaggtcgccgcgaccaccgaggagggagccgtggccgaggacgaggagaccgaggacgaggacggcgaaggcgcggcggcgggcgacgctagaaggccgctgccgccgggcttgcggacattggcagccgcgggcggcggctgctgctgctgctgctgctgctgctgttgctgctgctgctgctgctgctgctgctgctgctgctgctggggcttcagcgacatggtgaggggcccatacaccggctcgcacgccgggcggggacagccgggagccgggcgcgccaaggagacgccggaacgcggcggggacgcgcgggcgccgagcggggaggcgcgggttggcgcggccggaggggcgcccgggctggcgagggggagaaggaggacgacgaaggggcggggaggcccgccgagaccaaggagccgccgggagccgggccgaaacgcgccgccgccgttgccgttgctaccaaaacagtctgaggcggagggaggcgagctctgccgggagggaggggggccggggccgggcgggggaggggcggcggagggatacggtcccggggccgcgccaccgccgccccgcccgctccgccgcgccggccgctggagcgagcgccacccgggccacctggctgcggcgaagcggcgagactcggtggccaccgcgggactccgaggagctgcggccgctgagcgcatcggagggcgggcgcgccgaggcgccgggtgggagcggaggtgcggatagggactctttaccggaagtcggaggggtcagacggaagcagaacgtgaggtggccccggggccgggagggacacgtgaggagcgggcggcgcgctgggttgctttctcgggggtcgggtgagggccaggcggcggtccctacccggatccgccttcctcaaggcgggtctgcccttcggggagggcgtgtcggtctcagcctctggggcctgcctggtgtggaggacaggagagaagcatttcttctcctactgtattccttcagcatcttcacttctgcggggacctagtttgcccccacctgatgcaacccagaaaatggactgactgcgagtgccttggggcggagaatgtgtcttgctacgtgtaaagcacctagaaccctgccagattcaggggacacagcatcctgccgttttcctgccgtcccccgcccgccacacagtaggcgctccagtggctcggggcatctaccaggcaggccgcgctgtcctgccctgccggggctggagtggagcaaccctccggggccacccacatctgggtaccttttccccactttttccaccccagccgcgcacagtcaccagaaaactcttttaggtatctgaccttcatttgaacctatgttccctcacttgaacttctttttcctcattcatgagattctaaaggaaatatatgggattgggactggtagaactacggataatgggatctccctcggtagagacagagccgacctcaaaacaatgtgcgaactttagaccttggaccctttagaagttttaatttaacttacccagccagcacagtagactctttttaaaatgtgttgcagttaaactggaagcaagtagaaagtaggtaacttttttttttttttttgagcagtgaatctattgttttttaaagtgaaatgacttcaggaaataataggggaagaaacaccaaaattcccctcaatgtcctagaactgtccagataaaggtaaagacttagataaacgtggagaatgattgaaccagcagttttcagtagtccaactgaaattaacctcctagatagtccaggcaaaaatgatcattgtattctgccaatgtaggaaatcagttttatttcccatctaaggtaaaaagtagatcaagggaccattgcaaaaccctttaaaaattaacctagcctagccaacatggtgaaaccccgtctctaccaaaaatataaaaattagccgggtgtggtggtgggcgcctgtaatcccagctactcgggaggctgatacaggagaattgcttgaatccgggaggtggaggttgcagtcagccgagatcatgcactccagcctgggcgacagagcgagactccgtctcaaaaaataaataaataaataaataaataaagtaacctaaaggaaactggaactaaaaaaccagttgaaacaaaaaaatacctgtacccggctgtggtacaggccagggctgctgtgaggggaagctcctggagagggtgacatggggcagggacccaaatgagcatgggcatgaggatcctggggagaaacgctccaggtggagggcacagcgagggcaaaggctctgaggggggagtctgaggaacagcaaggaggcctgcaatggagcaggtcgtcaatggtgtcccgttatattctttctttaatagaaatacaaacacttggcctggcgcggtggctcacacctgtaatcccagcactctgggaggccgaggcggatggatcacctgaggtcaggagttcaagaccagcgtggccaacatggtgaaaccccatcgctactaaaaatacgaaaaaattagctgggcgtggtggtgggcatctgtgatctcagctacgcaggatgctgaggcaggagaatcgcttgaacccaggaggcggaggttacagtgaccaaagagggcaccactgcactccagcctgggcaacaagagcgaaactttatctaaaaaaaataaaaataaaaaaatacaatcacttttctctgattggaatcaaggtcccagaatacaatcttaagaacaagttttggccagtgtggtggctcacgcctgtaatcccagcactttgggaggcagtggccg

SEQ ID NO: 915925 - DNA, 4001 bp, Homo sapiens
ttgatatgtgactcttacttcccatcttcccctataccattccctaaagtcaggagattctggaggtctttctctgacttctaacaataaaaggactgctcctgttgtcaagaagatccaaaggggaccgagtggaaaggactatccctttcgagcggcagacagaaagtggtgacagtctggatgttcaccatagcagagctctgactgcccaaccaaagaaaacagggacattcaacaggattctgcacacagtcagatgagataatccagtcctgctccttggctcctagcactaatccattcacattattgagggcagctgaaagtgccctctgggctcagttttcaaaccacagcctcctgcacagccatgatgctcttccatacttcagtcctgcccccagggtgggaggcagatagtgacctgacttaaggaccaagtcacacccatggactggctaggtaaccagtaactcagagtaggaaatgaccgccctactaaacttatatccacagcataatacatccagacatgaatcttgaagtttgagaaatcatgcatagttgcagaggtccctgctacctccccaggggatcataaccgaatcctcaacctgtctggacaaccaagttgtccatttgccaagcctatgccaccaggttggagggcaaggaagagggctctgctcagccaaatgctaggccttgtcctcaagtcagctgaatcattgtagtctggacttttgggaaacacgtggttttgaccttttcttcttgctggagtcaaggctacagagcttccctatcaaacttgataattctttttcttggatttcccaaactgaaactgttagtatccagatcttgcacctgacatttacttgtctcagagaagcccataacagaggttcagatatcaaaggagcagtcccactgcaggccactgatcacggcctgacgaactgtaacgtccaaactgtccaagaagcccttgacatcaggcagacagaaaggctgaggaaccaaaaattttatatgctgggcacacaactgctcacctgtgcactgggggcactacaggatcttgcgcacatcctggtgtgtttagagatcaacaggcactgcatggcccgcaggctgtgcagctcctcctgcccagggcttcagagcttgctccaggtaatacactttaaaaaaaggattcctaaattatccactttgggtttttaaatgctaggatcttcaagggggaattaaaacttttgtctgatttttctacttttttctacttagcttactcctcgaagccacaggaccagtctatgttattgtcctggccactttcagactctcattttgcagctactggaattccggaggtgagcgctgcagctgctgatcaggcccattcccaggttctccgggaagggagcaaagcgggaggcggcacgctcctttgtcttccactggctgaatgccaaaatccttcacgctaccagtctctgcgaactccaggtagaagtagccacacttgactgcccggtgcacctcaaagcagaatcccaaacaagaatcctctatcaggtctacgtaaatctcctgagcgatggcctctagcttgttagtatccaggttggccaacgaaatttcctccattttaatttgtaaacgagtgcggagagggcgctcgttttactcacggcagcaacacgtctggctccgcgggccgcgcctaggcctagaggcctttcagtgcccagtcctccggcggcggggtcggtggcgtccgcaactgcaggagcagcgataggggcgactgctccggaatcccaagtccttctgtttgttttgacgtttcccgggttgcgggcctttcagctgcgcctggcccaggactcaccgccaaaccgtctcagcgcctcacccagcctcctgggcctcttccgctcccctgtcgggcctagccccgcctctccgcttccgcccctcagagcgcctgcgcactggttccgcgcagactcttggggcttctcaacgcgctgctgctttgagagcgtttgagtttatgaaaaggaacaggatgaacttagtgtatgacttccattatctctgattattaaaaaattgcgaggatgctattttatgttactttatttgtaaatttaaacattcgctaatgaattcagcagccacgcttaattgatatcctctgaaaagtggaaaattttaataattatatgcactgttgtggtgtgattcgaaacatcattttaggaacagttctccggaggtgtttgaaaatttgacttacatgattgactggtgaatcgtttatagcaatgctgcagttgtcatttaaatccactagatggtgcaaggaaacaaattacagtatagtttatctttcggtctttttttgaatggaaaaactggaaacttggtactaaagtcataattcgtatatattgatcaaataaacccatggcatctatctcacttatgagatcattaaggcaatgtgactataaagagatgataacatacacctctaaaataattcagagagaaaattagatgtacattttgacttaaagaggaaggaaatctgaaatatgttaaatatattgggagataaaatttttcctaaaattatatgcatgatttgtgagaacgggagccagtctacctaagtttaaatcctgaagccaacatttaacagtttagtgtttcctcatctgaaaaaaaagctaattcttatttcatggttaagattaaattatatttggccgggcgcggtggctcacgcctgtaatcccagcactttgggaggccgaggcgggcggatcacgaggtcaggagatcgagaccatcccggctaaaaaatggtgaaaccccgtctctactaaaaatacaaaaaaattagccgggcgtagtggcgggcgcctgtagtcccagctacttgggaggctgaggcaggagaatggcgtgaacccgggaggcggagcttgcagtgagccgagatcccgccactgcactccagcctgggcgacagagcgagactccgtctcaaaaaaaaaaaaaaaaaaaaaaaaaaaaaagattaaattatatttttaaaaatcttgcgacagtgccttacatgtaagcaatggttcagtaaatgtaagctatttttaatcatattagttatgaacttgaatatgagaaaaatcgctgtagtatatcctttattttttgctcattatttggtccccagaactgctgtgaaatagagcagcctgtattatctttataatttattttaaaagtattgttaaccaaagaaagaaaaatacaaaatacatatttatatctgtctgattctgtactttcccttccagattaaaggagagacatgtatcttttaatcagatacaaataattattttctaatgtataagatcatctgaacatctaaatattttagaatttattcattctttatttatttttatttttgacacaaggtctcgctgtattgcccaggttggaatgtagtggcaccatcatagttcactgcagcatggctctccagggcacgaacaatcctcccacctcagcctcccaagcagctgggactacaggggtgcaccacaaccccagactaatttcttttaactattttcttttttttttttttttttttttttttttagcggaggaggtcttgctatattgccccagatggtcttgaactcctgaactcaagtgatcctgctgcctcagccttccaaatgctaggattacaggcatgagccaccttgccaggcctagtattcattcttaatatctcactgtattagtccgttttcacactgctataaaaaactacccgaaattgggcaatttgtgaagaaaagaggtttaactgactcacaggtctgcacgcttaatgggaggcatgactgggaggcctcaggaaacttgcaattatggcagaaggtgaaggggaagcaagg

SEQ ID NO: 915926 - DNA, 4001 bp, Homo sapiens
ccctcaccagcacatctcccagtacagcccaagaactggccccaggggagaggctcacaggagtggggaggagggtgctcaccgagaggatgacgtagcagtccccctcatagaagttgccgtgggcgctcacaggcaccagcgccagctccattttctggaaggacaaggggtgggtataggctacatcccctcccacctcccttccccatgagcctccctctcctctctgtcattcggtgcaggtggtggggagaaggaggggagatgttctcaatgaccttacaggatgtgaggctgccagccacagggttaacgtggccatccctctggcttctgtgagctctgcttgcatcaccccggatctgaaccttggtccctatcctgctttcccttgccctattctccactctacttcccacccgatctcatctcgcactattgtgggaaacctgtgaaccacctccagccctttgctggatataaacgaccaagtacaaacccttctctgagccgttgtgccagcacctccaacgctcttcccaacgctgaccactgggtgctggcccaggcccatgtaagaaagaacacttggattctgtggggccgtgggaggtggaggataacatttggagagtgccagcggtcagcagggctctgtgccaagtgtcttatatttggagtctgggtcagggccctgatttatcactgcatgtatggcttggccctggaggactgttcacacagccttgatgtagattttcatcacactccccaagtgagggaaacttgcggccatacttgtgtgtgttctatgtaaaatgtgataaatgttaaatatactgcaaatctggtaaccgtgttttagtacttgttttttgtttttgtttttgttttttttgagagggagtctccctgtgtctcccaggctggagtgcagtggcgcgatctcggctcactgcaagctccgcctcccgggttcacgccattctcctgcctcagcctcctgagtagctgggactataggcgcctgccaccatgcccagctaattttttgtatttttagtagaggtggggtttcactgtgttagccaggatggtctcaatctcctgacttcgtgatccacccgcctcagcctcccagagtgctgggattacaggcgtgagccaccgcaccccgccagtacctgttagtttttaaggaaactggaagccttcaaacagtggaagtgacctgggactcacaatctctgcgaggcttgctggagagctgactccccctcctggttgaggatagtgaagtgaggcatcatcgctgggttttaggcagcagcaactgactgggctcagggcaggggttggggggaatcctcgtatctggcaggtggagctacccaggccagggtggttcccagctatggattgctggagctcacagccgcacagagggtcccaagcccaagaggagacgggctgaacagctcctcatctctgcagtgccccctcacctctccccatattttgtaggagccagggtgccccgtggaagacatgttccatttctctgatggaagctgccaggagtctgctgagtaggtcccacctgtctttccagggtgtttcctgcaagtgcagactcactgagcaggtggctggctaaaggacaagcctgtttttgtctggagccctgttcttcggggctgaacatttcctccacctgccaaccacctgctttgagcacccaggagaggtgaaggatgggaaataggtactttgatgctgcctctcattctcctcaaaccataggctaaggggtgctggcgggctgttgcctagcagccccaggcagccagactgcttccagatgccagtggtcacaagtaaggtgcctccagcccagctcacctctattctccagacaatgatcccagggtcgttgtccacagccctgaaggcactggtcagaggcatgatgcttgtctttccaggactgaaacatcacagaacaagaggggagatgatatctcttgccatagtgggcatcaatccagtttttctgccgagctgcttcccagtctgttgtcagccatcctgccacaccctcatggtgcatccctgcaccatttcacaatgatgggggcaaggacttgtccaagtgcacatggtgagcctggctggcctggggattaccacccatgagttctgcttcccacctgccattgcccttaagagctctggtaatcgtcatggttatttaccaaaggggtgataaatatgttaagccctgtattgattcactttgcatatgttatctctaattttcagaaggtgagtttcttcatcttacattgtgtgaatctgaggtttgcaaaggctgaataacttgtacaagatcacactctagaatgaaatccttatctgatccccaaacctgtgcttctagccactttgatgtactacaacccttcctaaaccaatctaagttcagtggcatttggaaagaaaagctagtcagaaaaaatatttccaaactcagttgccttctctcactctcattccaattcttcccaagttccctgcttgcaaggccttctccacagtcaactttgaccttctctttggcttttgtcctttttttttttttttttttttttttagagtaaactattcttaaactcaaacaacccttccttcttttgtcactactatattccctgtgctttccagatgcaaggaaagtaaaatggcagggctgggcctgggacaaagggttctgggtgctagcagggtgtggcctggtctggcctgcggacagatggcttcctttttccctcccacacagacccaagcttctgtgtggaagcgtgaacctcagacacttagacgtctccagttccttcaggattgagcaagtcagggtggggagaggggggaagtggtaaagatctaagtctgtgtaggtcgtgtaccatctgtattcaaggagcatcttgggtaattaagcacctacccatgtccaaggccacgtagaggctttatagaattaaaatacctgctctcaaggagcttgaaatctgataacatgcataattaatgtaaagctagattaatttctcccaagaggcaaaggaaaaaggatggggttgatggatttatgtaagatttaaaaattcacccagaaaggactgtatgcatttttgctgtttggggacatactgtttgttaagaggaacatgtctgaccattgttttcttgaaccttgatggacaaagccaagtttggagagcatgcgccatctagtatggactttggcaaaaaaccataaagctcaaagcagactcgctttgtctactgctgtagcaggactaaagcaaggcaatggtgcggagcagccagtgtttgagaatttaatttgataacttgtgctgccccaccctgtgctgctcagaattgccaggaaatatggtgtttgggttttcttcagaccctacgtagcagtcattaaaggcaaaagccatgagccaactaggggaaggggacaagggccactgaattcattccttggagacagagaactgtcaccctggtaaaagccaaaccagccggcagcaattaggactgtgagcctcagaggctgaaacctgtcccgtttcccagcaggaatttaggaatcaaggagctccctgggccaggcaccccgaatgcgagaggataagctccaggaagggacttcctgtcacactggaacacacagaaaacacagttctgacatcaaatctcccaaagctgggtctctccttctccctaaatcctaattcagtatcctttgagaggactgcagaaaccccttgggtgtggggcacagttttgaaatgtcaggttaaaagccagtggcctgtaattctcagagatgcccttttggacggaccctgagcagaggaagctgttttttgttgttgttgtttttgagacagggtcttgctctgtcacccaggctggag

SEQ ID NO: 915927 - DNA, 4001 bp, Homo sapiens
gcgtcgggaccggcggagagacgcatgctgtccatgcagctcctactcggccctcttcggagctccagccctcgcgggccgctccctccccgtctcggaggacttgggctcctcgtccgaagcgcagggtctttggcgcgctcgcagcttgccgggctctgcgatccctccagtgggcgtctcccggagcagcgtcccgcctgcccactgagcagctctcagcagggtgagctggcccctctccctgctctgccttttttcaacttcggcgaggtcgggaaggtgagctccgagcttccggaagcactgggttcccaactcaagtatttatgcggtgcttgtttccttgggacgcgctccctcccgccctattgccggaagactgctggttgcctactccccgctccctggagttttattttttcctctccctacgtcggtgtttgtcctctgcatcactgtggagggggtggagctgggagactcgcagattcctcctcacagtaggtgggatcgtggcgctttcccgcttttcccttccaaaaacttggacaactggacgagtcatgccttttctgggctcgtagccgtttccacaagcttccctcactagccttcctcgctagcctccttaaccatgcatttgacttcaacaggcacgctaagcgcggtacctggaaacctccagtccacgcaccggcgtccacgcatctagctcctgcacctgaacctggctctcgacctcacctcctccagtccgggtttcttccttctcaccgagctcacccgtgcagcagtctggcaaattttattccccaggcaaattttcccggggcaaacatttctccccgctcgtgacttaaagagctatctcttcctagtaacgtctttgatgcatgctatttattaccctatgtttgcgacgggaagaacgcactcatcactttgcagccccagtggctgctgtgcctgtattcacagcggggtttggggggagtgtctcctggttttctctatggagactagggacttaaggagttttctctagattcctggggttttctgcgggaaaagcctgattcccacagcggggatggcggaaatttggccgcagtggtccgtggggaccgtctggttactactgagtcgtggggacatctttttgggtggacaaagagcagctgccggacagcggccatccaggcagtgctgtccagggcaagggacagaaaacccgcccggctcctgtgctcaggagtaagaaagaggcaatctcaaagagaggaaagaggccctgggaaggaggggaaacaaccacctacctagtaatccgttactctgaacagctggagcccctctgcagggcgggagggaggcagaaatgcgatctccctcagctctgttttaacgttggtgaagatatgcctcgacggacagcaagggggagctgttttcaggcaattttacaaggaagaaaggaagccgtttctgcagttatctgctgtgtagatgcaggagcatgactttgttggtcagaacgtttcagtattgtggccgtggtataaatttaattgcctcagaaaaatatcaccctctgtgaaacgtaggcaaaaaatgcaaaagattttattcattgcagttctcagtaataattccactttactatccagtccgttcatgcagagttaccaaggttgtcacgttgagatgctggacttgaaatctggagtcctgcttcctgtggctagataatcctgggtctgtgcgtcttataaatggaaatgaaaggacctgcctttcctgttgttgaggtcatcgggaagatcaagtaagacaatgttctgtatgggggaaatgctctaaaaactgaaagctgtgttgtgttggttcattttctccaagatatccaggaggcagaagattgaaatggttcagggatggaaggtaataggtaaaaggtttccagaccacctgtctggaaaaaatccttcaagcaattaggtaatagtcactgactcagagaattcactttcttttaagtcacaaattacactattagtgctcctgatgagaaagaatgttgactgaacctagtgtctgggtattgcaaaagtggtttgttggccacagcctagtaattttgtggctcttggccctacacacttgagcttttaggtttttttcaggagaggaaatctgcaatacaggctcaccaatatctctgtggaggttcttattccaggagatagggtggtggcctctcaggaaatcatctgtgtcagacaatctgatccaattataaaactatatccaattatccaaattataaaaataacctctcaagttatgttggtggatacagttggaagatattattgttcagtgacaacagtaccaattatccatatatatcaaatgtatatatgcttgatacatagatgtatgtttatatgtatgcatctggccattctatgtatcatgtgtcaatcaatcatctatctatctgtctatctatctatctatctatctatctatctatctatcatccatctatctgtctctcgctggttgtgctggatgccatggggcctggaaagcaggaaaaaaaaatgttcattgcagattgtagaaccagtccctttgtttaatccatatagttttaaacatgtttttgacttaatttaactggttttatatacaaaggaaagcaggactattacatatgaggcactactcatatgcctcactggacctgctattaaattaccccatagagagtaaaataattgtggtcttaaaatatgaaaaagaaaacacaacagacaatattttatgtggcaccttgtgctttttcttagagcaatttacattttctctgtactttttgtattattaagacttaccttttccctcttactctttgtagacttcagttaacaaattttaggggtgaaataatgaaaaaaataaggaagttgtgcatacatatcctggaataatcattctctttcatttaccaatcttctttcctttcacttcataattccagatatttgagaagtacttcagttcatggaagcagctatctccttcacttactagcagtaagactttgttttcatcttcgagtttcaaattcttcactgtaaaatcttggtgattaaacacaatgcagttgctgcaaagattatataaatggttgtttaaatttctggcattttatcggtgttcaaaacattttctttttttcatacatgtaaatcctccaaattaccagctattttaccattaacattttcccttccaattaaagcaaaatattcccaatttacatatgtgcaatgagaagagttttatggttaaatatgttggagaagtgctgtgtatgcatcccaccctctcctggtgatttatacataaaaaggacctgagaaacttcagaaaagaaacttacttaaccttgttcatcaatgttttccaaggttattttaccatggaaactccccatttttttactttccccatggaatggtgatgaacatgtcacaagacaaggtgacagagcaggagcatcaccatcctgccattttaaagttcaccttgatcaaaaaccacctaaatccaaagggcatcagcctaatggctaaggccagaatgaccatgagccacaaataacatctcttaccagaaacattccaaacccctccctgaccagagacatatcagccccaagataacctcccctccaaccagatacattccaaccctgcaactgacttctccgttatacagaaacattccacgccggtgataagttctctcacccttaaaccaattaatactcttagtctgtaacagagaatgctcctgactgaaattggccagaagcccctctcaggtttattctccaaaataaacctgtctttgaatgttgagccactttttgtgtttctttgcatatttgattgcttcttctgccctattgtttaagtaaaaatgca

SEQ ID NO: 915928 - DNA, 4001 bp, Homo sapiens
ggatggcttccgaggcaccccgccccgccttcccaccacgttctaagtgctgatttctcccagggacctgaaaagaaggatgaggagacagaatccaccagtgtggcctgcccgagctccacgtagcaaagcctgtcttcagtttctcatttttgtccctctggtgtctccctctgccccagtcccctccccttgacctccactgccaagtcatcctgtcccttcacttctgaccagtctgccgcattggccactgccacagccgccgtcaccagaaaagcaactgctaggtgctagggatgcagtggcaagcaagacagggtcgctgccctctcagaggggagcacaaaacgcataggaaccaggtatgttgagaagttacagtctaatgcagagaattggctgacgcggaggacggatcccatagccaagggtagctaaaaagccctccttgatggagggacgtttgagcaagaactgagtgaggaatggcaccttgcgtgaagacctggggtctctgcaggccgtgggcagagtcaggcagctccagggcaggagagaggggagaaagaagggagacgggggcccagcaggtttacagtaggaagaggccagcccggctagtgaaagagctaagggttttgttggttttttttgagacagtgtctctgtcacccagactctagtgcagtggcacaattatagctcactgcagcctggaactcctgggttcaagcgatcctccggcctcggcctccccagtagctgggactacaggcgtgcagggcccggctaatttattttttgtagagatgtggtatcttttgttgcctgggctggtctggaactcctggcctcaagcgatcctcccgccttggcctcccaaagcgttgggactacaggcgtgagccaccggccagagttttctgagccccctggagatctatgcgggggtgggggacaagggggtctggcagaggcggtgaaagaatctgacctttggtaaaaggccactcctaccgccccttccctggtgggctgcggaaggctggggaggaagcatgaacggcagctggagactgtctccgtgctcaggatgccgggcggcggcggcggcggggtcgaagcgagatgagtctcaggtgtgcgagcaccgcgggctgtggacgagaggcccgggcgggcggcggtgccattcaccgagaagggcgcacagcaggtggcttggttccgtcccaggaggtttcagcccaggctgcgccgcggcccgggtggcccctgtcccgccgcgggcgtccccaggcgctggccgcacggcctcgccccgccgccctccgagccgcggagaccccagagcccggctctccacccgccgcggagcgcacgaccccgtctggtggggcgcgggtcctgaggctgcgctcggccttgggcggcagccgcctcggatccccacaggactcggtgacccaaaacgccctggcgcgggcagggggcgaactctggttcattctttcaacgcgacagtctccgaagggctgacggcagcagagacccactctgcggggacccccgggccggggttggcagcagcgctgcgcgtcgggcgcgggcggcccaggctggcggggtctaccgcgcccggctccagcctctgtccccagcctggagaaccgaagccgagcggcccgtgggccccgagccgtgcccgccgaggccagactcgcgccgcacccgggcggggccggcgtcctcgcggggaccctgggggaccggggagcgggccgcggggtgcaaaggcacggccgccctggcgacgcccctccctgcacggtgacccagcctccctcacagcagcggcgtcccggcccccaacctacctgagcgtgacgccggggtacgggcgtggagctcgtgcagcggagccagggcggatggcgcccaggtgcgcggagctctcggggctcgggagtgggcggggcttctggaggaggtgggaatttggggcggggttctggcgggggcgggtttggggcctccccggacccagccgcgggtctccgcagcgccggaggctggacgcacgcgtcccgcgcccggtcctggggtccgcacgagccgggtcgggcagaggctgctcctcctccccaggacgccggcgccacacccgccccccgacgcgtgcggcgggacagaagcggaggcgggagtgctgggaacagcctttactgcccacgccctacacggcgaacatgcgcagagcctcctccgccgagcggcactggttcagctggatctgcacctctacggtcaggggctcagggtggtaatcgccttcgtagatcggaatcacggctttcggcttttctgagaaaatttaagtgcgagcatgagccccgggagacggatgggctggcgttctcggccgccctgacccatcccatatgcaagccctggaccctgtcccagcgggagcacagttttggtcctcgggtgttaacagtaataagaaataaaattaaattgtatttaattagatcatttaataaatcgcagctgtttgagttgcaagactggctgctttttgctttgagacagtgtcgtgctccgtcgcccaggctggagtgcggtggcatgatcccggctcactgcaacctccgcctcccaggttcaagcgattctcctgcgtcagcctccaagtagctgggattacaggcgcctgtcaccacgaccggctattttttgtagttttagtagagacggggtttcaccatgttggccagcctggtctcgaactcctgacctcaagtgatccgcctgcctaggcctcccaacgtgctaggatcacaggcgtacactaccgagcccagctgcagatattttcttaaaaatgaagtaattatagcacttcaggggaaacaactgaaagcatttcaataaatgtataacatttgccctaaaaatgagacaacattgtatctgccaccatgaatttaccaattttccaatacgcaaagacctttctaatgatgtgggtggtgatagtaaagaacgtgatctttggaaaatgtatagtgacaggtgtcaactgttggaatatctgcataagtctgttaacctgtagtttacaagtaactcatgcatgttacaaactgcatggtaaaatatccgttcaaaatgcaaactagattaatgaattttaatctgattatgaaaaattcaatatagattgttttcacattgtaacaacctttaagaaattaccacttgtcaaatttggtgtaatattaaagaaattatattattttaaggtctattaaaatactccctcttttccaattatgggcctgaggttggattttctttgtgcacgtcaattacagcaacatattgcaagcagttgactgcagaagtagctgtaagaatccagctgtcttcaattaagccaaacattaaagagattaaaaaaaaaaaaacctttttaaggccatcttaacccacagataagtatcacaaatcacatgttcatataggcatgggttttgaagtccagcagcatatgccctccaacgtttacttcttcaggctggcgtgaaatggcgcgatctcagctcactgccacctctgccttccaggttcaagcgactctcctgcctcagtctcctgagtagctgggattacaggcacccaccaccgcacctggctaatttttgtgttttcagtagagacggggtttcaccatgttggctaggctggtctcgaactcctcacctcaggtgatccgcacgccaaagtgctgggattacaggcgtgagccaccatgttgggcctgtttccacttttcggcttcagtatgatgggttgctctgctatgatcgggcctcatgctttttgcagccacctcccacggcactccctgtctcctttctctccctcccagttggttgttctttctgaacctcaaacctgagacgcacccatttcagatgcttctccagctc

SEQ ID NO: 915929 - DNA, 4001 bp, Homo sapiens
tttgagcccgtcccgtcaaagcttgccctatggcctgccctgaccaccacctaaccaatggttagtcagcaaagaatagattatttcccccaaaactccccagttacagtcttctgaaattcctagagtcccttctgtcctcacttcccacctcctaagccgccgtttgagcttaagtcccccattcatcagaggttcccacctcccattccaatcatctcccattcttccccacccaaccttgggctctgccacccccactgtggctgaggtcatcctctgggaccctcctccctacctggcaccaagatgctcctgaggggctgaacttccacaccctgtagggggtactggagcggggagttggcaggggctatgagcagctggtcagctggggactggctcctggcagtggaggaaggagaggacagagcagagtcggggggagagggtctctccctcccggcacaatcactgctctccccctgaggagtcatgcgcttctttcaagctggtacctcgacagaaaggcctggaactcctgctctcttgtggcagaggcagccctcagctctgcagggtcaaaggccttggtgaggtcaatagctcggacttgtttctggaaggggagggggaggccccccccactggactcacaactgcagttgttccaagccagcagcctgaagggggtaggtagtgagggtcatcagagcccagctacacagctccattcatcccataaacactgacacagcaccccacaccttggccctgcaattctgtctgtctaggctctgtccccttaaatgctgcccttcaaatagtcctcgggagggggaccaaggatcggatgacctatcccctaaatctggattttagagttgtaggatagggccaattaccaggatttcaggagctgcctacccaccaaccaggaccccacctggagtctcttctcatacctgaatcaggacctcagggagtctttcagggccctcccttgactgcacaacctcccacgcccatccccatccttatccccatggcaaggttcagggagaacagattttccccagcccaagcctcagcagcctcccacttccacctcccacttcactccacacagcccgttaggagaatgcaggcatctgagcccagcagtggagaaaacaaaagcccccagaccacccccagcgagcgctgcgctgcgccgccgcggtcggcactcaccccactacttgctccttgatcctgaccgggatgtgtgcgtagcggggctcaggagcaagatctggcagctcgggcctgcgggggctttgcgggggcgcccacggcgcaagaggtagccggaggccgggcgcgtcccgggtgctcgcgtacaggagccccagcgaggcgcaggcgagcagaaggaccagagcgcacagggcccggcggcccagccacatcctaggtgggggtagggtggggagtgagaaagggagggaagaagggagggcaagggatggggcccttggcccccgcgtcctcagaggctcctgccggctcccaagagcgctctccactccacacatcgcgctagggtttgcactgccagccgcggttttcccggtacccctcccctcacttcccaggccccagggtctcccggcctcctttcttctcgccctctcctgcatctcggtttcctcacacacccgaggcctggcatcttaatgctgaagacatttggatgccgcggtttcgacgcggccgtgcgtaagcggaaaagccccgctctatcagggcagtggcagtccccaagcccgccgcccgccctggccggcgcgcccccgactcctcagtctgagcatcacctgggccggggtgggctgcggagggcggctccacacctagcctgtcaggaaaaaatgcagaatcatgcccgtgctggcgggcgcccccggcggaggtgacccgatgagtggcctcggcaagcggcgcgggggacagagtggaccgggaagcgcgcctcctcccgcctcctcccgcctcctcctcctcccctcaccaaccaatcccacccccacccacccccgggcactgacctgtctaacgctctaaggcagcggcaaaatttcggtccgggctgtgccgggctctcgccccggcctgagggtcctcatggggctgggggctgcccgatgggggagctgggcatgagcctgagggtgtgggggaccctcctgcctctggagcgcgcccgatccctcccgtcttggaactcccggggcttttgtggagcgcggcgcggtggtggttctgggcgtttcctgcccgggggcggttggcggggcgcgaggaccaagttaagagtctgttgcaccccagccccggggcaaagccggggatccctggctccgcgtcccactggcagcgcggggagggctctggccgccgcccggctcttcgcaccgcagcgcagcgcggctcagctcccggctcgttgcggctgcttcggctccgcgcggggaatgcgagcgccccggcgccttctagtgggcgcggaggaaactgcgggggcgcggagcaaacgcgggaaggtcctcgctcacagcccccagtccttagcctccaaacactggcatctcaaccgcctgctcccacgacatccattccattgcctgctcgttctgagcttgtaggcaaggatgggcaaataagggctttgggaggaggtagggcgggggcgcgctaaaactcaagtcaagtttgaatgttaggatgaagataaaggaaacaacccctggaaaataaacgctctgcctggctaacaaagactgaggcacagcctccctctccccctcctccccgccctgccccccattatttaacagacactcaagagatacacactgggtaattgaaggccctatttccccgaactgccgcttggtgcaaccttgcaggaggaagggaaccccagagaggccagattggcggtagttctgcttgcaagccttaggtcatagcctgatacctcacattgccgagaatcggagttctgtggctccgtggttctaataaaagatgcatcaagattcaataggaaaaaaagatataacaagaaatatagaacataacgaaaatatgtgtgtgtgtgtgtgtgtggtggattattgaatgaatgaattttatacaaacaaatgactaatcagctggggtgaaagtggaatctctacacttcttacaccaaaattccaaatgtattaaatattttaatattaaaggtgaaatcataaaagtagtgaaagaaatcatgaaacccggcgcagtggctcatgcttgtaatctcagcactttgggaggctgcgataggagaccaggagttcgagaccagcctgggcaacatggtgagacccccccccccccccgtctctacaaaaaatttaaaaattagcccagcaagatggctcacacctgtagtccaactacttaggaggctgaagtgggaagattgcttgagctcgggaagttgaagctgcagtgagctgagatggtgccatggcactgtagcctgggtgacagagcgagactctgtctcaaaagaagaaatcatggaatttttgttttgtttatgatcttggagtagggaagagatctctaagccagatgtaaagggaaatattaataaatctgactatatgaaaaacttgagtgaagaaattaacatacactaaatttgagagagaaatgacaaactgtgaaaaaatatttgtaacatataagacaggtatactttatctggttggtgcccccagcggagatgaccaggaatgaattatgaaccattgaaaacataggaatccatgactccacactgataatacatagataattaattaattaattaattaaatgaatgaaggagaagggagaatgccaattaataaatgtggagggagctgatggagttggaaaataactattttttaaaattttattttattattattata

SEQ ID NO: 915930 - DNA, 4001 bp, Homo sapiens
aggcagccctcagctctgcagggtcaaaggccttggtgaggtcaatagctcggacttgtttctggaaggggagggggaggccccccccactggactcacaactgcagttgttccaagccagcagcctgaagggggtaggtagtgagggtcatcagagcccagctacacagctccattcatcccataaacactgacacagcaccccacaccttggccctgcaattctgtctgtctaggctctgtccccttaaatgctgcccttcaaatagtcctcgggagggggaccaaggatcggatgacctatcccctaaatctggattttagagttgtaggatagggccaattaccaggatttcaggagctgcctacccaccaaccaggaccccacctggagtctcttctcatacctgaatcaggacctcagggagtctttcagggccctcccttgactgcacaacctcccacgcccatccccatccttatccccatggcaaggttcagggagaacagattttccccagcccaagcctcagcagcctcccacttccacctcccacttcactccacacagcccgttaggagaatgcaggcatctgagcccagcagtggagaaaacaaaagcccccagaccacccccagcgagcgctgcgctgcgccgccgcggtcggcactcaccccactacttgctccttgatcctgaccgggatgtgtgcgtagcggggctcaggagcaagatctggcagctcgggcctgcgggggctttgcgggggcgcccacggcgcaagaggtagccggaggccgggcgcgtcccgggtgctcgcgtacaggagccccagcgaggcgcaggcgagcagaaggaccagagcgcacagggcccggcggcccagccacatcctaggtgggggtagggtggggagtgagaaagggagggaagaagggagggcaagggatggggcccttggcccccgcgtcctcagaggctcctgccggctcccaagagcgctctccactccacacatcgcgctagggtttgcactgccagccgcggttttcccggtacccctcccctcacttcccaggccccagggtctcccggcctcctttcttctcgccctctcctgcatctcggtttcctcacacacccgaggcctggcatcttaatgctgaagacatttggatgccgcggtttcgacgcggccgtgcgtaagcggaaaagccccgctctatcagggcagtggcagtccccaagcccgccgcccgccctggccggcgcgcccccgactcctcagtctgagcatcacctgggccggggtgggctgcggagggcggctccacacctagcctgtcaggaaaaaatgcagaatcatgcccgtgctggcgggcgcccccggcggaggtgacccgatgagtggcctcggcaagcggcgcgggggacagagtggaccgggaagcgcgcctcctcccgcctcctcccgcctcctcctcctcccctcaccaaccaatcccacccccacccacccccgggcactgacctgtctaacgctctaaggcagcggcaaaatttcggtccgggctgtgccgggctctcgccccggcctgagggtcctcatggggctgggggctgcccgatgggggagctgggcatgagcctgagggtgtgggggaccctcctgcctctggagcgcgcccgatccctcccgtcttggaactcccggggcttttgtggagcgcggcgcggtggtggttctgggcgtttcctgcccgggggcggttggcggggcgcgaggaccaagttaagagtctgttgcaccccagccccggggcaaagccggggatccctggctccgcgtcccactggcagcgcggggagggctctggccgccgcccggctcttcgcaccgcagcgcagcgcggctcagctcccggctcgttgcggctgcttcggctccgcgcggggaatgcgagcgccccggcgccttctagtgggcgcggaggaaactgcgggggcgcggagcaaacgcgggaaggtcctcgctcacagcccccagtccttagcctccaaacactggcatctcaaccgcctgctcccacgacatccattccattgcctgctcgttctgagcttgtaggcaaggatgggcaaataagggctttgggaggaggtagggcgggggcgcgctaaaactcaagtcaagtttgaatgttaggatgaagataaaggaaacaacccctggaaaataaacgctctgcctggctaacaaagactgaggcacagcctccctctccccctcctccccgccctgccccccattatttaacagacactcaagagatacacactgggtaattgaaggccctatttccccgaactgccgcttggtgcaaccttgcaggaggaagggaaccccagagaggccagattggcggtagttctgcttgcaagccttaggtcatagcctgatacctcacattgccgagaatcggagttctgtggctccgtggttctaataaaagatgcatcaagattcaataggaaaaaaagatataacaagaaatatagaacataacgaaaatatgtgtgtgtgtgtgtgtgtggtggattattgaatgaatgaattttatacaaacaaatgactaatcagctggggtgaaagtggaatctctacacttcttacaccaaaattccaaatgtattaaatattttaatattaaaggtgaaatcataaaagtagtgaaagaaatcatgaaacccggcgcagtggctcatgcttgtaatctcagcactttgggaggctgcgataggagaccaggagttcgagaccagcctgggcaacatggtgagacccccccccccccccgtctctacaaaaaatttaaaaattagcccagcaagatggctcacacctgtagtccaactacttaggaggctgaagtgggaagattgcttgagctcgggaagttgaagctgcagtgagctgagatggtgccatggcactgtagcctgggtgacagagcgagactctgtctcaaaagaagaaatcatggaatttttgttttgtttatgatcttggagtagggaagagatctctaagccagatgtaaagggaaatattaataaatctgactatatgaaaaacttgagtgaagaaattaacatacactaaatttgagagagaaatgacaaactgtgaaaaaatatttgtaacatataagacaggtatactttatctggttggtgcccccagcggagatgaccaggaatgaattatgaaccattgaaaacataggaatccatgactccacactgataatacatagataattaattaattaattaattaaatgaatgaaggagaagggagaatgccaattaataaatgtggagggagctgatggagttggaaaataactattttttaaaattttattttattattattatactttaagttttagggtacatgggcacaatgtgcaggttagttacatatgaatacatgtgccatgctggtgtgctgcacccattaactcgtcatttagcattaggtatatctcctaaagctattcctcccccctccccccatgaaaataactattttgcaaccatcagagtaaaagttggtttgggcaagaattatcaatgaatgctaattctagggggaaagtttgacagaagcagcttatgtacgtagcttaaagtatctccccatagttggcttattcgttgcaagaggaaaaattgtaaccgcgcagtgggaaaagcagacagcaccttgacttgctggccaaaattaacatcaccaatgagggacagaagaatatcatgtgcctccagaaatgttccccggagaaagcatgacatcatttatgtagtgatgtggctgggaatacataacttgattttaaatacaaagaaacagacagaccccaagtaaggaatattttctctgtataaaagaaacaggctgggcacggtggctcatgcctgtaatcccagcatt

SEQ ID NO: 915931 - DNA, 4001 bp, Homo sapiens
gaaaacacaccggaggtaaaagaaaagtgaggagagggagaaagggaggttactgattccaaggtcacaaagcaactgcctttctctctgtttttaatttgtgcacaagatcccactggctaaacaaaatgatggctacactgggaggaggtgtcgcctcccaggcccccacccacacacactccaaaggagctcatccatttgggcctgagtggccatggcgggggagaatagattcactctctgtctttcagaaggaagaacaaggcccagaggagggaagaattcactatgggcggcagattttggtcatcagaggaaggggctctgctgcttggagtcgtggccccggggtggaagctatggcttcctggtgatgtgctgagctctctggccctggaaacgcttgcgtgcagatcagtcttcgtatccagactgaaagacaccttggagatcatttggaccaaaggcctcattttcacctgagaagctgtcgtttttcccttgattcccccgctagttagtggcagagccagtctcctctaactcacagccggaatgatttccatcaccacagaaaggttaggccataaatatacatttccaacctgaaccagctcagcgactgtccctagtaattctctctctttggccacaagagaaggcacagcaccacacccaactctgggtagagaagctgacacgacgacaggtcagagtcagagtatcttctcagctgcttgctcagccactctgtccgagtttccccaaagcgggaggaaagtgaaggcatgggaggccacgtgccagaactttgaacctcggctccccgggcttgcgttgggcacctggtagtaacgggagtttctccatttcttttcccaactattacaggatcttttacggcccctgtcactgtcagttttactttgttaggcccatccacagtacgttgaaaaccacctcgcacagccatacctattgatgtaaaaaggcaaagagaccacgctctcctgttttcctaggaggaaactgaggcacggaaatattaagtggctttggctaagttaaaaacagaagtaggaatctacctgctgcccggtccactgtgctgtccatcatctccttaaactggggagtttggtagatttgctcagggttcagaaaagtggcagaaggggcggcccgaacaggagaaagagggcgcagcgaggaggtgggagattcaaagagccgaggacggaggctgggagaggagcgacgtatgggaagcggggaagagacgggactctccgaggtatggtaaaaaagaacccccctagaagatgcagcaggagaggaaacggagtgagccaaacagaaggcggtgggcaaagtttgggctgcgcggactggagcgcgcgcctgggtgtggacggccgagggcatcccgcacccgaatccctagctcgcgcgtggaccccacggacctcctccccgggaaccgcaagcccggagcggctggaggggcccggtctccgccagcgtctcggcgggacgggcggggagcctctctccgggtcgctctccgaggggagacgcgaggagcccccagggtgccccggacccacgtggccggcgggcaggcccgggctcgggaattctgcgctcggccccgcggcttcccccgcccgcagctctccccgagtacgcgcggggcgacgccgggcacctgagggagaaatgggtgggaaatcgggtctgaggatgggatgagaggcgggtccccccaacgcaggagccgccgccgccgcccacccccgcgcccttcgcctcccctgggtgctacttactccggttcagggggttcccgccgacctgggccgacgccaccagttccagatacagagtccagagccccacagacaccacggcgagcgccagcagcagccggaagcgcctccgcagcagcttcaccgggcgcaggagcagcgggggccgcgcggcccgggggctccccatggcgctgcgccgaggcggccgccgccagcgcgggctccaaccccccgagccgccgccccccggccgggccccgcgcccagggcgccccgcgtcccggcccagcgtctcagggctgcgccgaggccgtctctcccggccgctctccggcggggctcgggctcatgctccgggcgcgaggggtctccgggctgcgcgggcgcccagcaggtctctccgggagccgagcccggctcctcctccgcgcgtgtgttccgcgccgggctctcctccccacgcctctcccgtcgcaggctcgctgccgccctccctccctgcgcgcccgccctcactcgctgcccagaaggaggcttccccggcgcccgcccgcctgcctccgcccgcgcccccgccagccccggaccgggctccgggctctgggctctcctgctcgcggaacctggcccgcccccggccccgcccccgcccccgccccgggcacaggtgggctccgcccccgagaagccagggacgcgaagaggccattcggcttccctaggggagcgagaggtggggccagagaactggtgcctggtgcctcccccgactgggaacgggtgggatgaggagggggcgagtgatgatgcggactctgggtgaccgagggaaaccgagtcaccacccaggcgcctaacggtgtggttttaggcagaagcgaagtagaggctggtttgggcgacgcccaaggctttagcctcagagcctttcgtcgccaacagcaacgacccgactccctgcttgacgaaaccagtaggcgtgaaatatcacgggagccactggacgcttaacgcagacatagcttcgttttccagttgagatttgaagacctttcttcccagcctgaaccacatctccgagaggcgctggggaagtcgtacagcccccacggtgaaccccagcaagcagttttccccagactgggctggaatggctgtttgaagagagtaggtgtttgagggttccgaaaaagaattttaaaaagaaaagaaaagtattcactcttagagttgaaaagatcagcaagataagccaggcacagtggctcacggctgtcgtcccagcactttgagaggctgaggcaagaggatctcttgatctctggaggtcaaggctgcagtgagccgtgattgcgtcagtgcactccagcctgggcaacacagcaagaccctgtctcaaaaaaaaaaaaatcagtattccagtcctctgccttcaggcaggtaaagcattattatctgatttaaattagataaagtatcaaggggcagaataactgccccaggtcactcagcaagttatactgcagttttcttttccattatctcttctgggaaaaatggtcaggagactatgggaaaagtgaaggatcaaagtgttcctggacattttaaaatcaaatgaatatcacacaagtactgttccaagacagaggttctcacagaattgagaactatgtttcccttctctctgttctcacctcagttggatattcaatagtttctacaggacttttcctaattagcctccccaactccaagcttcccatcgcatcctgtccactaccaccagatggtcttcataaaaagccaggcatggtgacacacacctgtagtcctaacttactcgggaggctgaggtgggaggagtgtaaggttgtagtgagccacaatcatgccactgcactccagcctgggtgacagagcaagaccttgtctcaaaaaaaaaaaaaaaaaaaaaaaaatcccgtatgtagtcacacacctgctcaaaaatatttaatggcttccaatgcttattgattaagatacacactgtaaatccagaattcagggccttccagaaccttttccaactttatgtgaccacatgaaacctgctccagctaaaacgagtttattcactaccctccaacacattttcttttctagttggtcaacttgtaccctttatccaaggtccatttcaga

SEQ ID NO: 915932 - DNA, 4001 bp, Homo sapiens
ttacaggagaaatatcctgggattatcaagtgaaaagaaagaaaaaaaaaatctgggcacgactttgcagggaacagaggaaaagcttaccaatctccaagaagaataagaggggagacgttcttttatggattaaagagtaagtcatatgataacaaactgtactattctaattagttgattctgcagaaggtagtatctccagcaccccttagtcaaataacaagcttcccacaggggctgcccttaggctagaatcaccaccaaggactgagttcaccaatctcagtctgttaatcagtccctacccccgacacacaaatccatctaatagttaaatcttcctcaccccttcctcttcgtccatttcttagaatctacccttcttcacaagctcacttgctcaggtgctctgcaatatagaaactgtcataataactatactaaagtaggaccccaagaagctactcgtgccacaaaagctctctagtctccctgacagctctctatgctgagggaatttgcatcacttacatagagcgtaccccgctggtagataactgagtttgcttctctatgacctctagctaaagggaaaacaaaacgaaaccagacaggaagacagagatgttctggagaagggattgggatacgtgagtcaactgaagttgactacttccagttgacaagtttacaaaaaaaaaaaaagtccaacgaaaggtctctcgggccacatggttggcaagatccaagcttgcccagaaggcttcagaaaatgaaaccaaatctgattaaaatggacatttcaaaacaacaagacacgcagcagcaaacgcacagctgccatttcccggccacttcctgcgggaggctgggggaggggctgtttgtgtacagatagaggtggaaagctatcccctccgtcgtcccccaaagcagacaaatctctcactccaattaaccctacaaaggacaactgctattgacattgccttctcctgaaaactgggaacaccgggaaagaaagggatgatgcggtatcatctttctgccacggaagcggggatcccctcagtgaggaatctccttggaaaaaggaattcctctttattcttcccttctgcccctcagcccagctcaaattggaaagcctcagcggaagccctatcaacctccatccccggagtgcgcgattctcccgggacgcgagggccccaagccaagcgcagcaccaccctcagcaaggaaggccctctcctgatcttcacgctcaagagaatgggtgcgctccccgagggagacaccctcagacccctggaaaccccttccgccctccactcaccacagtcaaaacgcccagctccccgcaaacggagcgttttaacccgccaagggaaccccctcacccacccctcgcgctcaggcaatccccacccccacccgaggaggtggagcccctcccggggattccaccccaagtcccccacaggagtcatctccaccagccaggcggcttctccgcctcctcactgtcgccgggagcccctacagctcctcctgcccccgcggccccgtccggggtcctcagcagccccaccagccctgttctcctcccagaccccagagcaaggagaccctcgcctcgggttggatcctcgcaggaaataagctcccgtcggcttcccgccccggcaaggctcaagccggctctggagcttctgttccccgagggaagcctcggatgaaagcggggctccctccccctcaggcccctggccacagaccccacaaacctgaggcagcggcgtccagccgggctcggggctcgtctctccccggggtacaagcggttcacatggccgcgctccgggcgccagaacgggtggagacgcccgctggggagggggtctggggtccggggttcgggaagggggagggggacgcggctcaaccgcggggcccgagaggagccaacatggccggcgggggaggagtgagtcggagccggagggggcggagaagcctcggccgggagagagtctccccacgcggcctccgccacagggtcctaaagcccgccagcccatctttccgacccggacctgggtcctagcgccgctgtgcctcctgcaactctggccaccttgcccacctggcagctccctctgcacccgcatctcatggaggcagtggtcctgcttcacacagggcaaactgaaaggcatgccacagtcccaaggttaacttaaaagactagaccaaacgtctaggcccaaaggcaggtgccacttctctaacaggctggtaggggtaagagtcaggggaatttcgggggcagttatttcccaggtagggtaatggaaacgtggaaatagaaaggttagtcactcaggtcgcgattcagtaaagggatggggagaggcaagagtcagccacccactcacctctgtcccttcagtgcagcctggtcctgcctggatcaccactttcctggcgacatctgcagggccctggtcaccggaaaggaaagattcctgtgcgtgggggaaagaaggttcggctctggaaccagacagcaaagacctgagtgtagcctaaatgcagtcagagaagtaaaggataagctgaaaactaatcagcaaaaagatgccacaaatgtccacccattctatggttctgggaatttttttctgacagggctacataactgtgtgaaaactcagaaaagtaaaatctagcagaggactagagtttggctgtcacctaaaatgtccactgcagggcaccaggatgaagaacagtgtcatatgatgttagagcttagagaatttctagttcaggccggacgcggtggctcacggctgtaatcccagcactttgggaggccgaggcaggtggatcatgatgtcaggagttcaagaccagcctgaccaacatgatgaaacccggtctctactaaaaatacaaaaattagctgggtgtggtggcgtgcccctgtaatctcagctactcaggaggccgaggcaagagaatcgcttgaacctgggaggtggaggttgcagtgaactgagatcgcgccattgcactccagcctgggtgacagagggagactctatctcaaaaaaaaaaaaaaaaaaaaattctagttcaaccttctctccttcatcaaatgaagaaattaagacccaaagaggttcaatgacttcttcaatgtcaaacagtggataaaatatgacaagaaaggaaaccaggtttcctttccttgcaactcaacactttgcagccttgaagataattcccatttaattcaatgcaatgcagttctagaaacagttgcctaaactgtgcaaagctcaggctgctgaatattctggaaaagcaacagagtggggatgatgaaactctggcaagttggggtgtcaacaaatacgttttcctctgggggtctgaggaggaaagagatctgaaaaatgggcagagttggggggtgagatccatcagtctacattggatttccttactccacagaggggtgggctcttcctgaattttggggaaagactccacccctccacccccccactacaaatggctcagagaggataagaaggaagctagctttagcaaaggctcacagagtgtgtgggccacagacacagaaggctaagggggtttctcttcctctctcgagataagtagattaccagtggagggaataggcaggtggaaaccaaaacccttctctcctccctgtcaaaacaacagatttacaggtcaccttggggaaaaaaaaatactcctccaacagcctgctgacctcaagtccctgagtaagtagaggtcacactcagggtagaggtttccttccttctggagaaaggagggctctggcaaacttctgctaagaaatgcctctctatccccaaataaaaaattaaggcaggtgaagaaaggcataaaactgaggcctcaagggcggcgggatgggggtgtgggtaagg

SEQ ID NO: 915933 - DNA, 4001 bp, Homo sapiens
gtccttcccacctgggctcagtaggcggtgctgaggttggaccccaagctcccggagatgtagggtggggtgaggactacagaaaaggtttagatgggacttagctgaacttaaagggctgagcggagcagggacagatagtgctgtcgatgttgctcccccgccccccttactacggggaaggagaggagttggggtgggtatcccccctcccattggggttaggaaggcgtgggaaagcgctagttcagaggggaggaggcgaaacccagaccgcgggagatttttctggcgaagaaggcgcgggggagggggagatcctgggcccagaataggaaaggtactcgggagacgatggcggagaggcgtgagaagcctccggattccggtcgcggaggacagggggaaaatgggcgagtagatagttcaggggagagaggaagggcagctccctcagggggagagtcagatcccgaatcccggggcagcagggatcccggggcaggataccgcaggaacggcccgccaagggactccggagctggaggtgggtgccgggcctcacctggagcagggccgggccgcaggcggcggcggcggcggcagaggcgcaggtggccgagccgggcggcggctgcgcctcctcccccagccctgggccggcggcggcggaggggaggaggtggtgcttaaaggggcaggaactaccgaggtgaggacaaccgctcaggagagcagtcgcgaaggatccactgggggagaggatagcgggtggcgtctcctaggggccagaaccaggaaggatcccagatgggaggaagagaacggatcccagaaagagacagaaacttctgcggtgaagtgggggatggtggtaggtccgaaaggaaggacttgggagagctctgcccgcgctcccagggcaccagcaaagaccgcttcacaaaagaggccggggaaggcagaaagagctacatgggctcctaggaggcctaggggtgcaggagagggaactcaaggccgagcctgctgggggtcacgcgcagcgccctactaggtgaactggttccccgtgtttcagctcctcagggctccatccctacggctgtggggcctttggaatcaggaagccacgaaggcaaaaacctcctatcctctcaacctcaatcctgcgtcccactcagtgccctcagtgactgtagtgtgggggccatcaatagcagccctggtgaggctgatgtgggaccatgagaatcgactttggttcagttttcccccaaccaccaccacccttgcttcagtctctggggcaacaggaagcagctgctcagtgcagcccccacctgaaggtgggtcaaggtgggggaggagagaagacagacttaaaaggccttagaaaaatgagagggaggggaggcattttaaagaccttccagcactgccaaaagccggctttacttttgtgggggctagcagtgagtactgtcaaaatttccttgaatctcaacagcttaaatggggaggagcaggggcaatcctccacggggcggcggggagggggctgggaaagccctggcctaagatgcgtctcaggctcttccttagaactggggcttgcccatactcaggatcccgtggtcggcagcctcgctagctgagccctgtgccccccgtcccccagagtcctgtttcctctccttcagcccccaaatgagcaaaggttaggccccacccctgctgagtcagccagggagggagtaggcatccctcaggccttccccggggctggtccccatactcacccatgtcaggctggcacagctccaggctgggaccacccagctcctcactgtccttgggcctccacttcacgtaaaggttggtgttggatcctcccaaactgtgagctgggaactagcaagaatcaaaaagccagtgtatgcttcctgcgaaccacacagcctgaactgctgtagggtgatgtccctgtgtgacagactggggtggggagggaggagggaagggcggggctttctctgggtggagagagggaggaggcgaggacagggcagaccaggagaaatatggaggaaggttagagagctgtgttgacactccagtggcatggtagaagaggccggcaaagggggaaggaaacaaatagttgcagctactgagagggagaaggttctcgataaacgctgaaggacgtgaacatgttgggggaaggggtggagggatgcaaaagacctttaggatttcagttcccaggtctgtatcgggtgacgtgagaaaacaaagcagaaagggctgacctgtaccctagggctttttctaccagcttcttacccactccagagtcaggacctagaggaagtgtccacacccccataactcagcatttccccaaatcccagcttttctgggagcaaactaccagcacaagcagctcaggggctccaccttctgtccagatcatgacacaggagagactgcgggagaggctgctgccaaggacgtcacaggcagatggaaggaagcttagaggcccctactccacccctggccccgcgccaaaaagccctccccaaccttcagcccccaggggcctctgaattggagctcagcttgtccccgcccagcttctacctaacttgatggactcagcgggtggagcttatagatacaggctcctccccaggacaaaagccccagctggtctgtaaacagtctttaactgagagccacatcccagcaaatggccttcatggatttgaaaatgggatcagagttcttgcagagtctccagtgctaccgcgagagggcagtcggatgggtctggtcccggaaaagaacacaagaggaacccaatctgaccttgcacgcttcttttaaattgaaatggtaaaatatatcttctacccctgcacctctcagtcggctaaaatgaagggaaaataacctaacttcattagtttagaagcccaagccagcaactctgaaaattgctattcccttgtaagattatcttttctggactttcataaggggatcttcacagagggtggactaggccttatggtattatatgcctctgcatagcctcaaggaatcacaagcaacttttatttaggcttgcccaaaatgtcaggaagtagttaagtacactttctgaagacatgaaggcctaaccaagatgtagagaacccttttgattccattttaacaaagatcagtattcttcatcactatttcttgaaaatttaattcattaaactcagattaacccctggaaataagttatttctaaaacgagtttttcccaatatgcccttcaaaaaagtcctatttttaaccaagaagtagggatgtgccacatggaatagaggccaaaaaaaaaaaaaaatcaatttgtattgaacaaaaggcccaaaactgaggccctactaagatcacactacccacaggaaacccctcacaagaggtacggttgtccatcaacaaaagagaatggctatttttaaggaccaatttcaaacatacatggcccacttcatgctgaaactgcttcttatagccactctaaaaatctaattgttgaaaacagtgctggtgatgtgagactacatacacctgtagccccagctactcaggagactgaggtgggagatctcgagcccaggagttagagaccagtcttggcaacacagccagacaccgtgtctctaaaactaaaattaaatacataacccttcagtgttgactatgttgtcagaaccaagagaatcagacaaattctgaggggtgtacattttattggaaaccttaaatactgttcagaaagaatatatcttcaatcaaggctcttgtgcagcctacacagaaaaatgaagctttttgggttaggggcaaggagagagacagtacagaggacaaagacccctcacgatgaatgctcttcagccagcttatcagcttttgccacagcttcttcaatgggt

SEQ ID NO: 915934 - DNA, 4001 bp, Homo sapiens
tgttggtgtcagtgtgggggttgaatacggaatatatgtttctaattctacatctggaattaccaaattagaatgtacttttaaatatgtttgagttttttccaatgcatctttgttctctgcaactgtgtcctgataaggcctttgtattgagccattaccaggatctggtgcttgataactttctccactgttcttataaataaaaagacttgaagtgccattttggtcattggtttgtgtcatgtaatttagatcaaggtctttaaataattgccgaagcattttaagtgctccatgtaaagcatcctcatgttgttcaatgagaccatgcactggtccacaaagaactatagagtgtggtataaatgcacatgtgcttatcaagcctagatgaacatatcttttggatctaaggataagaggtttacaaaatttcaccaaagcagtgttaggtatttcacactgcgaaaaggcctgtggtggtacaaatggagaaagaccaatgatcctccggataagagaaacttcttctgatgataaacactcaaccactgatatgccattcacccctgcataataactaactaaatctggttgtttcacactagatatgagcaattttacattctgactatgtagatgtttcattattgcttttgtcttttccataatccaaaattgagatgtctgaaactgtgcttctgaatttagaataaactctgatccagaagtggaaaaaagaggctgaatggtttctgttactatcaccattcgcatgtcaccatctgctgggcggtacacagaaaaatctttctgaagcacaagaccagctatgatcctggaatctgaaacaggaaggccagtgacaccaacattcaactctacaaaatggtcatccactaactcaaatacaccaatcccacttttacaagtcatacacttgaaaaagtagtcacacatcaactgtgaaataaatttatgattatttcttcccactcttccacaaaagtatgcttctaagagcaactctaaagagctcctacacaatgttctctctttagcagacgaaaagatagacaaaaagtgtctacttaggtactggtccataataccgtctaatatttgtgtctgaaacgttaggagagcctgggaaataaatttccaccgagaacaatttttccaatgccttccatgggtttgaatgttttcacacatcaaaggatccttttctctgtctgtgattgcatgaagtcctctaagcaaatggcaaagaaagataataaatgtttttgcaccatctcctgtttttttgagatgactggaaacacagtccactatcatcctgtacaaaaaagaaataaagcaactcattttcagaaggctggcttcccacatcttaaaaccatgtttacacagccataagcataaaatgagaatattgttccttggatacatccttagttttttcctttcttggaaaaaactctgctctattccaagattccaccgttgggtggagtggggagaagtggtcttgagaattggtaagatttggggtgcaggagtgttcccttgggcagggctctaattccgagcatacagcggtttcacccgaggtcagtctttctaagtacgcatcgcctcaggatgggacaagagctccacagaggctgcctggggtgcccggctacgggttagcgtgtgggacgcgggtacctggctatgggatgctctaagtgtagcgcctccaggaggcggcctccattccggctgagaagcacctcgccagtgggcttcgtacacaaaacttgccgtccctcgggccccacgcagcagctcacgatggcttccagcacctcggccacctgcaacgccgccttcacagaccctgcagcggccatagaacttaacatatctgggccgcttcccctttttgaccagcttgcagaacacccgggccgaccgaaaacaggggtgggaacggccggaaacggaataggcggggagaaaacccggaagccaggagtcgaagccggggtagcacggcttcttggttgggcgagagggctgcccttctgtccgcctggtggaaaagccctgcagctttgccaggtggggtgagctggcccgttgtacgcgaaggcagaaaaaacagactaggatttccagcagctgtgcctggagcggcaaccctaagcccctccccggctccctaggtgaattcatctccctccagtggcgtccgctgcccccaaatcccttagtctcccgagaaactttcttcctaagtcaacacggtagtggggcctgcgtgaaggagagggcaccccggttggaactctgctggctttcatcccctgccagaagctgctttttccggggcaaaacctctgccttggattcacgcatgttcctgtccacattccccacgagttgctctccttaccataacggaaataatttgtagatgcaggacaggtgaggagagcctggccacagccatgaattgcaggctttatgtctgctgcagaggctttaccacatttcctagactcaggtatcacaataaaactctagacaccacaaatatattaagcagaaatgatgcgaagtctctattttttgagatggactcccgctctgtcgcccaggctggagtgcagtggcgcaatctcggctgactgcaacctccgcctcccgggctcaagcgattcccgtgcctcagcctctcaagtagctgggattacaggcatacgccactgtgccccgccaatatttgtatttttagtagagatggggatgtcaccatgttgaccaggctggtctcgaactcatgacctgaatgatccacctgccacggcctttcagagtgttgggattacaggcatgagccgctgtgcagatttaaatccattaatcacgtcggtgatcaacagtatgctttaaaacacatggccaaggattattgtatataacccaaagacagaaaatactgtctcttataacattttttttgttttttaagagatgaagtttcactctgccgcccaggctggagtgcagtggcgagatcatagcttactgcagctccgcattcctgagctcgtgatcctcctgtcttagccttcaagtcgctttgtgcctcactacgcctggttattttctcttttagtagagacagggtctccctgtgttgcccaggctgatcttgaattcctggcctcaagtgatcctcccaacttggccttccaaagttttaggattacaggcatgagccaccttgcctggcctaaaacacaggcacttgagagcatgggctttggattcagacctggatttgctctgtcatttccttacctgtggcattcaccaagtaacctctttgatctctgcttttctcatctttaaaaacaatgggcctgccgcagtggctcatggctgtaattccaggactttgggaggccgaggtgggagatcacaggaggccgagagttcaagaccagcatggccaacatagcaaaatcccgtctctactaaaaatacaaaaattagctgggcatggtggtgcatgcttgtaatcccagctactctggaggctgaggtatgagaataatttgaactcgggaagggaggttgcagtgagccaagattgcaccactgcactccagcctgggcgacagagcgagaccttgtctcaaaacaaaacaatccccgccaaaaaaaccagtggagataacatatacaaaataaaaatctcaagaggttttgagtaggtggagaatgttcactaaacactttgcatagtgcctggcatagttagcactcaacagatatttatattacacctgttagaggaaaagggtcccaatccagaccccaagagagggttcttggatctcatgcaagaaagaattcaggacgagtccataaagtgaaagcaagtttattaagaaagaggaataaaagaatggttactccataggcaaagcagccccaag

SEQ ID NO: 915935 - DNA, 4001 bp, Homo sapiens
taaaaaatcaagcttgtgatagcaatacatatttaagagataagtggaaagatgtttgaaatattgtgataaaactaacttaatggaaccttccatacttcttcgatcatacctagaatacaatcatttctttcttaatcttaggaaatatcaggaaacagaaaagagactacttgtagatatcttacctagttccccatgttataaaagtatcttgtggaagggacaggggtttttggacctacaaaaacgcgtaattaaccacaactgcacatggacaggaaaaagctggaaaagcaagactgttcattcttagttttctccttttacttactaaagctataatcaactaaagtgtgtttttcatctgaaatgaaacaagcatgaggaagccagaaatagaacctctaactatagaagaaaagttgtgtgatctctgttgaatacaaaaacgcatagtttccactcggttactgtttaattgtagtgaaagtttttgtttggcaacaaaggcgctatttacatattatttcttctaagtgaaactatggtctgggatgggttgtagataagagcagttgagaaccacgcttcatctccctccttagaaactctgaaacgaggctttattcctaccagaagttcagattgcattatggtcatctcaattccaaaatgttagatggcaagaatatctgcccatccttcactttccttggaaaaagttgctcttcgggttttatatgcgattgcagttttccagtgtgtgaaactaggaaaacaaaacactcaacggtgtacatccctacacctaaatagtcagaaataataggcagctaggctaattatccttgattagcaagatcagagccattagggtgctcactggtttaacaaatgaatgcccttaggcgtctatcatttgtaactcctagaagctttaatttccacaagaaacaaaataagaggggccttctgcttttaacagtgaaaagatcgttctccctcccctctccacccgggtcaactcttccagccgctccctcctgcatcacgaacacacgctgcaggaaagcgcatttacagcccgggacatccccagacctcctctccaaaattccccacctcctgtgcataggagaaactgagagaagccctcacttcctttccaaacttcacaagcaggggagggagctgtagcagactttcacctccgttcccaaaagcgaatgtgaaaaagtccgagaaggcacgtcctgcgagtggaggttaaaccgaaatctgaacagaatgcacggtccccgcaaactacgattgataaagaagatactgagacgtttgcgggggatataagccatggttgtctcgccttcctcccctccctgccaactatgtttcttggagaaatcgccggttcgattcacgcacacatttttgtaaaacacggacaaaaccataagtagttaccttcattgttccgtcggccacgagggaagctcgagctgagcggagggcagatcccaagggtcgtagcccctggccgtgtggaccgggtctgcggctgcagagcgcggtcccggctgcagcaagacctggggcagtgcccgaggcggcggcgagtacacgtggcgggctggattgcagaccggccctctcgcggcggagactcgcgacctagcggattgcatcagcaggaagacactaaggctgctcccccaggccgcccccagatggtggagtctctcccagcccgaagattcggagccagcgcccagacccgagcctcactcactgctcactcccggggtgcagggcagaggtgccagtgttgcaagcaaatgacacggttacccccgaatcagccactgtgggtgcgtatccgagtgtggggatgcccgtgtaacatttatatggagacgtcaaggaggaggaaataaacagatcagaggtcaaatgtgattgccattccgtcatcactggctcctgcccacctccctactgtccccaaagtaactttgctgcatgctgagaggaccacggcacaatcctgcccaaaagtatacatgtatcccccgcggctactttaaatgtacttttgcagtagtcaagaacatgtgcctggtttgccgatctctttcccagagttccttagtcaccctcaaatataaccatttttgccaatttattatgtacatgggggaaaatttttaatcctttaatttgagcatataaaattctttataatgtgaaattgcccagtagcctagttggtcccctgtaagttccctccccacatctatacaaagctccaggattgctacttttccatgtccagcgcctaggtcagcctccatgactgcttaagtgtgctgctggttgacctccgctgcctctctgtcaagctggcaaactcctatttttgtaaatttcaacccaagtctttgctgtggaagttgcttccaatgccctcaaacagaactgggcccttggtctatgtgctgcactttgtccacatcctttctcaaaatcaattattttattttatcattttttaatggagatggggtctcactaaattggccaagctggtcttgaactcctggcctcagcaatcccctcgcctccgcctcccaaattgctgggattacagatgtgagactgtgcccagcttcttaattttactttaattatttgtttgcacagttgtcacttcagtggattatgagattcgtaagggcagatcctttgtcatatttatctcccataccaagtggcctgccgtggaagagagggagtgttgaaaacaaatgtgtcagtgcttaatgactgttggtcaggtgaatgaatggttaaattatgtgttcaataaatgtactgagtgatttctacatgctaggctggtatataacagtggtttgtaatctgaaatgtctcaaaatggagccatttatgacaagggtttcagcctccagtgaaattgctgacccctcaaattgataagcatatgtatggtggactgaggtgataagataacacctgctgtggcctggcaccattggcaagagagtaaagagagaggcagctgagataatggctatgggcacttgcggatgctgtgaaaaccaaaaagtaatgaaaacctgaaagtaactgaccacagccaaaatgcttgcagaagttctgccctgagaaatctgtatctgtaagcatttaatcagccattgagtccttgtgaaacctcctggcccccgtcagtgaaagcacagctagatagatttgaacctgacactgacatgagacaggcaatgtgcaaaatgctagggactgagtgggaaacaacaaaaatgttcttaccctcattaagctcatatactagtgtgagaaacagaaagtaagctttaaatcaggtagcaaaatgtttatcaactgaggaatggctaaataaaacatggtatcatccatacaatggaatattattatattctgcaataaaaagaaatgaagtactgattacatgcagtcacatggatgaaccttgaaaactatgcaaagtgaaagaagcgtctcacaaatgactacatattatatgattccacttatctgaaatgtgcagaacaggaaaatccatagagacagaaaacacatagttgttttcaatctggggacagggtggaatgcagagtgaatgttcatgggcgttggatttctttttgaattgattaaaatgttctcaaattagattgtggtaatggttacacaaccctgtgaacacactaaaaaccactgaattataccctttaaataggtgaattgtatgttatgtgaattatatctcaataaagatgttactctatggcccggcatggtggctcacacctgtaatctcagcactttgggaggctgaggcagacagatcacttgaggtcgggagttcgagaccagcctggccaacatggtgaaaccccgtctctactaaaaattagccgggcgtggttgcgggg

SEQ ID NO: 915936 - DNA, 4001 bp, Homo sapiens
atgcatggcacagtctccagcacactgtgagagagctcaatgtgtgagaaactgatgagtcaagtttccttccctctctgaaccgccaggatgtgagatcattaggacactctgtgtcaattgtctgatgacaattgacagtgactcaaacaggcagaagagcagcactaggcataaaaagaagaagctaaaacctccacgaggagggagggtaggagatagacttatagaaaaaataatattacatcttacatttgtatttgtacagttttcaacgtgctttgtttctcactgtttgaagtatgagctatttactatataaaccccgcaattcagatagaaaagaagaaaatgcaacactttcactgtagagtgttatgtgctactgaaagagaaaaatcacagtttaactttttctacaagtagactgaaggtttgtacgtattatggaatctgataaacaactagtttaatatttacgcattgactatttttcaagaaaaatatatgactcaaaataaaatcagcaattagctgctagataatttttgttgtgatgaatgtactgtcactctctaaatggctttttttcctctaagagtggaattttaaaagtctggcaacacaacctaggaactgggtaacccacacagtgaaaatttccccgaatctcaacaagaaatggatttattcagttgaacgttgctttagacactaagcctctggcaagcaacttaccttaaaagtccccaccacctcttttgatcctccttctccggtacactctgcggagcatccgttactgcaatccttaaagaagaattaaaccaccattaagtaaatgcaggtgggtaagcgggacccggggtaacctacgtgacgctcaccatgataccgtgcgctcctctccaggacccaggcaaacacaaaaaaggaggctcagacaaccaagcacccaggcccgaacctccaacaagcgtgtcttgggagcgctgccctgcacttcccaccctgccggggtcgcggcggtttttgtcctcctccgccggctcagggaagactggttaaattccaggtcagccctacagagccagggttcgccggcaaagaacaaaaaaacaattgtctcccttatatccgagcaaatagtctagactggggtgttaagccatttatagaaaaatctccagggcgcgctcagcctcgtggtcttgtcaatcacagacgcacaatagcaagcctgcaaagggaacggggacgggcgtgaaccatttcctccaccagcagggtcctccgatgccgcagcatccaccccacaccttaaacctcatggtattagtgggcaatttaaaagataaagacacagggaagcgggactaattgggaaaacctgcagacatttgttttaatgcgtaatctgctaaataactacgggggtgggggtggggaaggaagagatccaaggaggcagaaggctgcggtcaaaatattttggggtggcagagtcacgtaggatgtggctgtgggttctggcagcccagagattcagctcccgcctcctccctcagagcgagtccatagctaccctcacgtcccccgtggcggtcctcgccacgctccggagcgggttacccatgagggtgctagacctgggcagcgggaacctcgaagaggtggagattgcaggctgggactccagatttcgggcagggatgcggggaagggaagacgcctcgctggaggcggaatggagggcaaggcgaaggaggatggtgcaggaaacggcgacaaggcgcccggccaggcccgcgagctaccgagacccgggttccaatcctccccccttccgcaaacgcccgggttcgaggtacctggcgggcaagggccgcagcggagcgaagcgggctggccatggggaggctgcggggacgcggggctgcagagagcggcagtggcacggagcgcgcggctggaagcgaaagcaggcggtgtggccaagccccggcgcacggcccatagggcgctgggtaccacgacctggggccgcgcgccagggccaggcgcagggtacgacgcaacccctccagcatcccttggggaggagcctccaaccgtctcgtcccagtctgtctgcagtcgctaaaaccgaagcggttgtccctgtcaccggggtcgcttgcggaggcccgagaatgcgcgccacgaacgagcgcctttccaagcgcagatatttcgcgagcatccttgtttattaaacaacctctaggtgaatggccgggaagcgcccctcggtcaaggctaaggaaacctcggagaaactacattagggcagcttttccaccgactccaaatccaactgacaaaaagcagtttctgccctcgagagtttgcgggcggggattgacatttgtgcgtctgctcttgtctgccactgaccgctatgtgcaaactgaagggggagaacgtgaatccagcttttagatttccctgcgccacctacccaaaccgaatttgtaactcggggtgttatggggctaccaggctcgcattccctaagggccatttctgcccaaagatctcaatgcctttcatcgttttcaggcaaagcagaccatcaagagctccaatcatactgttttcatagttttccgatgtaggctcgtgatcgcaatatttagaaagaggactggaaaagtgatgttagaagtactattcggtttagaaagggaaaggaggattggaatagctattgtcttatatgcagtgttcgcctggggcaacgtcagcctaaattatgagccttcctggtttttaaattaataggaagtggtaactggggctgacttgatcttggaaagagggggagggcagtttattctgggtgaaagcggttaaatccggtttggttttttaaatggtttcatacaacgctactgataatatactgtagctctaatcttatcaactcagaaaacctacacttttcctctcctttatacaaggcacagaaaggcctcttacgctggggtggggtcccaagctccaaagaccacagagtccaggcaggtcacgtaccaccatagagcggcgagtgtccctggaagtccagggtcgcttataagataagttttgtccttgttgttttgagacggagtctcgctctgtcgcccaggctggagtgcagtggcgcgatctcgtctaattgcaacatccgcctccccggttcaagcaattctcccatctcagcctccccagtagccgggactacaggcctgcgccaccacgccgggctaatttttgtattttttgtagagaccgggttttgctatgttgcccaggctgctctcaaactcctggactcaagccacccacctatctcagcctcccaaagtgctaggattacaggcgtgagccacggcgcccggcctccatctgtattaactgcttctatttcctccccattaagggcttctgtccaattattccacctaaataaggtctctaatagccttcattttgttcctgccaatggttttgcttctcgtgcattttcatggctgcacctatgtgctgatgactcccaaatatattttttcagtccatctgtctcctgagcagtaggtacttgctactcaaaaatctgtctaaaataaaaacggtgtatctatccaccatgttcgaagcactgggctagttgctgggggagggttgagagcataccatcatcctgttatcatgcattgcccccagccagagagaaaagtgttaattgtgttagaaagtgttaaggaatcccacagacagatgtaaaattataacaagtgctgcctgtgctctaagagcctctaataatggattgtattgactcagaaaggcctggaaaggctttcagcaagtgatccttgagcagaaatctgaaagattaaagaaatttactaaaggaagaagggatgaagagcacctggtatgaaagtgagttccaggacaaaagaacttctctg

SEQ ID NO: 915937 - DNA, 4001 bp, Homo sapiens
cagtctgggcaacacagggagatcccatctctacaaaaaatgacgaaattagttgggcctgatggcatgcaagccgatagtctcaggtacttgagaggctaagaggatcacttgagtctgagagatcaaggctgaaagtgatacctaattgatggtgccactgcacttcagtctgggcaacagaacaagactctgtctcaaaaaaaagaaaaagaaaggaaaagattatttaaatttgagttgatatttttctttgcaaagaattcttcaggctaggcttggtggctcacgcctgcaatcccagcactttgggaggtggattgcatgaggccaggagttcgagaccagcctggctaacatggtgataaccccatctctactaaaaatacaaaattagctgggcgtgatggcacatgcctgtaatctcagctactcaggaggctgaggcaggagaatcacttgaacctgggaggcagagattgcagtgagctgagatcgtgccactgcactccagcctgggtgacagagcgagaccctgtctcaaaaaacagaaaagaaattgcaatattctaattttgctttttaaaaaatccttgctaagatgacagcaagagaaggaaaaagaaaaataaaataaaaattccttgcaagtagagacctaatcttgaattcacctttggatgtccaatgcatggcacagtctccagcacactgtgagagagctcaatgtgtgagaaactgatgagtcaagtttccttccctctctgaaccgccaggatgtgagatcattaggacactctgtgtcaattgtctgatgacaattgacagtgactcaaacaggcagaagagcagcactaggcataaaaagaagaagctaaaacctccacgaggagggagggtaggagatagacttatagaaaaaataatattacatcttacatttgtatttgtacagttttcaacgtgctttgtttctcactgtttgaagtatgagctatttactatataaaccccgcaattcagatagaaaagaagaaaatgcaacactttcactgtagagtgttatgtgctactgaaagagaaaaatcacagtttaactttttctacaagtagactgaaggtttgtacgtattatggaatctgataaacaactagtttaatatttacgcattgactatttttcaagaaaaatatatgactcaaaataaaatcagcaattagctgctagataatttttgttgtgatgaatgtactgtcactctctaaatggctttttttcctctaagagtggaattttaaaagtctggcaacacaacctaggaactgggtaacccacacagtgaaaatttccccgaatctcaacaagaaatggatttattcagttgaacgttgctttagacactaagcctctggcaagcaacttaccttaaaagtccccaccacctcttttgatcctccttctccggtacactctgcggagcatccgttactgcaatccttaaagaagaattaaaccaccattaagtaaatgcaggtgggtaagcgggacccggggtaacctacgtgacgctcaccatgataccgtgcgctcctctccaggacccaggcaaacacaaaaaaggaggctcagacaaccaagcacccaggcccgaacctccaacaagcgtgtcttgggagcgctgccctgcacttcccaccctgccggggtcgcggcggtttttgtcctcctccgccggctcagggaagactggttaaattccaggtcagccctacagagccagggttcgccggcaaagaacaaaaaaacaattgtctcccttatatccgagcaaatagtctagactggggtgttaagccatttatagaaaaatctccagggcgcgctcagcctcgtggtcttgtcaatcacagacgcacaatagcaagcctgcaaagggaacggggacgggcgtgaaccatttcctccaccagcagggtcctccgatgccgcagcatccaccccacaccttaaacctcatggtattagtgggcaatttaaaagataaagacacagggaagcgggactaattgggaaaacctgcagacatttgttttaatgcgtaatctgctaaataactacgggggtgggggtggggaaggaagagatccaaggaggcagaaggctgcggtcaaaatattttggggtggcagagtcacgtaggatgtggctgtgggttctggcagcccagagattcagctcccgcctcctccctcagagcgagtccatagctaccctcacgtcccccgtggcggtcctcgccacgctccggagcgggttacccatgagggtgctagacctgggcagcgggaacctcgaagaggtggagattgcaggctgggactccagatttcgggcagggatgcggggaagggaagacgcctcgctggaggcggaatggagggcaaggcgaaggaggatggtgcaggaaacggcgacaaggcgcccggccaggcccgcgagctaccgagacccgggttccaatcctccccccttccgcaaacgcccgggttcgaggtacctggcgggcaagggccgcagcggagcgaagcgggctggccatggggaggctgcggggacgcggggctgcagagagcggcagtggcacggagcgcgcggctggaagcgaaagcaggcggtgtggccaagccccggcgcacggcccatagggcgctgggtaccacgacctggggccgcgcgccagggccaggcgcagggtacgacgcaacccctccagcatcccttggggaggagcctccaaccgtctcgtcccagtctgtctgcagtcgctaaaaccgaagcggttgtccctgtcaccggggtcgcttgcggaggcccgagaatgcgcgccacgaacgagcgcctttccaagcgcagatatttcgcgagcatccttgtttattaaacaacctctaggtgaatggccgggaagcgcccctcggtcaaggctaaggaaacctcggagaaactacattagggcagcttttccaccgactccaaatccaactgacaaaaagcagtttctgccctcgagagtttgcgggcggggattgacatttgtgcgtctgctcttgtctgccactgaccgctatgtgcaaactgaagggggagaacgtgaatccagcttttagatttccctgcgccacctacccaaaccgaatttgtaactcggggtgttatggggctaccaggctcgcattccctaagggccatttctgcccaaagatctcaatgcctttcatcgttttcaggcaaagcagaccatcaagagctccaatcatactgttttcatagttttccgatgtaggctcgtgatcgcaatatttagaaagaggactggaaaagtgatgttagaagtactattcggtttagaaagggaaaggaggattggaatagctattgtcttatatgcagtgttcgcctggggcaacgtcagcctaaattatgagccttcctggtttttaaattaataggaagtggtaactggggctgacttgatcttggaaagagggggagggcagtttattctgggtgaaagcggttaaatccggtttggttttttaaatggtttcatacaacgctactgataatatactgtagctctaatcttatcaactcagaaaacctacacttttcctctcctttatacaaggcacagaaaggcctcttacgctggggtggggtcccaagctccaaagaccacagagtccaggcaggtcacgtaccaccatagagcggcgagtgtccctggaagtccagggtcgcttataagataagttttgtccttgttgttttgagacggagtctcgctctgtcgcccaggctggagtgcagtggcgcgatctcgtctaattgcaacatccgcctccccggttcaagcaattctcccatctcagcctccccagtagccgggactacaggcctgcgccaccacgccgggctaatttttgtattttttgtagag

SEQ ID NO: 915938 - DNA, 4001 bp, Homo sapiens
taaataatctcagaattaaaagctactaatagtgtgttaccatttgtaaaactaaaaggggggtacttatatgtacgtaaatgctggtatacacacaagactgatacctaagaaattataaacagtagtgccactgtgtgggggaaaaggaggatttagggttgggagtagagacttactttttagtatatacccctttgtagtttgaatttttttgttttatcaagcgcaagcattttttttccctttcctgactacaaagatccacaagaaaaagcattttttaaaaactgcaaaacagaaagctccataaacgtacagccaggtttgggaaccactaccctagttagctgccaactatgtctttacctctcatgtgtatactactctcaactttaaaatctctggtggtttcctaatgcctttcgtgaaatcccaagccttaacctcagtctctcttttccattgtttttaccctctgacttcccgtatcatcacagcggagaaattttgcaggggacacaggacatcaacccatctcctcattccagtctttgagactgtatccaaatgtccccttcctactatcatctgagtcccacaaggtctgaagtcgtcccccaaagtctcttctgtaaaaggacagcaacgtaacagaattgtcccccgccctccagatgctggactggagtgatggagggagcgcagagagggtactaacttttgaagcatttgccgtggtaagttcagactgcctgctagtgtagaatatcccagtggctacaaataggtgtgggagagacatttccttattttgcatgtggtttgattataatcatatgcctaagaatagtttgcagcaagaagagtggcagtgccgcccttctccattcccttgggcaaaatgctttatttgcttctcgatcctctccactgtactctgtcaactcactgttttgttttgtttttgagacggagtctcgctctgtcgcccaggctggagtgcagtggcactagctcggctcactgcaagctccgcctcccgggttcacgccattctcctgcctcagcctccggagtagctggactacaggcgcccgccaccacgaccggctaattttttgtatttttagtagagacggggtttcaccgtgttagccaggatggtctcgatctcgtgaccttgtgatccacccgcctcggcctccgaaagtgctgggattacaggcgtgagccagcgcgcccggcctactcactttttttgaaataaacatgcaggtcccagggtctgtcctgcactgtatagcacacatgagtctcaatatcaggcatgattctgtcacccttggctcttctctcccagtaaaccaaacctaaccccatgttcccaaacgtgtgtctctggaagccccctctccccagccaaagcgccaggcacgctggacagaggccaccctagatacaaggaccgttcccacctggggtctggccctgaaagaaaagtgggaacgtagtcgacaaggactcctctccaagagagattcctaagacagatggtggaaccctggcgggcaggcagcagcggcactggctcagtcaaagccacgctttatactcgttttgggaaagtttcgatgggtgttagcccaggccagaaccacagtggatgtgtaggcagccaaccacttggctccggatgctccaatccctcccctgtcactcaccccggagttacaccccacgtcgagccccagaatcggcccgttctcgggactctcaggaaagagctgtcgaagcagctccgggggcaggaggcggagccgttgctccggagggtggaagcgagaataatgaggaaaatttccgaacggggcggcgccaggtgccagaactcgcgattcctcttccgctgcggtctccttaacactccctccatccagttccgtgggcaccgccattagcctcaacacagcctctgggccgtggcggaaccggaagccgggaacctgctgtcggcgtgggcggtggcggtgccagcgcgcgtgcgtcgaacggctagggcgggtggctagaattctgcggtgaatcagaaaagctgtcctgatttcctctcgctgtatacctggagccggcgagcgcctggggcttgccttgtattattgaaccctcatcacaacactgggaggggattagcaatatcatccacgttttacagggatgaaacaaactctgagggctaagtgtcttggccaagctgacatagtttgaaacttgggctacttgacccagaacaagtatactagtttgttgggatcttggaaatcaattttagtccaatttcctttctttataaatgcaaaaagtgagaccgagagaacttacttgtctggggtcatacattgaatctgtgactcaaaaacttccacccggttcaggaaagggtagccaggaggtgcaggtcacttgcgaagccagccgactcagccctgtcccccaggggcaactgtagaccatgagctccttgagaggcaaggaccgtgccttaagagccagcacttaaagagtgcttaccaggcaccagacacccttgtaagctccttagtcaatcctctcaccccgtgagaaaatgaccgtattattattctttttatatagatgaggacactggagtaaaacaaagtaacttgtccaagatcccacagttagaaatgatggtactaggattcgaacccagggagtttggatccagaggatgtgcttgcaacggtgtgttattctcagccttgagtctcctatacttaacatgggcctggcacaaagatgctcaacaaatgttgttgaatgaaaactcaatagagaatacaataaggccagatctgtttggggaaactttaaatggaagggagaaaggatgccaactgaagcagacatagtggaatggagttgggcaagatgtgactcagagattggaaataacagagctgataaggagaggaactgaagggtcaacctaggtagcaggttccagtcaaaagccaggatggcccagaatatccgtcagggtcaaccaagcatcagcagagttgtgcaggacccccaaccccacccctgcacctggcccacccatcttaaaggggtatcctgctccatgaggctggcagttcggtaaacttcttataaggcactggagcatgactcctgcaaacagtaccatcaggagttaaaataagcgctgttttcctctcagtttttactttatattttctttttcttttctcctttttttgagatagagtctcacactattgcctgggctggagtgcaatgacatgatctcggctcactgcaacctttgcctcccaggttcaagtgattctcctgcctcagcctcccaagtagctggaattacaggcacccgccaccattcctggctaagtttttgtattttttagtagagacggggtttcactatgttggccaggctggtctcgaactcctgacctcgtgatctgcccacctcggcctcccaaagtgttgggattacaggcgagagccaccacgcccagcctttatattttcatctctatctggcctgctgtttctctagtttcacttatttgaggacacaagttaataaaagtcactctggaatttagtaaaccacagtattctgcacaattacagaaaaggagaaaaagctgcaccgttttgacaaattttggtgagctgagctgaacttacctctttttgtcactagatgaagctagcacaaataattaacaattttcaaggagctggaatcaccttgcttccaggacagtgaatggcaagaactcctgaccctggggttcctccagaagcaaagataggccctcgtaacattactggtaatctaaaatgcctgacaggtgacctcataaagaggtgttttaatttgatccactctggtaacttttctaacctatgaccacttttcagagcctgaacagcacaggtgtctt

SEQ ID NO: 915939 - DNA, 4001 bp, Homo sapiens
aaccactgaagtcaagacagagtacttagtccttccatttagtaaaatgtgagatttttgttgtcttacaggccagaaaggctgtgacttggcccagtcgacaggcaaagctaagaatgagagaggatgagagagaggagaaagaacagtgctcaggagccagccccagaaggaggctaccctacagcggagggagcgggggcctccgccacaagagcctggagagcagggagcaaaagagaacaaacggagacaaaggattaagagggttttaatgtatttaacaaatgtagatgccggacccagtggctcacgcctgtaatcccagcactttgggaggcccagggagcaggatcgcttaagcccaggagttcaagaccagccttggctccgtctctacaaaaaatgaaaaaaattagctgggcgtggtggtgtgcacctgcagtcccagccacttgggaggctgaggggggagaatcgcttgagcctgggagttggaggctgcagtgagctatgatcgcgccagtgcactccagcctgggtggcagagggagacactctcttaagaaacaaaaataaagaaaaaaaaaaacccacccacacaaacacagagtttttgtttcctctaatccttgttataaattacttgattgttcagtgtatagctaagtcttactttcaagcagcagcgatcgagtattatcacaggttagatcccttctgctttcagctcttcctacagaaattgtactctatacaagaagcccaactttggggtttatggaaaggtaaaccataagttttatgcttatgttgacagaagccctgggtggggcctctgaatgctggttcagaacctggaggggagatttccgttcctgggtgagacctgtgaggcttattctaattcagggccgcagaggacacaaccctgcttcactgccctatgtttaccttcctgatccttacctgtaacaaacctgcactctcagaagcaaggctacagaggttcttttcttggtctctttccctccccgaggtggccggggtcctccacgtctggccccagcgtgtcctctgggaacactggctgcctggccgggtgtgctgagaggccggctgggaaggccacactgcaacgaacacctacattccaggtattggcagacgcactgtcgcacggttctcgctctgcggactcacttgttgaggtgagatttcacttccctcccggtgggtggcagctaacggataagcacacagaggaaactgcagcaagcacctcgtgtttccacacacagaggcggccaccacccagtgccccagttacgctggacacctggttcgctgtgcctctgcctgtcccagcggtgaggggtgtggagaatcccttggtggctgtcccagcagaagagctgacttcatgtgctcaggacacacagttgaggcctgagtggatctcgtgggcactgacactcatccccacggagcctcccacagcacatcctaagctcagcttggttctgttgtccggagcctccccttctgcccctctcctctccccctcacttcagacctctcaggctcttcgtgccttctgcctggactgttctttaatactaaaggtgaaatgaggaatgagagaaagtgccttaacttcccacaatagaagctgaatgctagacagagcctcaggtcatattcaccaaacagaaggtccgaggctctgattgtggaaagaaggggacagggagctcagggaggagggagctttctagaggggagagaggagagagaagggtcttccatttacctgtgccttagactcaaggaattctctgggggtctagacctcctgcggatgagtgcccaagttcccacgaggtactcaggactctgatctcaaaccaggaattcccatgctggcttcagtccctgaatcctcgtggtctccagcttgggcagtggtgtccctggccacggaatggctgtcatgtcattgcatacctccccagatacataagcagagaagactgagtaacgtcacatacctcaaccagtaatgtgttcttaactgaatgtcccaaaccctttgtagcaaaagagaaatgaaagagaaacctaaataacctttcttcgtctttcctggaaaccccgctaaactagattctcaatgtcattttgtgtcctgagacttacatgataagaactttgtaataaacccagtaaagagctccctgaattagactgcctcatttggcaaacagctaaagaccaggctgtgtcctcctgcaaaggctgaggatgaagactggtgcctcctggtgttacctggtctggaagctgtctgtgatttcttctgcttcaggtcaggtggcagtaaggatatttctatacctgagtctctctccacgaaacttaagaggaaactttcaacaggtcttcttggcttgtcgtttggaaagactcaggtagtttagagccccaggctctaaactttcttcaggtttaggactcagcctgaaaagaggcttaaagaaggagaaccacttccttattacgccctgcccctggctttttaattgaaggaggggctgatctttgcccgtgtaatttgactctaaaaggaattctatatccattacctagcactcttcctgccctttgggataactaggtgggtgttctgatacttctttactatccttatcagttgttagttaaacaaatgtttactgaccgcctaacatggtacaggtactgtacacatatttaatcttttttttttttttgagacagagtttcactctgttgcccaggctggagtgcagtggtgcgatcttggcgcactgcaacctccgcctcctgggttcaagcgattctcatatctcagcctcctgagtttctgggattacaggcttgcaccagcacgcctggctaatttttgtatttttagtagagacaggggtttcaccatgttggtctcgaactcctggcctcaggtggtctgccctcctcggcctcccaaagtgctgggattacaggcgtaagccactgcgcccggccaacatatttaatcttaacaacattgagaggcaggcgttacgattcccattgcacagatgaggaaactgaggctcagagaggtgaagtatcttgctacggatccctatcagttgagctgagatccaaatcgtgctctttctggctttacactctatcatgtcacctctcctatgtgactcaaagattgtgttcaagtggaaccactggaaaagtgttcaaaaaggaatctaagcacagccatagtaaaaaccacaaaaacccactgaaaggccaaatgtcataactttagagatggaattccctattatatgaaataggaaacagttacatctgattttatgctctttccagagtcttaagtgaaatagatatatatggccatgcttgagatcataaaccctggaccgctggtcaaactgtgacgatgaaggaagtgtgaatagtgaaaggggaattaatgctattttcgtaaaagtggggaagaatgggtcatttaaatattaggcaaacagatccacaagagacaaacagatggtagttatgggaaagttagatatttagtaactcgaggtgaattttcaccagcaaactaatattttttgcaccagtgaggtcaatgtagagggtattaaagaaatactaagaatgatttttctctttttataaaaacttgccacctttttttttttttttttgagacggagtcttgctctgtcgcccaggctggagtgcagtggtgcgatcttggctcactgcaagctccacctcctgggttcacgccattctcctgcctcagcctcccaagtagctgggactacaggcgcccgccaccaagcctggataatttttttttttttttgtatttttagtagagacggggtttcaccgtgttagccaggatggcctcgatctcctgacctcccgatctgcccgcc

SEQ ID NO: 915940 - DNA, 4001 bp, Homo sapiens
agtgcactccagcctgggtggcagagggagacactctcttaagaaacaaaaataaagaaaaaaaaaaacccacccacacaaacacagagtttttgtttcctctaatccttgttataaattacttgattgttcagtgtatagctaagtcttactttcaagcagcagcgatcgagtattatcacaggttagatcccttctgctttcagctcttcctacagaaattgtactctatacaagaagcccaactttggggtttatggaaaggtaaaccataagttttatgcttatgttgacagaagccctgggtggggcctctgaatgctggttcagaacctggaggggagatttccgttcctgggtgagacctgtgaggcttattctaattcagggccgcagaggacacaaccctgcttcactgccctatgtttaccttcctgatccttacctgtaacaaacctgcactctcagaagcaaggctacagaggttcttttcttggtctctttccctccccgaggtggccggggtcctccacgtctggccccagcgtgtcctctgggaacactggctgcctggccgggtgtgctgagaggccggctgggaaggccacactgcaacgaacacctacattccaggtattggcagacgcactgtcgcacggttctcgctctgcggactcacttgttgaggtgagatttcacttccctcccggtgggtggcagctaacggataagcacacagaggaaactgcagcaagcacctcgtgtttccacacacagaggcggccaccacccagtgccccagttacgctggacacctggttcgctgtgcctctgcctgtcccagcggtgaggggtgtggagaatcccttggtggctgtcccagcagaagagctgacttcatgtgctcaggacacacagttgaggcctgagtggatctcgtgggcactgacactcatccccacggagcctcccacagcacatcctaagctcagcttggttctgttgtccggagcctccccttctgcccctctcctctccccctcacttcagacctctcaggctcttcgtgccttctgcctggactgttctttaatactaaaggtgaaatgaggaatgagagaaagtgccttaacttcccacaatagaagctgaatgctagacagagcctcaggtcatattcaccaaacagaaggtccgaggctctgattgtggaaagaaggggacagggagctcagggaggagggagctttctagaggggagagaggagagagaagggtcttccatttacctgtgccttagactcaaggaattctctgggggtctagacctcctgcggatgagtgcccaagttcccacgaggtactcaggactctgatctcaaaccaggaattcccatgctggcttcagtccctgaatcctcgtggtctccagcttgggcagtggtgtccctggccacggaatggctgtcatgtcattgcatacctccccagatacataagcagagaagactgagtaacgtcacatacctcaaccagtaatgtgttcttaactgaatgtcccaaaccctttgtagcaaaagagaaatgaaagagaaacctaaataacctttcttcgtctttcctggaaaccccgctaaactagattctcaatgtcattttgtgtcctgagacttacatgataagaactttgtaataaacccagtaaagagctccctgaattagactgcctcatttggcaaacagctaaagaccaggctgtgtcctcctgcaaaggctgaggatgaagactggtgcctcctggtgttacctggtctggaagctgtctgtgatttcttctgcttcaggtcaggtggcagtaaggatatttctatacctgagtctctctccacgaaacttaagaggaaactttcaacaggtcttcttggcttgtcgtttggaaagactcaggtagtttagagccccaggctctaaactttcttcaggtttaggactcagcctgaaaagaggcttaaagaaggagaaccacttccttattacgccctgcccctggctttttaattgaaggaggggctgatctttgcccgtgtaatttgactctaaaaggaattctatatccattacctagcactcttcctgccctttgggataactaggtgggtgttctgatacttctttactatccttatcagttgttagttaaacaaatgtttactgaccgcctaacatggtacaggtactgtacacatatttaatcttttttttttttttgagacagagtttcactctgttgcccaggctggagtgcagtggtgcgatcttggcgcactgcaacctccgcctcctgggttcaagcgattctcatatctcagcctcctgagtttctgggattacaggcttgcaccagcacgcctggctaatttttgtatttttagtagagacaggggtttcaccatgttggtctcgaactcctggcctcaggtggtctgccctcctcggcctcccaaagtgctgggattacaggcgtaagccactgcgcccggccaacatatttaatcttaacaacattgagaggcaggcgttacgattcccattgcacagatgaggaaactgaggctcagagaggtgaagtatcttgctacggatccctatcagttgagctgagatccaaatcgtgctctttctggctttacactctatcatgtcacctctcctatgtgactcaaagattgtgttcaagtggaaccactggaaaagtgttcaaaaaggaatctaagcacagccatagtaaaaaccacaaaaacccactgaaaggccaaatgtcataactttagagatggaattccctattatatgaaataggaaacagttacatctgattttatgctctttccagagtcttaagtgaaatagatatatatggccatgcttgagatcataaaccctggaccgctggtcaaactgtgacgatgaaggaagtgtgaatagtgaaaggggaattaatgctattttcgtaaaagtggggaagaatgggtcatttaaatattaggcaaacagatccacaagagacaaacagatggtagttatgggaaagttagatatttagtaactcgaggtgaattttcaccagcaaactaatattttttgcaccagtgaggtcaatgtagagggtattaaagaaatactaagaatgatttttctctttttataaaaacttgccacctttttttttttttttttgagacggagtcttgctctgtcgcccaggctggagtgcagtggtgcgatcttggctcactgcaagctccacctcctgggttcacgccattctcctgcctcagcctcccaagtagctgggactacaggcgcccgccaccaagcctggataatttttttttttttttgtatttttagtagagacggggtttcaccgtgttagccaggatggcctcgatctcctgacctcccgatctgcccgcctccacctcccaaagtgctgggattacaggcgtgagccaccgcgcctggccaaaaacttgcaacctttttttggggggagacgatgagatatattcactggaaacaattcaagaataaacagggtctggctcagtgtctcaagcctgcaagcccagcattttgggatgctgaggtgagaggatcactctgaagccaggaggatcacttgaagaccagcctggacaacacagtgatgagacaagagttcttcaggactggtttgcaaggtacaggtcacaaagacaccactgataaaatgacatgtagtaaagcagcagcccaaatctatcaaaaccaagatgcgatgaaagcaacctccggtcgtcctcacagctcattatatgccaatgataatgcactgttgtgctaaaagacactcgctcctaccagccccatgtcagtttacaaatgttatggcaatgtctggaagttaccctatattgtctgaaatgggaaaaccctcagttctgggaactccccacctt

SEQ ID NO: 915941 - DNA, 4001 bp, Homo sapiens
ccaccacgcctcctcgagcagagaaaggcggcttgccggctgtttcccaacctccaggccggcgacagaagggacccaggcacagacaccagttctttctttgcacaggggctgaggcaaggaggggagcaactccgggcttcccgcggggaatcccacagtagagggggctgcgggttgttttccagcgtgtgtgtgttggcctgcagctgtttctgccatttttaaatggctccagtcgggcaccgggcaccctgtgtaccaggggagctcccgagacaccgacgacttggatctcaactttggaaagcctccccttctcacggttctgaaaattctttgtcccactggagccaaacccagcccacggccgggcatccggccatcgcagccagccctttccataggaggccggggagcacgtggactttattgattttcctcttgccttttttgttgggtttgactcagaaaggacagctaacttgtgacaccgccacaccggaggctcgcccccagtggcttttagagaccgaggcgctactcgagaaacgacacccccaaacgtaaacatcccctgccacagggcctgcccagcttccaggctcgaaataaagggtcgagacgagcccgcgggcgctgacactcagagccagcgttgcggcggctcctctccctccgggaccccagtgaaggcgtgggaaaaaaataataaagttgaaatcaggcagcggggagttttcaacaactctgacccaacctggcgatctgcttgcgcctcgggcctggcccaggggccgattccgagcagaccccgacgaggccgcggaaaggttcgatccccttaatgtcgaccgggccacgccgggcggacgctaatgtgatcccgaaaaccacgcgcggccgccaccaagtccccctctccccggtgcagagaacaaaaacaacagctccctccgcaaaacaaacacgagctcccggtgtggagaggcagccgcggcccaggacgaacggcttctggccaaaaacatcggctggcccgagccccccgcccggggcgccgcgcagagcggggtgggacgtgggcgccccgcgcccctggccgctggctcccagcgctcgcccccatctttcctggtcgccgagagccctcgctccaggcagcccaaagcgctaaatttaaacggctcgcgctctgcaaactccgcagactcgagggcgccgggcccgggaggcgggagcgggcggccgggcgggccggggctggcggagggcggcggggcgcgggccggggtgcgcggggaggagacggcggcggcggcccgctcggagcctgcacaatggagctcgcgctctccccgccgccgccggcatcgcggccccggcgcgcgggaagccgctttcatgtgacttgcacaaaacgaaatggcttctggggccggccccgagcccccctcccgggagccgagcgccgcggcgggggccgccccgccgctccaaccgcctggccccggcgcccgccgcctccgggccgccgcgccaggtgggctacaggcgcgagcgcacctgggcagcggccgcggccccagcctggcgcaggtgacccggctcgcgcgccgcccgcccgtccgcccgccctcgccaagtcccggggcccgcggcggggctgggccggggcaggcggccggggcgctgcgccccgcggctctctggagccgcgctcgggctcggggcggccggggaggcggctggcggcgggcgcctccgcttaccatttgcgcactttctcgatcgccgccatgaccctcttgatatcatctttggcccggctcctcgtctcggctcgaaccgacctgcccgacatggttccggcggggagacggaggctggggagcgcgcccgccgggtcctgctcgcgctccgcggcggccacactcgcgcccgcccgccgctcactcactcgcgcacagacactcgcactctcacacgcacacactcacacacacacacacacacacacacacatacacacacacacaaagcccggggccgccgcgcgcctggcccagtgcgcaagcgccgggcggcagctgcacagagcagggggagccgcgccgccgccgccgccggcagtgcggcctccgggcgccgcggccaccgggcagcgcccccgggcctcctgcgcccccagaggggacgccccggacgccctcctggggaggtggcgaagggcgcacggcgacccccggctctgggcgcgcggtgggggcgggcgtgcggacacgcgcgctgacccttcctcggaggctgcaggtgccgaggggtccatgggagacagccggtctgcggggcgcgggggggtcgcgttccccgggagccagcccagctgcccctgcccagcccccagagcgcggcggcgggtgcagtcgtgcaagtttcttgcgggtctcttgacttctccgagttgaaggcaccggttcgggacgcgaggtgctcttggaaagagttgggcatcgcgcatctctgctggcccgcggccctgttcaaatgcgagctaggacgtcgcctgccccaggctttgtccttttggaaaactagggttgtaggaaggtgcctggtgccaggcagaccaccagagactctcgaccttgagtactaaagagttttctgctcagcaaaagctcaatgatgatcagcatcgtaacagggactcttcctcccgcccccagaagttctcttgtcataaacaaggcgagggggtcttcgctgagcttcaccagaggaccacgatttcaccttaagccattcctgacttcagtaccagactgagaccaggcgctgctactgcccaaatgacccctggtcccatctacaaggagcacttttgaggcctcagaacagagccccggggagaaatctgcgatgatcagggtaacctgggtgccgcatcttgctgttcagctgcagcggaaccggccggaccagagctaatgcgcgcccagaatgaagagggagaccgagagtggcccaaatgtcagcgccccgggcctggagatgacagcccgacagcagccatttcacagctggggaaactgagtcctgggaaagtttaaggttgcagccttaagttgttactcattctagacgtttcccctgagggtttggtctttggggaacacgctactgtggaaatggagagaccgcaggccttttcctaggcatttgtttttactattctgaaacgcagtctcctgacgtgaaaaatgaagaaaagaacaaatactggccgggcgcggtggctcatgcctgtaataccagcactttgggaggccgaggcgggtggatcacttgaggttaagagttcgataccagcctggccaacatggtgggtgaaaccccgtctctactaaaaatacaaaaattagccgggcgcggtggtgggctcctgtaatcgcagctactcgggagtctgaggcaggagactcgcttgaacctgggagacggaggttgcagtgagcagagatccagccactgcactccagcctgggagacagagtgagaccctgtctcagaaaaaaaaaaaaggccgggcgcggtggttcatgcctgtaatcccagcactttggaggccgaagtgggcagatcacgaggtcaggagttcgagaccagcctggccaacatggagaaaccctgtctctactaaaaatacaaaaattagctgggcgtggtggtgcaggcctgtaatctgagctacgcgggaggctgaggcaggaaaatgcttgaacctgggaggcagaggtgcaatgatcatgccattgcactccagcctgggcaacagagcaaaactgaatctcaaaaaaacaaaacaaaacaaaataaaacaaaacaaaacaaaaaaagaaagagagaaagaaaaagaaaaaaaagagaaagagaaagaaggacttcagagaatcgttccgagaattttctgggaaaatatgcaacagcaggtcataaaa

SEQ ID NO: 915942 - DNA, 4001 bp, Homo sapiens
ggctggaatgaaggccacctgaatcttaacagtgagggtctattttacaacctaacaatggttagtggtggattaaaatctgtcctgaggggaagaagacaaatgagaggctcacgcaaaaaaggagttccataatgcgaagtcagtggcaatcaaaaggttcagatttttgagactgtatcttacacaatatctgatggccatttaaggagacatgtaaagaaaagtacctgtataccaaacttattgctgtataaagaacagcaaaaacaataaattccctgtacagtagtttgtagatgctgcctctccacttgaggagtaacctatgaaatccaaaaaaagttgcatttgctactttactggagtaagtgacagtcatcttggatagttttttctagaagagcaagaagacaaaacacaagtaaaaagcaatgtttaaaatagggcataaatctgtatgtctgtatatcaaggaaattcaagccagcaactagtcagccatatctctgttttgtctttcttagtttctataattcggaactttcagataaccattatctcagtttagcagaaagcaggaggaaagcagtctctgggaagagtaatattagacatcttaaacttgccttaactgttaaatattatttttagattatatagccattggccaatatatatttgaatgaacaaatgagacaaacaaggccctcgtgagaatttaattgatggggcacttttggtgggtttgattgcatgtagatgtctctctagtggaggtccaaatgcatcgttagcactcattgcatttcaaaagtcagccaaaaagttgggtcatagtgataaataagaatggtgcagtttccccatgacaagttgtacataaatgcttagggatggttcacattctctttggagttgaacaaaatgaggtcattatttacaactctttctacttgagtccatttcatgaatgtggttaggatgagcactgggcccaaaagccttgtttttggtgagttctttggaattccaccacttttcaccaagacattaaatattcaggttttgaaacagacagcgcaaagctaatctttgaaaatcttgctcaatttctggctaagatagaacatatgcaaataaaatgagatttatttaaaatcttacttttctcaaaaggatctatgaggagagtcttatagagctacttagactgaaatcatgaagcttttagatagaattgtactagacacaaaaaataaattctgtagcagatttcttttgtaaagtagcctacaccacacattttatcataaacaagaaaattttctatctttactcattgctggaaaaacaattcaactctgatttgcctattttccctaaggaaatgaaactctggagctacgtttacagcattttctaaaatcacaaacttagctttcaacattactgattttaataaagaaggtagggccttttggcacaagtaagtggcattacaaaaggatgggactcatgccacaaaaccggttttatttttccatctttaccttgtctatttgcctagtgcgaatacagccaaaattgggagaggagcataataaattaaacccatttcataatttgttctcatggactcccggtagttttaaataacagtccttaattaactttcctttctttcatttagtagttcactcttcttttcaagctctgccaggaaaatgaaaatcacagcaagtagaggtcagaattaaaatgcataggtttactctgggcactaacctatttatttggtttgtagtctccgacaggaaagagaatcttcaaatttcgggctcccccgaagaggtgccttcaggtcggtgctgcacgcccggtgtcacccttcgctcgtgcacagtcagattttctttctgttctctggccactgagaggacccagagtgtgacaagaacaggggttaaatgtttttccacttgtagaggcctgtttatgccagtttagccactgatgacagttatagctgggaacaaacagaagcaacagctgctgatgctgcttttttctaagctataattataactccacctgccaccccaagtacccctttgaatgagaagttggcagtgacatgaaggatgttgggccgtttgtctgttagattcatttgactccaccctgggatcaaggaagaaaggttgatttggccctaaagagttcaaaaaagaggccccaccagccaaaaaaaaaaaaaaaaagtctttttgtgcttgaaatgaagattaaattcttaaaactgggctggaacgcggtggcccacacctgtaatcctagcactttgggaggctgaggcaggcagatcacctgaggtcaggagttcgagaccagcctggccaacatggtgaaacgctgtctctactaaaaatacaaaaattagctgggtctggcggtgggctcctgcaatcccacctacttgggaggttaaggctggagaatcactggaacccaggaggcggaggttgcagtgagctgagatcacaccactgcactccagcctgggcgacagagcgagactctgcctcaaaaaacagatgaaaaaattcttatgaagccataaactggggcagacaagaatataaacaggatttttgccacttgagaggtgttgaaaatgttcttcaattaaaagcaacgattatgtgttagtgtgtgtgtggtgtgtgtttgtgtgttagaagaacacatagagaatcatgatatattgatggcttagtgtagtgggaaataataacacatggattcatcacattttttttcttttaagatggagtctcgctctgtcgcccaggctggagtgcagtggcacgatcttggctcactgcaacctcacctcccgggttcaagcgattttcctccctcagcctcccaagtagctgggattacaggtgcacaccatcacaccggctaattttttatatttttggtagagatgaggcttcaccatgttggccaggctgatctcgagctccttacctcaagtgatctgcctgcctcggccttccaaaatgctgggattacaggcgtgaggcaacgcacccggccagattcatcacatttgttatccttccatggtcagctaggaaattttttctttttttttttgagatggagctttgctcttcttgcccaggctggagtgcaatggtgccgatcacggtgcactgcaacctccgcctcccgggttcaagcgattctcctgcctcagcctcctgagtagctgggattacaggcatgcgccaccatgcccagctaattttgtatttttagtagagacagggtttctccatgttggtcagtctggtcttgaacccccgacctcaggtgatatgcctgcctcggcctctcaaagtgctgggattacaggtgtgagcccaccacacccggcgcatagtttctttcttttcttttccttccttccttccttccttccttccttccttccttccttccttccttccttccttccttcgttccttccttcgttccttccttccttccttccttccctccctccctccctccctctctctctctctcttctttctttctttctttttttgagacacagtctcactctgtcgcttaggctggagtgcaatggcacaatcttggctcactgcaacctctgcctcctgggttcatgcaattctcctgccttagcctcccgagtagctgggactacaggcgtgtcccaccacacctggctaatttttgtatttttggtagagagggagtttcaccatattggtcaggctggtcttgaactcctgacctggtgattcgccctcctcagcctcccaaagtgctggaattataggcgtgagccatcgcgcccagccccatattttctttcttaaaagagagaattcaccagcgttctttaagtaataaaataaataatttcagggccaattcctgggacttttccaaccttc

SEQ ID NO: 915943 - DNA, 4001 bp, Homo sapiens
ccagtggagtctcatcaggctccctgtagtcatagaagacagtcaagaatctttacattaagattccagggcaggccaggtgtggtggctcacaccagaaatcccagccctttgggaggctatggtgggaagattgcttgaggccaggagttcaagaccagcataggcaacatagtgagactctgtatcaaaaaagaaaaaaaggaaaaaaagggattaaacaaataaataagtaaattggccaggcacagcggcgcacatctgtagtcctagttgctcaaaaggctgaggcaggaggatggcttgagcccagaagtttgaggttactgtaagctatgaccgtgctactgcactccaggttgggcaactgagtgagaacgtgtctcaaaaaaaaaaaaaaaaagactccaaggctttaagaaaattaaagggtgtttttttcctcagaggttactgtcttataactactcttatgaactactaaatacagacagaaactatttattttagagagagagaattgcaatgcagagatgtaaagtttaactgtaaatatatttgtgcttgtttatgacaatgattaatttaagataagatttgtagtaaattttactaatccttgagtatggggaccatatttgttctgcttataagggtagtcccagtgcccagcacagtgcctggcatatattgtacacacaataaacctttgttgcatgagcaaaggcgtaatagttctagcaccagcttggtaatgtttctttaagaggaatgtatataatttcctattacatatcattgtgcttctggtaagtaattttgaagataactactttcctctcctgatgcttgtaaatactagataagatgttttgattcagtatgagaccatactatatgcacacaactaaggtcatcacttgactcagccaggatctggaattgtgcatctgacttgacttggaatgaatgacatctcccagggcaggtgattggaatgactggaattttccagagcagatttgtagccaataggcaaaagtaacagagactgttgcagtttctctgataaataactgatcacagaccagttcagggacttttcagcataatagacattattccgaattccactgttgtatttttattttcatataagcagaaacaaaaacttttttatttttaatttgagaaatttaacctgtagcatcaaattatatatatttccccagcagcatgtgttttggtcttgttatttttcagaataatgtaacttgactgtccaacttaaaagcaagagaagttcaaggatgagcaggtatgtgacctagttcaaccagcgccagccaagaaattgccagatgcttcagaaggaggtgctggtcctcactcttggccctctcgcttatttccttctggccagcactgaatctatggaggcaaaaacccttgcagaagaaagagaagctggagggaaactgattgcctcaaagcccattgcttcccagagcacaagccagggaccaccagcctcagagtctccaggagtttgttcaactcattgattcctggagcccattccagacctactgagtcagaatctctgggagtggtatcgtgggatccaaatttttagcaatattgattttaacaatatgtaatgcaccctgaagtttgagaacatgtactttttcttacaggtgattttatgtagagaattcaactgacaagaaggtccctcgtgcccttaaccttgtccccacccctttggggccctcagtgctttacttaccagtcctctctgccctcaggcaggagcaggtgctccggctttggactcagggaatctgccaaacattttccgccatccctgaacttcctgttcttcccagaaaccttggcacaggcaaaggacagtcagagagtggcggaggcatatgcccagttggaagaacttggaagcagaccccatgtgcagactctgagtcagccctctctgctggggaaagcagcaggaagttcagtgagtcagcgctgccggtgacagcgggtgccggcctggggcagccaggaagacaggcctccgaagcgtctctcctggcttagaggatagtggcttggaacctttgccctgccgcctaacacacaatgcttgcgtatagtatggtcttatactgaatcaaaacatcttatccagtatttacaagcaccaagagaagaaagtagttatcttcaaaattacttaccagaagcacaatatattcctgtggggacaagatgtacctactacctcttttctgccttttgagaaaatacttaggaattaatgagagcaactgggaccttttcactgagataatcagtgattgtgtcacaggacccttggaaaggctttcacctcatcacagctcctctgtcaattctcttctcccttcatccgcttcagacaaaccaaccaaaaagtttaagtcagaacaatgcttgttacatccaagcaggtggaattcagatcccttatacagtagcctcccaccagactgcttcctcaaagctcttctttgtaattcatgaccctcaagctgaaacctcgaatccatcctttcttaattgctgctgctttgttatcagtaatgagttggtggttgccaaagccttttgccccaggagtgagaaaaagggtttaaaaaataagcatcccagaaaagatgcaatacttctcaaactttggggtactaaaaaaaccaacacaggagcatgtttcactgcagattcctaggccgtacatccaaaggttctattaggttctataataattcagagggactgacgtgggtgggacccaggaatatgcattttaaataaataaactcaagttattcaagatgtagagggcctgtgggtctgtggatcactcctagagactagtttaaatgtacatccagaagtgaaggactcattttgagattcccttggaatggcagaaacattggtagctgagcagatagaagtatttcagtattccacatgcctcggaaagggaaaagtctgaatgcaagtacatggcagacatctgtacaattttgagagggagtgggcctttgtattctgaaaaatacactcaaaggaaatgaaatcacgtcattttcctatttgcctccctatatctacttgcccctcagacctgagcacagctcagtcctcggagctcatgtctgaccagaggccccagaggcctctccattgccagccaacctggcttcttcctggtgtgcttttaatatgaaggtgacactaagaagatgagatttgctttgaggattggacccggcatctgattcctgtcagaatgcactctcttcatttcaaggatgcgtcagaactagagaaatatcacctctgttcatccaagtaaactttagctcatcaacttggaataggtcatacgtttcttgtttgtttttaggtctttcttagagacggtaattcttaatctatttgttcctggagacattaaggtaagataaaattgagctgtctagtagcatttttaactaggtcattctgaaacagtattctactttcatatttggaggaaggatggcaattaatttttttttaaagttcctactgattttacattatcatatacctgtacatgtgccaggccttcagaccctccccctgaatcccccttaaccaactcctggcacccattactttctcatatctcactctgcgtctctaacaacatcatctacacccttcttccttatttcaaccttgacattcacaacctcttgatcaaagtagataaaaaagacctgggatattatattaataacaagtcttctaaagtggctactgtgctatgttatgctgttgtttgagatgtaatttcattacaatggcaagaaattatgcagcacttactgtgtgccaggaatgctctaaacattttgcaaatgctaacttttttaatcctcataacaagcctatgggat

SEQ ID NO: 915944 - DNA, 4001 bp, Homo sapiens
ccgggagaggtattgcaagacttctttggcgcatgtttgaaatcccgagtggaacgcatccaagtcggactgaatgggcgatttcagagatcgctcccctaggatgaggaagggatgggggtgggggacggaggagtggaggcaagaagaaacatacccacgttaaaacatctgcttatcacgtgggccctgcatcgactaaagtgatctcggtttttccccagtattcaagtgatataatccaccagttgacgagagaagcggggtggcggaggtgcggagcggggagagggcgctctcctcccagctgaaaaccaaagtggagcgggtgcaaccgccactttaaatcctgattcctccgagttctgctgaaagcctctaggatgcttcgggaaatgggctcgttccaatgaagggaaagtataagcaatttaacaaatgagagggaacccatgagcccacggaaagagatggggtgcgggtgagggagtcctgacactgctcccctgtgggctgccccgcttcatcagggtaggctggcctccctgaactgacttaccattctgtaaagcaattatcttctgatgctgttgctcggttaaggcggttaaagcttttaagtgtttcaaagttaattccaagactacagctttctccagatgtcccagagtctgcagtggtgcaaaaaagaaacgggcacttggttacttaaaaacacacatttggcttaattggctgtccattcagcacagcaatttaagcaaacactttgaaagaagtactgttcttttacttcttgagctttccacaagacaggttataaatgatttcttgccttcagctgggagcacctactccagtttgcgggaaactctgtacggtatagcacaagttttaagtcaggaacttatatttacatttattcttatattttctgggagtcgcaccagactattaacacgcccttggagagcagcaaagaatgaaaatgtgcatcttactgtcaatttcagatgttcaggcagtaaatctttcagctgagcaatgcattcattaattcggtctcttcttttcttttctattaatctgtgcggtaatttgtaggtatccttaatatatgagagtcatggaaaagagaaaacagtaagcgaaacattcacttattggatattaccctcgtctgccccccccgcccccccaccataaaacatactatgtgataaactacacccaagaaacctctttcctctggactgttctgcaatgcaatttaaattcaggtatgatgtttaatatccccctgagagtacccagcaagccacttaaaattcacagttggggaagctcaggggctggaatatatttgcgggcagagcttcactgtgaaatcaatggctctaattaactacccatgcaggttatgaggaatatcgggaacttacacttaccttggtgtcgtctcgtttcatgctccttttgggtttacacatatacaaagaggaatagtccagtctgcaaaacagaaatcagcatcaggcacccattcggggaggggctctgccctcgccagctccataccactttctggagaagaaaaaaatcaaaccaaagcctagacagatattcgcaagggtgcgtgcaccttaccctataaaatctctatgttccagtaactgtctctcttgcaaatgaggaattccttcgtccatgttcaactgctgttcgtttcctctgtttcgatttttggggctctgtacaataatctgtgggacggtaggcttgggagaccttggggggatctgtgcgtctccagtctctctctcgctctccctcttcagtgcagtgttgaaagtgtgaagcagttggtcccccccctccaccgcgctcgcacacacacacgcacacacacgcacactcgcgccggccccactgcgctggtagtttgctctcactccaggcagtgtttggccacagggcacgcgcgtcgccggccagaccagcacccagctcacgtgcggaacgtaccatccgcggtccagcccggaggggggcgggggaggaggggccgggccgggcgggggcgtcgggagaaggcggcgagagaaggcgaacggcaggagggggcggggacacctgatcagggccaccggaaaggaaaaacaacttcggccaagctattcatcttcccaaaggcgatgcagtcggcaggaggaggggggagtgggggtgcaggggtgcggggcagcctgagcttccttggctccaaaatgcgactccctgggttcgtccgttgttacggtgcaggaatgtgaacgtggctttttgcttttccaccgattgtgctgttggtttgaaccatagaaaggaagtgaaaagagaattcgcggtgggtaaacttgagtcccaaaggaaattttggagacttgtttgctcactgatcagtggcctggagggactccttggcgctgggtggagaggttgcctcgagaagaagcaacttgcaatccgctccttgaaggatttaagatacatgaaaacgttgtcactgggtccgaatgtcgcaatccaagtgtctttcggtgacacggcgtccctgggccaactaaacttccccgcagcagccggaattgcggtgccactaatcacagcagcagatgacgacgtttggggccgcgtgtgctcctggaggaacgcggcggggagcgagccggggttgagtgggggctgggaagggagaagggggtggcacgagagggggtggcacgagaggggctaccacagaaaagctatgcagcatttatcacccgcccgctcaactctgccgcgttctgagcctccggtgacgctacgtgctttccccatccccccgcccccccgcgcgataagagacgcccggagtgtgcagagcccacgtttactaccgctggcacctccaaagcctccctccttaatccggtctcaaacgggtaccagcacagggccagcaacgtgatccgacctgccgctgctgccacatcactgctcggggaacccgtgcgcgcgcgcgctcgccctgcagccgcggcgctcggcgccgggaatcacaggccagcaagagccgggttacctttccccagagccaccctgggagcatgactcactgctagtgagagttaccgggaggtgcccggggatgcgcactgcccacgccgccctgccagcccaggggaaggcatgtcctgagggactcccaggggtgggatggaggctatatatatatttctctagatatacataaagacatagagaaaaaaaccaaggtttttcctgcacagagagggatatttacattctccccggggtgatctctgaaacgttgattattgccggtgataagtgaaccgaggggagaagaacgccaaaggtacatgcaccagggcgcagcagggactggggcgcccgctacgtgtcccccggcccgccccgccgggcacgggttccggggacggatctgggtcgcgggaagcggcggctgggaggaggtcacgtgtctgcgggagtcgcgtctcctccccgactccaggagcagcccgggccgcggcggccgctcgcgctgctgcagtctccggagtcctgggcggagacgcgcactgcgtctggcttcgtgactcgggcggcggcggcggcccaggatcaccccggcgtgaggagacgctcgcggtccgttcagttcatctgtttagagggccttttaaggtctctcgacttcctcaaatagaggaacgtattttgcaccaaacaggcaatttaatcacgatggttcttaatttaaaaagtatttttaaaatgctgactttattttaaatctcggtccgacctctctcctatttccaaaaggttaggtaattaagacccttcgatggggagggcacgttggagccctaaaagcgacctattcctgcagtactgtatcatttttacctctttttaattgactaaaaatgggaatgccgttaggtgaa

SEQ ID NO: 915945 - DNA, 4001 bp, Homo sapiens
ttgtgttaaagacttgggatgcaaagctcatggtgtagcaaaggcaaaacacaattgcattaaggtttgctatgcaaggtaagtgcaatgacagaaatatccctagaaggattgtttaaatcaagcagcaaagtcagtaagaggtacatttcattaaattaagtccatctcctttatcaagaaggtgatggcttaccactttctggtttgcacttccctatcttggcaaagcagtgttgataggtatagacaatatcaaaacatctctgagaatgacagtcatcatcctgcttcctcacttcacaaggtttagcatcactgcatttaaacatgtcagcctaatctaagttggaaaatataaacaagtccagctgttgttaagaccagacaggtacatggtaagtaaaataggaaccagaaatttacagcctgacacacaaaaattagattcctagttgggatttttaatcataggtagtacatttattttttggtagacaggcatccaaataaaaataagacatatctaaaagtataaatgcttaccatattacacactaaattggaaggcaagttgattcagtatgtcataaatcacatcttttaactgtaacagcataaaataaataatagatttttgatattatatgccaaacaataattaacatttaaatgtcaatatgcacctaaaaataaggacttgacacacagaaaaggagtgtatattacatttaaatttgtaagtggttatttgctacccatagtgcctcaagaatcagataaaaaagaccgagttacttaaacaatatgtatgttcttaagagtgactgataggaaatcaaagcacgttcattgttttctcccatacatccgacaggctttaaaagaggccaaataccaaaaaactaaagagacattatacatcacccatttttgatattctggttttataaatatatcatttcaaccagaagagcctcatttgaaatgcaacactacccacgtatttgatatacaccactctttcagactatttgtaggtgagttcaattttttctagtcagggtgacctcataagacttggacatggcccagcctcgctccgaggtgaaatcaaggcagtgggatcacccagcaaagttgtttttcttctgcagcccaatgacaagaatgactaaagccaagcagaatgaagattgcctagcctttgtcaaatgggattggtgaggagttccctctctcaccaaggagtggttacatccagaggaaagctgaggtgccacacagtctaaatcctgaaattgtgggtcctcaggcacaaacctcatcacttttgtggactacgaaattgtcgctgaaacctgggtttgagataacagcggttttgagaagtttgatttatacattccaacccacttgaatgtcgtcttagagtgctgagacttgatgactcttactaatctccctcccccgcaggccaaacagccattgcctcccaaattccagcttatatattcatttcttaggcaatttttctcttgggggaggaaacaatggactctttcaatcttctcttaccaacaaagggccctagaagaaaaaacagtcctttcaatcacctcctttatgacttcttgatcatgatgagtgggccttgcgggtggggggagtgagggccaggaaagggagaggtgacaggcaactcacctctttgagctgctccagctcctgtttgaggctgtcgtactcagcctccagttcatcatactgctgtttgagggtcagcttctcctccagcaccaccagcccgtactcggcagcctggatcttctcgtgggtggtctccgtgagctccttggttagcctctctatctcagtcttataatggtccaccgtctgcaatacctcttctgcggccatagccccggtggatggaggcaggagggggttacggggtgggggagatggatgcgaagctggcggggaaagggagaaggaaatgggaagggatgggtggaaacggaaaagaaagtgcggccggatgaatgagcagcgcgatgccccgccggctctggtggcagcggcagctacaccgcccgagaaactgacgagaaatgcaacatggagaacagggcagagggtcaggggcgaggcggcaaaggccgccgcatgtgtcctcggggccggcccctgcgtgcggtcagcagccgtgcggcatggcccgggctgcggcggccgcgggtagcgaggggctccggattctgcttattcagagacgcccgtccgccatgtctcccgggccgcgtcactgcagtctcgccctgggtctggcgcgctccggctcgcggctcgctctctcgctccacctgctccctctggccctgcagcagccggtgcggaatgatgcagtctcggggccggctccctcccttcccgcgtggcggcggctccgagcagggggcggggagcggatggagtcagcgcggggggcggagggaaggaccagacggaaacatcccgaggcgcctcccgccgggcgcgcgggccgccgcccgctgcaccgtgaggcgcgccaggaggaggcgcaggcgacgggtctgggactgggaagcggtggggcgcgcgcggcgggggagcctccgccctgtccggctcgcgggggcgggagctcctcccagggctttgtcccggtggcagtagaagaccccgagagcggcgtgggcgcccgggctcttttgctacgtcgagggccgaagctcaggaaactgcctggaacgctttctcccgagaaaagcaaacaaaactatcgcggtcgcggtccgcgcatcctcctcgtcccctgggcgcgcagaaggctttttgggccacctgcccccaaaagaccgctgggtttcccaaagctttcaagacgcaccccaaggcgccctcctccgtcgtccccctctctccctgcctctcccaagtctggcctgggccacctaacactctcaccagataaccttactatcctcacaggacagtccgctaaatattgctcgccctcacccagcgtatcacaagagcgctatccactcagaaaaaaaatatctccacaatacatgcacccaggaaacctctagctaggtactgtatatcttgccccaatagtttccatcaaagcaccttactctgtgtcttcaataaaggaaaactgcttgaaattccctatataagataccaacgatgccctgtaataagcattttttaaacaataagagctaagagttcttgagacccataccaagcattcttctaagtatgtaacatgcgttctctccaatcctaacaatgctttgaggtaagagccattatcctcagtttacagggggtgaaaggcaaagggagatgtgatttgtccaaagtcaggcaactctggaatcttaactcgggagcactaaacgggatcattatgttggcttcaggttcactcattactcatacaaacccagcaactacatattacatgcttttaagataatcacattaatccatatgaagagtgatgatgaacggttacaaaaggaggtgaaagcaaagtaagagtggagtaaatgaaagagtggagaagggtcgagaatcaagaggaagaacgcaacatgagagaaaagaagcaatttctgtgtaacgggaggctgtgagacccacagatcagtgggtctttccagttccctctcttcttctgcatggcacctattccagagctgtttctcagtgaccaggtgatgaacacacatgcgttttctaagttagaaagcaggactcaactctcccatcattgtgtacctggtaaaaaaaaaaaaaaaaaaaaaaaagatgattgttgaccgggcacagtggctcacgcctataatcccagcactttgggaggcagaagtggatggatcatttgaggtccggagttcaagactagcctggcccacatggtgaaatcccatctctactaaaaatacaaaaattagcca

SEQ ID NO: 915946 - DNA, 4001 bp, Homo sapiens
ccttcccataggccctgctctcgggtctaccagatttgtaagtcttcagagaggctgaaactaggatcaaggtgaagttagggtaagtgaagtaacgaagtctggctacacgaactctttcccttttcctcctctctttcacatgacctcaaatgatagaaaataacctcccttccattgtggtctcttaaagtcaggagctacatctacattccatcagttttctgctgataaatcaactcgggagagctggttgcctttaagccttcccagggctcaaagcagtgctccacttttagaagataatagggatatttcagttggtaagcagagctgttcatccaaatgcttctaagtccatcagctcttagaaaaccaaaacttctccgttgtagaaggcaggttgggcttaataaagagagagagaaaaaaaggaaaaccgaaactctatctcaggtccttcttgtctttcttccctcgctctttcttctggctgacatgtcttcccaaaccgccttgtctactagagggttggtaggtggagagcagaggctcaggttagaagcaaagaaaatattctgtacaggtagaaacaaaaatgccatcaaaatgtgtagagaatgtccccacaatttagattgccaagcaagtaatagatgggcagcccacctaagtgccagtgctggagcagggctacctgacactaaccaaggacacactctgaacacagatgtggttcatcaccctgggaggtgtactccccaacgccaaagggagggtagaagaagcagatttgggctcctgcttacgtcagctgaaacaccacccagaggccaggcagggtcaggtagggggagaactatgcaggattattctaagcctttggtggggggtgcctgctggcatccgctgcatcgctgtttttggggaaattgccctctatggaaaattaccctccaatttcatcatctgtaaaataccaattttggattgctagcacaaaatttgatacaaaggtggccaccaccatcacttcctttctttcaccttttctgggtcagcctgagggttgtcgaaggttctgcccagagactgttgtctccccagcttcccttatccttgcccaagatcgggtggcggtctccgacctctctccaatctgccagttttcatggaagcccactcctcgctcccgtttccctgggagagcgggagacccttctcgtcagcccagacccttcggggcccctgagcaccctgcccgcccctcctgcccggccgggctcggcctcggcctcggctccctgtgggccagacagacagcgaggcccggccacctaccttctcctgggccctgctaaacttcttctgcacctgcttggcgaagaggccggccgcgccgcctgccttgccctctgccatcctgccaactccctgggggccgccgccctggccccgcgccctgtggttttctgaggcccccgaggaggaagtgcgggctcccggcatgcctcgcatccggccccagccctgagccacctcaggccgcccctggccagccctgaggcccgcccctcagcccaccactgtcagctggagcaggccggctcggaggggcgggcccggggcctaccctcaggcagcgctcgctcgaggccagcttccgagctccaacccctgcccgaaacctcggcctcactgaaccaggtcctcagtggtgggcccacactcactcgctccggaaagccagttcccatcacgctgagcactgcaaagcaactgccaccgcagggtagaaaatgatgtgggttccactcagcgagaggacctaccatatcgaaaacacgtttaggttctctgagtatgcatgcgaagccgccatgtacactgcgtttcttgctccaggtaggctctaagcctggaactggtagggatagagtgcagaaagcaggcaggacacccgagccgggcttgaaagagagaaacaggccgggcgcggtggctcacgcctgtaatcctagcactttgggaggccgaggcgggtggatcgcctgaggttaggagatcagcctgaccaatacggtgaaaccgcgtcgctactaaaaatacaaaaattagctgggtgtggtggcgcacgcctgcagtcccagctactcgagaggatgacgcaggagaattgtttgaacccgggaggcagaggttgcagtgagccgaaatcgcgccactgcattccagcctgggcgacagagcgacagttcgtctcaaataaataaataaataaataaataaataaataaataaatgaggaacaactaagctggagatagaaacagggtagggggctggttcttaggcaagagaatgatcacattgaaaaaaggctgaggaggatagtatggacgcccgtgctgagcatgaggagcaagtttttctagttggagtacagtgtactggatggaggcagaatgtgaacacagacacagattgtgcaaattggggtgcggctgttgagatgacaactattgtttctttagggagaagttctccaaaaaattcctccctgacctgtttgaggggatagcttgagattaggacactaggtgtggaggaaccacgtactcagattttacagtgcaggttaaaatttcctcaaggcagggaagaaggtcaaaataacacttcctaaggagtggagggggaagatagggcctgacacaaaattagaggcccttgtatgctactgtgttcctcttctttctccaaaacaatcattactgcactcaaggtcaactgtgtaccaggcattgctgggtgttctgaaacaaggatgaataaaatgcagtccctgaccttaagatgcttaatgaagtctggccgggcaccacggctcacacctgtaatcccaacactttaggaggctgaggcaggcagattgcttgagcccaggagtttgagactagcctgcgcaacatagcaagaccttctctctgctaaaaatacaaaaattaattgggcgtggtggcacacacctgtagtcccagctatcagggaggctgaggtgggaggatcacccgagccaagggaggtggaggctgcagtgagccctgatggtgccactgcattccagcctgggcaaagcgtgaggccctttctcaaccaataaagaataagtattaataaataagtacataaataaagatgcttaaagtctggaagtggagataggtgggtaatcaggtgattctaatgtaatgtgcttaatttatttgtagagatggatacaaaattttctgggaataggtgattagggtttgtttgtttgtttgtttgtttggagacagggtcttgctttgttgccaggctggagtgcagcagtgccatcagggctcactgcagcctctacctcccaggcccaagtgatggtctcacctcagcctcctgagtagctgggactaaggtgcgtgcatgccaccactcctggctacccaggctgatctggaactcttgagctcaagcaatccacccgcctcagcctcccaaagggctgggattacaggtgtgaaccaccttgccctgccaggcgattagggtttattctggatgttagctttggtgatgccctggaagaggcagggtgatgaaaatagaaggacttgatattggatggggagaagtggggagaagcatggagaatagcagtactgcgggaacactgagagtagatggcaatgctaacaggtgtgtcactggcagaaggaggccagtacctgtgtccctgccaggactacatggcatcctcagcaatgcaacccagccactgtctcctaagaaactctgtttagtgccaatatcttgcaaactgaaattgatggtcaccaaatcatgtagtgttagagaagaaacaacccttagaagttaattagatagggaaattgagtcacagaaagggctgatgacttgaccacagccacccagctcctcagtggtggaactgggatggg

SEQ ID NO: 915947 - DNA, 4001 bp, Homo sapiens
ttcatcaagaacatcaaccctctcattttacaggtgcaagatctgaagcccagagcaggacattatttagccaaggtttggagtctatgcttacaaaggagtgaaagcccaaagcaaggttttagtgttgacgagaggctagatgaagacagaagatgcaagagtgaaatacaatcaattgtatgtcttttatttttatgtatttatttttattttttgagacagagtctccctctgcttgagtgtggtgtggtgtgatcactgctcactgcagtcttgatctcctgggctcaagcagtcctcccaccttggcctcccaaagtgctgggattacaggagtgagccactgtgcctggctggtatgtctttttaaaattactatcattcatgagtgttttgtcttttagggtttttttttttttcaaccacagtgtggccttctctccagtacctcctgctcgcccacactgtttcgagctagaccttcccataggccctgctctcgggtctaccagatttgtaagtcttcagagaggctgaaactaggatcaaggtgaagttagggtaagtgaagtaacgaagtctggctacacgaactctttcccttttcctcctctctttcacatgacctcaaatgatagaaaataacctcccttccattgtggtctcttaaagtcaggagctacatctacattccatcagttttctgctgataaatcaactcgggagagctggttgcctttaagccttcccagggctcaaagcagtgctccacttttagaagataatagggatatttcagttggtaagcagagctgttcatccaaatgcttctaagtccatcagctcttagaaaaccaaaacttctccgttgtagaaggcaggttgggcttaataaagagagagagaaaaaaaggaaaaccgaaactctatctcaggtccttcttgtctttcttccctcgctctttcttctggctgacatgtcttcccaaaccgccttgtctactagagggttggtaggtggagagcagaggctcaggttagaagcaaagaaaatattctgtacaggtagaaacaaaaatgccatcaaaatgtgtagagaatgtccccacaatttagattgccaagcaagtaatagatgggcagcccacctaagtgccagtgctggagcagggctacctgacactaaccaaggacacactctgaacacagatgtggttcatcaccctgggaggtgtactccccaacgccaaagggagggtagaagaagcagatttgggctcctgcttacgtcagctgaaacaccacccagaggccaggcagggtcaggtagggggagaactatgcaggattattctaagcctttggtggggggtgcctgctggcatccgctgcatcgctgtttttggggaaattgccctctatggaaaattaccctccaatttcatcatctgtaaaataccaattttggattgctagcacaaaatttgatacaaaggtggccaccaccatcacttcctttctttcaccttttctgggtcagcctgagggttgtcgaaggttctgcccagagactgttgtctccccagcttcccttatccttgcccaagatcgggtggcggtctccgacctctctccaatctgccagttttcatggaagcccactcctcgctcccgtttccctgggagagcgggagacccttctcgtcagcccagacccttcggggcccctgagcaccctgcccgcccctcctgcccggccgggctcggcctcggcctcggctccctgtgggccagacagacagcgaggcccggccacctaccttctcctgggccctgctaaacttcttctgcacctgcttggcgaagaggccggccgcgccgcctgccttgccctctgccatcctgccaactccctgggggccgccgccctggccccgcgccctgtggttttctgaggcccccgaggaggaagtgcgggctcccggcatgcctcgcatccggccccagccctgagccacctcaggccgcccctggccagccctgaggcccgcccctcagcccaccactgtcagctggagcaggccggctcggaggggcgggcccggggcctaccctcaggcagcgctcgctcgaggccagcttccgagctccaacccctgcccgaaacctcggcctcactgaaccaggtcctcagtggtgggcccacactcactcgctccggaaagccagttcccatcacgctgagcactgcaaagcaactgccaccgcagggtagaaaatgatgtgggttccactcagcgagaggacctaccatatcgaaaacacgtttaggttctctgagtatgcatgcgaagccgccatgtacactgcgtttcttgctccaggtaggctctaagcctggaactggtagggatagagtgcagaaagcaggcaggacacccgagccgggcttgaaagagagaaacaggccgggcgcggtggctcacgcctgtaatcctagcactttgggaggccgaggcgggtggatcgcctgaggttaggagatcagcctgaccaatacggtgaaaccgcgtcgctactaaaaatacaaaaattagctgggtgtggtggcgcacgcctgcagtcccagctactcgagaggatgacgcaggagaattgtttgaacccgggaggcagaggttgcagtgagccgaaatcgcgccactgcattccagcctgggcgacagagcgacagttcgtctcaaataaataaataaataaataaataaataaataaataaatgaggaacaactaagctggagatagaaacagggtagggggctggttcttaggcaagagaatgatcacattgaaaaaaggctgaggaggatagtatggacgcccgtgctgagcatgaggagcaagtttttctagttggagtacagtgtactggatggaggcagaatgtgaacacagacacagattgtgcaaattggggtgcggctgttgagatgacaactattgtttctttagggagaagttctccaaaaaattcctccctgacctgtttgaggggatagcttgagattaggacactaggtgtggaggaaccacgtactcagattttacagtgcaggttaaaatttcctcaaggcagggaagaaggtcaaaataacacttcctaaggagtggagggggaagatagggcctgacacaaaattagaggcccttgtatgctactgtgttcctcttctttctccaaaacaatcattactgcactcaaggtcaactgtgtaccaggcattgctgggtgttctgaaacaaggatgaataaaatgcagtccctgaccttaagatgcttaatgaagtctggccgggcaccacggctcacacctgtaatcccaacactttaggaggctgaggcaggcagattgcttgagcccaggagtttgagactagcctgcgcaacatagcaagaccttctctctgctaaaaatacaaaaattaattgggcgtggtggcacacacctgtagtcccagctatcagggaggctgaggtgggaggatcacccgagccaagggaggtggaggctgcagtgagccctgatggtgccactgcattccagcctgggcaaagcgtgaggccctttctcaaccaataaagaataagtattaataaataagtacataaataaagatgcttaaagtctggaagtggagataggtgggtaatcaggtgattctaatgtaatgtgcttaatttatttgtagagatggatacaaaattttctgggaataggtgattagggtttgtttgtttgtttgtttgtttggagacagggtcttgctttgttgccaggctggagtgcagcagtgccatcagggctcactgcagcctctacctcccaggcccaagtgatggtctcacctcagcctcctgagtagctgggactaaggtgcgtgcatgccaccactcctggctacccaggctgatctggaactcttgagctcaagcaat

SEQ ID NO: 915948 - DNA, 4001 bp, Homo sapiens
aatctcacaaatgatgggcacagcagagcccaggaggtgccaatgtgggagggaggaaatgggagggcagaccctgttccttctttttgggagacagctgggtcactgtcaagggtcgggtaggaactgaaacagactcccctgagaattcctgaacttctggttttccccattgaccacctgcttctatattcacactgagtaaagagagctgcctggagagaagggagatcagaggccccagccacaactttctttctctcaaccttcccccaagatgagtaacaaagatgaccccagcccctgcatggctcacttggatgactcagtctctggattcacaccgagctgttctacttgacctggggtggaaggtaccatactgcctttcttccaataggcagactagcaaatcatcatctctgcacgcttctgggtcacttagggtcaagagacaatgttctttgctttttcccaagtctttggctgttacttgcattctcatttagggctggggcagggtgtggtccctagagacccaataggaaggtaagagacagcctggctctgccatagctcccggaacaggttctactctcaccaccaccagctctgccatctctttcctgccagctgctccccaggcttgccagagggtgggaggcagaggagagggtggtaagctgtaatgaaggagggtgctctccctcctgctgaagtgacagctggacttggaagggtgaagggaggtgggcagatggcatcaagttgtaaatgccagggaagttaacgtggggaaggggaaatctggctgcttctctaaccacggcagctgttcctcccttgcccagtgctaggactcagagttgactcaagttgctctacaaagagctgggaggggcggggtaggataggggaattagtggaacatcccaccccttcaacagctatttgagggccagactggccagtgcctaaacttgggcggggtggggaaggaggaaactgatgttgataagaggtccataccccacattgaggtgatccaccaaagcttctgtcaggcaggtcgctgcagtgatagcctctcgcctcctcttttctggggagagggggaaaaggaattggaggggagacttggttttttgaggggtagtgttaaaggttccctacccatccattactattctgctagttgccgaaatttcttaactaatctctgaatgccggagctgaaaaggaccttgcaaaacatagcgcaacctctttcattttagagatgaggaaactggtaccctgggagggaaatggactcactcagggacgccaggaagtcagcggcagcgcccaggactcctgactcccaggcactctttctccactactcggccgcagaatcggtaactccgagatttccagcccggactcaggaaacaagtgccccacctccgttccggtggtttcaggcctccaagaagcccatctctggggggttccccacaccctcctccctccagagtcgctccttcccgccgccaggacgagaggctcccagggccaataggcagggcgctccggggcaggggcggggctaaggtgcggcaggtcggggattgggggcgttgccgaggggaccggagtattgcccaagggaccggagccagttggcaagggaaaggagtttcaaaaaaagcctctctgaaattccctctcccccatgcccgttgcccgctagctggcgtctttccctggatatggttagttactcgagatccaggctccgggctgaagctaggccgcggccgaagagaaaacggccgacaggatatttggctcaccctgcagctccttgcgttcattctgcttggcctggtgttcttttaggaggcgggacagcatggtcacgtcgggctgggggctgggtacgccgggccccctccggctccggaagctggaacgctcacctcggctccccggggccatgtcacgtgaccgctgtgtcacgtgaggttgggaaccgccctcttgagaccttgggtgaagatcttggcggggaagagaggtagagggttgcggagggcaggtgaagtgttctttattgggagcttagtttttggtgagtgttggaagaagtattttctaatacttatattgccaagccagtttttaacatttcctgtggatctcaggcttcgagggctggtggtgtcaggccgtctatcaccgtttaattgagggagcagaagctccctggcctcatttaaattattctccttccctctcctcacctcctggcagtgctagctggttctcagttgattcccagttccttccctcaaggagaggatgctttcctgtctctcccaaccctctttcttctcactaccccactgaagtctctcagctctgggtgatcattgtagagaagcattttaggcacttcagacagcctcctagggagcttggctaacttggcgggctgtgtgaatgtagaatttcatctctgtccttttgtggtcaggaatgcgaacccatttcagtgttagcagaagcgtaagtgctgtgccaaagtaaaaagtaatttatataaggcctctgtgaactaaaaagaaatgcttccgggattaactccagcgagaacaattataaacatcatgagcatattcttgctactggtacaatctctctcggtgcaccttgcactaacatgttgggtgactttgggcaagttgctcaccattctaggttatagttttctctttagtaaaactaggagaagggattggattaaatcggtggttctcaaccctggctaagcattagaatctaaacattagaatcacagaaatcacaaggcttataaaaatgccgtgattagccgggtgcggtggctcacgcccgtaatcccagcactttgggaggccgaggcgggcggatcacgaggtcaggagttcgagaccaggctgaccaacatggtgaaaccttgtatctactaaaaatacaaaatttagccaggcgtagtggcacaagcctgtaatcccagctactcaggagcctgaggcaggagaatcgcttgaacctgggaggcagaggttgcagtgagccgagatcacgccactgaactccagcctgggcgacagagtgggactctgtctcaaaaaaaaaaaaaaaaaagccttgattccagactaattaaatagaatctaaggagtgaagaccaaacatcactatatatatgtatgtatatatgtatgtatacgtatatatgtgtatatatgtatgtatacgtatatatgtgtatatatgtatgtatatgtatatatgtatatataaaattattattatttttgagacagagtctcgctctgtcgcctaggctggagtgcagtggcatgatctcagctgactgcaacctccacctcccaggttcaagcgattctcctgcctcagcctcctgagtagctgggattacaggcatgtgccaccacacctgactaatttttgtatttttttttttgagacggagtctcgctctgtcgcccaggctggagtgcagtggcgggatctcggctcactgcaagctccgcctcccgggttcacgccattctcctgcctcagcctcccaagtagctgggactacaggcgcccgccactacgcccggctaattttttttttttgtatttttagtagagacggggtttcaccgttttagccgggatggtctcgatctcctgacctcgtgatccgcccgcctcggcctcccaaagtgctgggattacaggcgtgagccaccgcgcccggcctaatttttgtatttttagtagagatggcatttcaccgtgttggttagactggtcttgaactcctgacctcaggtaatctgcccgcctcggcctcccaaagtgctgggattacaggtgtgagccaccgtgcctggccttatcagtatattttaaaagctgttctggtgattctaatgtgtatccagggttgaaactca

SEQ ID NO: 915949 - DNA, 4001 bp, Homo sapiens
aatttcaaaaacttgtaggggtagtcttaaacatcctggcttatgctcatgccatgaaccaagccatgaacatctgtgattactgtcttaaatcaatgaaacacatgaaaagggaaacggaatttggagacttaactgaaatatccctaatacatgctctgtcagggcagggacaaggcctgttttgcccaccactgtattcccagcccttataccacagtgccgagcacacagaggaagccctctaaatgtttgatgaataaatgactacatgactgacccatgcagatgtctatatgcggctaatatcaatttagctgactctcagaactcagaagccacttttagcctttggaaaggtgctcataagctataaagtcatattcaatctttaatttgcagcttcaaaggtcacgtcctcaggaagttcccaatgacaccatccctacctgcccccatccctctctccaaaccaaacacatcttcttgtaatactttcccaaattgtttctcctttccttcacagcacttaccacagttgtaattctacacatattctgcacttatttaattcatctgtttcctccatgatactgctggtgccattaaaacagagacgctgtctgattcagcacacaaggaaggctccagcagatatgagcataagttttttttttgtttttttttttgaaatggactttatctcttgtcgcccaggctggagtgcagtgccacaatcttggctcaccgcaacctccacctcccgggttcaagcgattctcctgcctcagcctccccagtagctgggattacaggcacctgtcaccacgcccagctaatttttgtatttttagtacagacagggtttcaccatgttggccaggctggtcttgaactctcaacctcaggtgacccgcccgcctcggcctcccaaagtgtgaggattacaggcgtgagccaccgcgcccggccaagtatttcttgaatgaatgttagttaattatctgaggaccaaggaacagagccagagctgcattccccactaaggagcttcctcacttgtgttaatggtgtaaaaagctcagactcaagtccagctcactgagttagaatcccagtttcacccattacagataaccttgggcaaatcaattaatcactaagcttcagtttcccaatgtgtaagaggtacatgtcacatccatctgcctcttagggctgttgcaaagataattaaagaatacaatacacaaaaggtgcttagtacagtgctgggatataggaagtgtccaaattttagttatgactatggttagggggcacttcaatggatatcgttccaaaagggaacaatttaattaacccagggaccgtccagcgttgctggggacccagtccctgcctttacgaagcccatagggaagcaagtgagacaaacacaccactcgactatctcgagagggagacgcgccaggtataaactaaatgccctcagacggcacagggagggaggttcggggcagggcttccctgagataacaaacgggaaggcctctcaaaggcggatgggaaagagagggatcccgattacctctccgtgtcttcctgggcaacagccctcgccgcgggcttttcccgggccagtgctttgggaagggaagccctccgggcccagacccggctacagggaatgcggcgaggccgcgggactcacccgcggcgctgaagccgaagccggcggggacaggcgagtgttccgcgagctccaatcggataacaaccagtgacacactcatagggcaggcgctggccggcgcgggccccggcgggctcaggcgaggctggaaggcgagccgagaggccgagcggcccggggccggcagcgccgccaccacctcaatgcagttgccgccgcctcagcagcagcagctcctcgaacagccctcggagccacaacaacctccacttccgcctcccggccgccgtcgctgacctgcggtttacgcatgcgcgcaggaccgcgcacagcgattgggcggcgtggcaggggtcacccactgctcttccggacgcaattttgaggaggtcggagcggaaggacgtcgtggagattgcttgcgctggggtgccacacttaggctgagctgcaggttttcgcacagtcgcgagttaacctctgcttgctccagaggcctcgtcctaatccacctcggctgacggcgcgggatccctggctccgcgaggtctccgaattgtccgagctatctgctatgcagaactttgccccttttgttgtgtttgactcctgtctctaaccctagtctggatggttttgtttctgtcccactttacagataggtacaacgaggctcagagaggtgaagttccttctaaggggccgtagagagtggagagtcgatcgctgttcagatagcgatctggctgggcgcggtggctcacgcctgtaatcccagcccagaggcttaggcgggcgaatcacctcaggtcagcagttcgagaccaacctggccaacatggtgaaacctcgtctctactgaacatacaaaaaattagccgggcttggtggcgcgcgtctgtagtccaagctacttgggaggctgagacaggagaatcgcttgaacccgggaggcggaggttgcagtgagtcgagatagtgctagtgcactcccgcctgggcaacaagagcgaaactccgtctcaaaaaaaagagagaaaagatggtgatctgctggttacgagcatagtgctgcagttagaccggggtcctcctccccaccctgtcacttcacaaatgtttactgagagtctagacacccttgggatgcttgagatacgttggcgtataagataaacacagttcctgtccgtactatgaggttgacctacatcagcagttgtgcagtcttgaactagtatagtcattgcataaagttggcatgatatcatgtcctcatgcagttgtgaggatgaaatggaattatgtatatggagataacattagcttttctgaggctcagcattctttccagtatgtcagagtggcttttgtatgtagatactgacacaatcaatgcatatgggacacatacatgacaggatgctactctaggtacattgtataatgatacatatgtaagtacatagtacattctagatgtgtgtgtgtgtggacatagtgcgttctagatgtgtgtgtatctggactatgacatgaccacaagatacatgcgtatatagatcttgtgactacatcctatgaaatacgtttccatatgccctgtttaaatcagggtttctcaactctgcactattaacattttgggtcctgattattcttttttgtttttggcaagggggcggggtgtcctgagcattgtagagtgtttagaaacatccctggcctgacccactagatgtcagtagcacctctccccaggtggtgacaaccaataatgtctctggacctttccagatgtctccttggggttagaaaacataaccctgttgaagaatcacagggttatgtgaaagtgcataaaccatacacacatactgtatgcataaaacctatgagacctcttgtgaacttttttagtatattactatagtagataacatttcaacatgtgccaggtactaatttgagtgtttcatataccttgtgtcatgcaatggtcacaacaactttatgaaactggtactatgtccctgttctacagaggagtaacctgaggcttggaggaagagtaactggctcaggatttcacaggtagtagtggcagagctggaactgaaattcaggcaatctgaatccagaacgaacattctttatctctttaccaaacaaacctttttttttttttgtattttgagacggagtctcactctgtcgcccaggctggagtgcagtggtgccatctcggctcactgcaacctcggcttcctgggttcaagcttcctgcctcagtctcccaagtagc

SEQ ID NO: 915950 - DNA, 4001 bp, Homo sapiens
gcacttagtaatcattagtatctctattaaaggcacaaaccccggtttagcccaggaagagctctgacccccagattcggagatgctctgccagaatacagattgtcttatttaagtaaaagtcttaaataaccactcgtatttcatgtttgttggccttagattgtcacatggaaccaccgtcagttgagacatggggatcctgtggtcaccctgcgtgaaaaagacaggcttatttttgctctaaaacaaatgatttctgccttcaaatagctccgaaacggcatcaagaggaagtaagtgagactccctgcactcacacccctgatcctttcccgcgccagactccagggcaaccttttcacattcaggcgttcagccctgcttccttgcccctctttggccacctacaaagcgttctctcccctacatgtatgaagacacagacccacctgtgcaagaggtgcccctgcccacaggagagggaggtcaaaacttactgttttcctaacaaattaacctttcatgttatccagtaagaacatgcagtcaatctgatttcggccttcatattcccttctattccccactccctctcaatgagcagaaaactttaactttttagccatgattctgggccaggaaggtaccaactagtcataattacaacctcgcaatgaaggggaatgattactatccccatttaacaaataaagaaacaagctcaaagaagtgaagtcacttccccaaagtcatccaactggtagagctccaacttgaacccaaacttctctgactccaaaaccccaggaaggctggcggcaagcaagagccccctcctccccagggaacagcaaaggaaccgcaataccacacacaactgtccccagtaacttcctccttctcaagagctagtcggcggacttcggcccggaatggcacccctatcgcacctagctccagagagcaggaattggggaaaaccccctgcgatcctcctgggactcaacacccttcccaggaggctgcaggatccgggacctccccaaactaaacaaaaggctccacgcgaaaggccccgcacacagtaggtgctcggtttcccaaagccaccgagcaaatcgcattgctcccttcttttcctgtaaagtaaaaacaactccaagtatcttcaaagcaggaggaggagtggggcagaaggtcccaggggaagtgggtcgggatgcgaggctaggacaaacccggggtagctggggagggcgcagccgcgtggggaccgagagcgccagtgtgctgcctggctcacagtaggagccattcaaacgcggtgaatgaatgaatgagacgcgcggcaggcgtcagcgcagccgggagagactctggctgcgccgaccgcggaggcaaggtccaaggagaagcgcggcgcagaggagagggcgccccgaggcccggccgcccagacccgcactggtcaggcccggcgggggccgcaggcggcaggccccgaggcgcaggccggaccccctcttcccgcgcgctggccgggcgggcagccccggaggccgcgctcctcccaggtcggccccggtagccaggtgcgtggcgaccggggcaaggtgaccgcgggcgcgggcccggcgcccaccttctgagcggcgcgcacgttgtcctcgccgaacaggctgctgacgctctgggagaaggtgttgaccgtgcggcggtagctgttcttctccgcgccgccgcggccccgcgccccctgcgcgcccggggccagcagcccgagcagcagcagcagcagcagcagcagcaggagcccggcccgggccaggggcccgcctgaggcgcgcgcgcccatgctcggccggcggggcgcggggtcgcgatgcggggtgagggccgtgcgctgggccgcagcgggctccggctagggcaaggttggcgcgctcgggggccgcgcgccgcgcctttacccacagccgccgccgccgctgctgcgccacctgccccgccccgcgcgcaaaggcgcacggcccagcccacgccgcgccccgcccccggcgcgggaccaacgcgacccggccccggggccccgcgcccgcctcccggaagcctgccccgacccggtgcggcttctcatcatttaaaaaaaaattctcttttttaacttatccgtggaaaagcaacccgtgcctgtaaaacttgcaacagcttcaaccaggaaagtgactgcaactgattgaaaaacatgaaatagacatatatgtaatctccctgaatgtattataatggtaccccaaaattcgccctcgtgggcatcagctcattcatcctgaaaattttaaataacaagaaagcatcaggcatcctcctgcccttcctgaatgaactgtatttcagagccccaaaatagttggggagggactttcttttacaaagtccagctaatacatgaggatgaatgagagaatccgaaaattatttggcacccctcaatagaatgatggattcacgcgatgatcatcagaaatgggtacaaccaagaggggagggtttggcggggaacttgaaaatggaggggctaagccgcgaagtcccggtcccgccaatcgatcttagtgccaggaagtaccagcgccacctgcgatggattcttgccaagacaagttgagcatgaacctgatggggcctctagatcaaacctacagtttacaggaaatatggcagataaggaaaacttagaagcagcagaagcaaccaaccaactccagcatgtggggcattctaccaaacaaacgacccagtttgttcaataaataattggtataaaaggtgagcgaagaggaggataattggttttaaagacttaagagccataataacccatgcaatgcaaggaccctgtttgcatcctaaatcaaacaaatcaagtctaaccaacattttttttagacaaccaagaaaataaaactcaatttttgccaatccaaagaatacaaaatgctcttatttttgaatttacattttctggattcctagtaagattttcatagatttattggccatttgaattacttctctgtgaattacctattcatatcctttgcacattttttcctgtattgtttatctttttaaaaacttttttgtaggtcgggtgcggtggttaacgcctgtgattccagcactttgggaggctgaggcgggtgacctgaggtcgggagttcgagaccagcttgaccaacatggagaaatccctccgtctctactaaaaatacaaaatgaggccaggcgccgtggctcacgcctgtaatcccagcactttgggaggccgaggcgggcggatcacaaggtcagcaatttgggaggccgaggcgggcggatcacgaggtcaggagatcgagaccatcctggctaacacagtgaaaccccgtctctactaaaaatacaatagccgggcgtggcggcgggcgccgtagtcccagctactcagagcctgaggcagaagaatggcgtgaacccgggaggcggaagttgcagtgagccgagatcgtgccactgcactccagcctgggcgacagagcgagactccgtctcaaaaaaaaaaaaaaaaaaaaaaaaaaatccaaaatgagccagttatggtggtgcctgcttgtgatcccagctactcgggaggctgaggcaggacaaccgcctaaacctgggaggcggaggttgcagtgagccgagactaagccactgcactccagcctgggcaacaagagtgaaactccgtcccaaaaacaaaacaaaacaaaacaaaaacctttttttacgccaggtgtagtggcacaagcttgttttgggaggccaaggcaggaggattgcttgaacacaggagttcgaggccagcctggccaacatagtgaaacctatctctataaaaaatgataataataataataataataaactttttaattaaggtataacatacagaaaaatacacaatcatataa

SEQ ID NO: 915951 - DNA, 4001 bp, Homo sapiens
gttggcgatgggggcaatgagcaggagtggtgggagtgagcctgcacgcagaatgtgccccgcccacccctgaaaacaggaggcagcacagtccggtggcagaggctggacttagagtaggaccacaagaatttcttccttggcacttctacctacaagctgctccaccaatggttcccaatctgtaaaatgggaagattatgccaacctcatgatgccgcttcggggattaaaagagagaaatcttttgttgcaattgataaccgtcacatggtaggtgctcagtgaatgaccgttccctcgcctctccctgagatgggctgttattgtaggtgacaaggtacaaggcatggtggcacagccagaaaatgcccagacaaaaatctgaagacaggaaagcgctcagtggttagaactatgatcccagggctctggactgcctgaattcatatcctgactctattatttactactccagtgactttgagcatggtattgaacctatctgtgcctcagtttccttacctttgaagtgagcataatcacagtacctactttacactgtttgggaaatattcatctgtgtaaagcacttagaacagtgctcggcatgtggtaaacatccaataaatgctagcaattatgactttgactcgctctctgcatgttcttgggctgagggacagctctgggccttcggggggctgctgcataccacaaaccctccatttccttgcagaaccccaatcagatctgaaagggcagaaatctctgcccttggcctggttggatgaactgtggaggaaaggcagtttcccatcaagtgggtaggaagggatttgaaaatgatgacaatgacacctgggaaacagctgggagtggggggagtcgggaaagtgcatgctcttaggtgtgttcgtgtgcgtgcacgcgcacgcacacacacacgccccactgggtttctgtgtttttttgcatttaaagccagattatgactcacctgagtgagttcttttatttctcttgctttggctcaaaatgagcacccacgcatgggggcccctgagtggcccatgggtaattcccaccttgacagaggagagccctggatacaggcctgaggaatgcagagaagaccactccatcctcacgcaagtgaaaacgcagaggcgctctctgacccagccagaaatttcactctgtaaggtttggttaaaaaactacaggaagaccggattttactgggggaggagagagaaagagagggagaagctaggcgcagagagaacagccagagagaaaccacaccgacatctgtaatctaagaatcggaccgtcctccacgggcctcgccgcgttctttcaaccctgcaactccagggacctgcttattgttcagcccgcgtctgccacttcaaccagggagcctccaccccagcgccgccgaggtgtgcggggctcaggccgcccagcggggctctgattggaggggtggaggctgcgaggccggagccctccctcccctgccgccccccgcccgcccccgcgcctacctgagctggcgcggctcgcagtccacgccgggcagcagcagccgggccgcctggcggacgtcgtcgctgtccatggagaagctgcggcggtggccggcgtgcgccacggccacccggatccactccatcagcggcggcagcacgaggaagggcctgcggtgggaggagggacccggagacgcgcgttagggcctccccggaggcaggggctgccggcttggccccaccccctgctcgcggggatccccccatctcccgactccccagcccacaccccgctttccctggagaccctgcctctgaattccagagtagtgggagagcctttggagacatccggaccgcaccggtgaccccggggcaggctctctggaatccttgggcctcagtttcctcatctgtagcctggggataatgtgactaggaaaggctaggaggtaactgatctgggaatattatccctctcggcgatcatgtgaacataaggatgagtcacttgaagcaccaagcgcagggtctggagcggcggaaaaccaatcagcgccccgtgttatttctatttggggctccctgattgtggacccaagcctaaggtgtccgctagcactcccttcccatctgcagcctcgtccctgtcgtctttctggagctctttcaggcttcagctctgcccaggcaacatgctgccaaaaggctttggcacctagaaaaggctctctaaagagagccaggttaaccggcagccttcccccagacccaggctggctgggcagccacccagtggcgcccacaattcgaggccctttggaccttggtcacacccctgaaactctgagagcctcaagttccctgcctgctaatgggatcatggtaggctgttgcaagcttgttgcacgcattgagacaatgcctacaactgaagggcaactttctaagtgcaacgcatttgtgccatcttcctatttcttccagtgatgataaactctgtcctcacattaggattactggagaagattttggaaaaaataatgacacttgagtcctgtcccagggattctgatttaattggtatagggtgcagctggatacaggcagttttcaaaacctccccatgtgaatttaatgtgcatcagaattatctggagggtttgttaaaatacggactgctgggtctcattcccagagtttctgattccatagatcaggggaggtacccaggaaatgcattcctaaccagttcctgatacggatgctactggtctgcggacgacattctcaaagaacctctgctctaaagtcatcatgagagggcctgggaatcatctggctctatatccagagatggtgattgtgttagagtccaagaagataattctgataggcagcccctgggattctgatttaggtgggccaagtaccacactttgagaaatgcactacgtagatgcaaaaggtttcctgccattcagcaggggtcagactagcatgaagccagtggggttccctgggtgcaaaactgaaggaggctaggtcatgcaaatatgttcttggcatgtctcttgcctcccccggccctggggctgccattcagtccagcatggccaccatggcattgagaagaggatgacaggtagatggggttataagtcagccagcccccttgagaaatgcagatgtcatgagcttcccagaaagtttttggtggcaggtgccagttttcctatagtcagatctatttatccaatgttaataatattcagcagctcagccatttacattgattcatggtctcatctgaatgcctaggaccaacctctgtgctagttatgattatgcccatttcattgatcaggagaatgatgttgatccaggttaggtatcatgccctggaccacaagactagcaagagctgggagtcagacccaagttacttgactatatagcatgtgtagagaaaccccatgtgatattgacattctcttgtccaacttcgtagcatgcactctgttacccagcatgcacctgtcaccccaggggagctgatcaggtcatggactcttgctggcatgcaatgggctgattcctgttcatgcagctgagcctcctgtctgtaaggcttcaagccctttaaaaatccacatccctcttaaccttcaaaccacaggctaaatcccatttctccctagacgttcctcctgactttacctcacttgaatccctcgcattgtgggcctcaccccagaggactcctctggccttacccgctgcctctgcaaatgccccattagaatgtaaactccaccagggcagggaatggggacttcttggatcacggctcccgccgcagctccaggatggtgcctggcacactgtaggcacttaataaatatttgctcatgacacagactaagatttaccaatttcttactgggtgaaactgataaaatt

SEQ ID NO: 915952 - DNA, 4001 bp, Homo sapiens
ggtggagtatatgtactaagcgcaaatgatctcaaccctgctccaaaaaatggtgctgggttttgctcactgcctgctggaggcagctgtcgccccgccccgcaccgggggcggaacctcgcgctcccggacctgggacagcaccagcagcgtgaaatacgcgcacccgagtgcaggagcaaacaggcaacctcttgttctggctacctccagcccggccgcctcctcagcggcttgggacagcagcgcgtggctgggaagacgcgggagggggacgcgaggcaaacttgcgccaagagttggccaggttaggtgagagggagtggcacccgcgcagacacttaccgctggcgttcttcccgcagatcaggtgctggtagggctgcaggagaccccagatctccgagtcgttgttgaccgtgtgctccagggtctccacggtgaacttgggcgcctcgtggagcgcatggtggtggtgatggtggtggttggcggcggctgccggcgggactgcggcggccgcggcggccggcggggcgcaacagctgctgcccccgctggcgctgctggctgcgctgcaggcgccgccgctcgccgctcctcccccgggcgcctcccgctctttatccgccgcgggggccgcaccagggcccgagctcgggcctgggccggagcccgagcctgacccagggccactgcagctccggggcaccccggaggccacgacccgcgagtagatgtcccggaagaggctctccatgcaggctgtcaggtagatggcggcgtgctcgtggatgcgcagcgccacgcggctgtccaccatccagcgatacacgcggcccacggagaaggtgaggccgcagcgggccgacttgccgcggcccaggcggtcgccgccggcgctgctcatgttgtagagggacagtgcggccagcgcagccgccgtacagtgcgcggccaggccccaggacagcacgatctccatggcgctctggatctcgtacttggtgcacttggcgaagcgcaggctcaggcgctgcgcctctttggctatgcgcaccagcgcccggctcaccagcgtcgacagcttggccagcgcgtccttgggcaggccgccggggaccgccgggcctgcccggggatcccgcgaacgcagcagcagcgcctccagctcctggagagtccaggggacctcgtctaggtccggcagcagccgcgagcagtgctggccggcgcagtccagcccctcggagtcttccaccagggcagtgttgacagtgtcaaagctgttgtgccggctgtgcatggagtcagctagaggcggccagcagctcccgccatacggggacgccgggtgcgagtcggaacagcacaaagacaagttggaggagcgcaccgagtccgccgcgccaccataacccgagtccagcgtcagatcctccagcgttctcaccacgggcttcttacctctcctggccatcgctgcgccacttcatgctgcagccgcctgggagccaaagggaaggagcggcgaggagcagcgagtgccgcggggcgcggggagagccgagtccgcgccgccttggctcacttttccactagccgctgctaccaactgttagtactttcggctgcctcccggaactgccgccgctggaatatacagagcagaccctggagtcatcttccagagtccgggccggagctgggcgcaatggggagcgagccaggccgggaaggaagctcccgccggggcttgcccctttcttccaaaataaaaagtgtctagaccgctcttccctgagccccgctgggcgcagtagccaccgggcgccggccacggtgttcgtgggactgagaccaccccagatgccgccgccgccgcagctccgcgggcagctggctcccggctcccggctcccagttcccggccctggttcgctcggcgccagcctgccctgcaccggagcgcagcagcggccgtggcggctgcaaaccttgccgaaccccagcaaaccccgggcagccagtgggacgggcgtatgcaaagcaggggcggcggagagccagtggaatcggagaatgctaattacctcgctttttttttttttttttaaatccctcctccccatgcggccccgcccctcacacacgcccccggcggacaccgaggctgcaggaagtggggagcagtggccagggacttggggaacccttgcaagcgtagagacgtggatgctgccccctgctgctgtccctgcccgcattctcccggagggtggtgggttgggccggtgacctccccacctaggtgtgctctccaccgcggttcacaaggtgtctgcctgacggtcgctctctcccctgcggttcgcatttcacttttttccccccgtaacacctgaaacatggttttcctccctctctattcccacttcgggtacgcaaaccaattagtgcggccctctttcagccggggtttgctccagcatggagggaaataagcctgtcgagcggaggcccgtggcggtggacaccactgggaggccggatctccggccattcgccacctgccactagggcgcgttaactcgattcctttcagtagccaggaggaccctgtccctgcttcaaagtcctgggcgtgtgctgcagggagggctcaagcaccactttgccatcctggtgggcatctttccaaatagctcggccttcttaaaaggagtaaatttgctcaaaggagaatcttctttcctgactaaagaaagatataatatatatatgcatggcttagctgcattcctgtgtcaaatagcatcgtgtcatctacttgtctgtccccacccacccaggcagaaaccatatcttacacacatggggattcctagctccgcacactgtgtctctcagcttagaatcccctcctataggaagctggcccagatgtttcaagactggcttcggtgcttccactgcctctatccccttctgtggttgctgatttctgggcccttgcaacactaggttgcaaaagcctggttacttgtctggattctacactgggctaggggttcccatgcatagtcctggcacagtataagtgctcagtaaatatttgttgtaaattgatgaaggacgtaaggatatgcttttaaattgttgctttgaatgttcaacaatggccaacaggtatatgcaaatatgctcaacatcactaatcattcgggagatgcaaatcaaaaccacaatgaaatatcacttcacacctgtaaggatggctattatcaaaaagtcaaaagataacaagtgttggcaaggatgtggaaaaaagagaacctttgtacactgatggtggggtgtaaatgagtacagccattatggaaaacagcatggaggttcccaaaaataaaaatagaactaccatgtgatccagcaatcccacttctgagtatacacccaaagaaaataaaatctcagtcgagtgcagtggctctcgcctgtaatgccagcactttgggaggttgaggcgggcagatcacttgaggtcaggagttggagaccagccagaccaacatggtgaaaccccatctttactaaaaatacaaaaatttgccaggcatggtggtgcacacctgtagtcccagctactcgggaggctgaagcacaagaattgcttgaacccaggaggcagaggttgcagtgagccaagattgcaccactgcacctcagcctgggtgacagagtgagactccatctcaaaagaaagaaaaaaaaaaggaaaagaacatctctgtcttgaagggagagatgcacttccatgttcattgcagtttattcacaataaccaagatgtggaaacatatctaagtgtccatccacagataaatgggtaaagacaatgtggtgtgtatatatctgcaatggaatattattcagctctaaaaaagaaggaaatcctgtcatttgcagtaacatcatgaacttggagaatattatcctaa

SEQ ID NO: 915953 - DNA, 4001 bp, Homo sapiens
gtactgtccaaactatggcactgtcacttaaaattttttttttttttaccattctatcttgtgccagatcttcacagctgtgacatggtttaaattccataatccatccccaagaggagcccacccaaagcaaaaatcaaatttatccatcatcatcagatgatccatccacagactatatcttaacctgatacagtcatcatattgtagtttttggaagggctcgttctgcccaagagaagttcctccttacagctgattcggctgtctaccatttgcacgttggtgctgttttgagtgctacctcctgctggtgaggcttcatacagcacacagatggagccatcctctccaattctgtaggacacttcataggggtcaacccagagtgtgagttcacttgggagaagcctgaacagctcctgactgctcagtccaatccgctgtgctgcctgtccaatcagaggatccattttatggttgatgcgaatacaacggtaacccgatcccttgcatggcttttctgggaaccagtgatgtttataatgttctatagaagaaaagaagaacagagaaacaacgcttaggatcgttagctcccactgcggattcctcctaccccaggctcctttgaggagcgaaaatgaaaactatcaactttttaaaatgtccaggattgcatccgttgttgtgcatgtgcggggatggaaaaagcgggcagggttttagaaataacacagtagtaccggacaaaacaatctccaggaaccaaccggttgagccgccaaaacaggaatcaggcgcgcagcctcggccagtcgggaagccactggcacctatggccaggcgagaaactgtttactttctccaccccaccccagatgcacacaatggagttgatggctttggagatgagaagcgccaccggactgttaaccccgaagggaagaaaaacaagcaaccctaaaccacgctctgggcagggctgttaattgtgccggtgacaaatccgatgattaatgggcaggggcaggaggcgcggggagacggcacgtccgttctgagctggctccggggcagcggcgcagcttcccaccccggggctgggccgccgaccacgcaacggttggagggggctgaggaaaggggacgtcgaacccaccccagccccacggctcctttgtccccaaatccgccgacggtcctcggaccgcagctcccgcctcggtgggcttaagtttctttgttgtgcgtgttgtcttctcctctccgttttgccagctggggggaagggggcgccctccgtccagcccctaaagcctcgcggggaaccgctgttagcggccacccagcgcaaccacaccggtcccgcggcggggcccaagcgcgaccggccccggggcgctgccgaggttcccgcagccccgacggccggactctgacccagggatgtggggcccgcgtccctccgacgccctcgccctgctcacctgccagcagctcctgcaggctctggctgaaggtctgcagctgtcgctcgctcgtgagccccttggtgcggagaaacttggagatgaaggacacggcggcggcgatctcgcctatcatggtggcggcccgggtgtagaagggatgcatgggggcggcgtgcgggggcggcccggggcggctggggctcggcggcgcggccccgacggcggagcagccaccccgggcttcctcaccgggcggaaggctgagaggaagagagggcgtgaggggcggacgactacttttgtctttctttctttagactaaaaaagttattttcgagacaggaggcggcaggagagaggaagagacgagcgatggcggcctggtcacatcgctcggacctccccagctgcctccgcctccagctccgcagcattcgaagatctcaatagctgcatttccagctccgagaggcgaagagatgcaagcgccgtgcagcaccctttatagtgccacgaaaaggaagtggcgtagctggagcgtgatggccgactccagccaatccgaatatcgcaccattgtgacgcaagccggttcggagccgaaaggggcgggaaaagagttcaggaggcgggtccagagatagggaagagagggaggagctgacgtaatccgcttgtaaacaaataaacccggagtggcggctggagacccagttgcttgtgtcgagggagggagggagggaacagagggtgcgcgtgtgaaagctccgcccccagccctagctcctccttcccgcttcagcaggtccaggctctgcgccagtgcatccttctccaagagtgcgctgcctgggcccgcttgccctggagtgtaagtgctgggtaaataagaaccgcctggcgcaggctgtgtctactcttcacgccgccttctcagatcgggctgcatgtccccactccgtgtttacatctcgttcccgctccgggtctcggtgactggctcctcaagccggagacgcgtgtggtgcggcgcgatgcgggcgccagcgctgtgtgtgctggcggtgcgctgccttagtgcgggggaaagtggagggaacggtcctgcggggcgttctgtccaagaaaaaggactgcagcctcggggagccagggtcccctcgcagacgagctgccaacgccgcggagccatttctgttccaccctaggggaggagtagggggatatcttttaaaagtttaattgcaaaataagtaggttagtaaggccatttgtggttgctgtttcagtaacttcagcagtcaacggagagaagagtggaaaccttactggatgcggacaggagagccagttactgaaagcagatataacgcggatcctgtaaagagtggtgtgtatccaaaaaaaaaaaatctgtacaatgtattttaaaacttgtgtgcacaaaactgaagattttcttttttacctagtccaaatgccgtcctagcctgagtcctgctctttataaaaataaaataaaaagaatttgaagcttgtgaaagtattaagtgtagacattcaagtttatttgaaaccctaccaaaaaaaaaaaaaaacaaccttaaaaaccagtgtaacaggaaggcgggagcctgctaaaacgattaggcctaagacagggttaaccccaactccattaaggagaagggggaaaagaaaaaaagaaagatgaagggaggcaggcagatggagaaagcaaacaggaggcagaagttgaactctaccagatggaaataaatatcccgaccttagttgatcatcaatattgcaaaacacaccactttgagtgttttttttttctttttaatactgagctaaaggatatagaaatgaagcaaaaataatgacattataaaacaggagaaaacgttttattgtttaaaaaatatgtaaaactcgatttgaaaaaataacttctagattattttttcattagtacacataactaagtagttacatgtgaaaaaattaaagagtggtttttttttttcttatagaacttttcagatagaactctgcttaaaaatagtaatttcactggaggcatgaaacctcttttactactcaaaaagaagatcgagaagcaaaagtaaattcatgaaattaccataacactagaataacaactcctggtctcccacctaacctgacccacccttagttccctgctttcacttacattgtcgttaatgtgtcactgagtacaaattaggagtcaagtgaaagtttttctcttctaaacctggtctccaacttggcctctcggtcatgtgcttaaattgtctcatctaaaaaacagaaatattaaatcaacaaaatgctaggattggactcagacttcccccaagcccttgttctccatactatttttaactgcctgcactagcagcagcaggaccccttctgaaagccttataaaaccagttgaacagggttaacagaaagtttaacccatagactcagggagagttacttcccgcactg

SEQ ID NO: 915954 - DNA, 4001 bp, Homo sapiens
agtggtcaataatgccaagtgctaaagagatcagttgagaccctttaccagctccctggtttggtgctgaggtaactggtgcccttctgccgagcagttccagagaagacactgggagagtgggcttgaggggaatgaactggaaaggaacaggtgaagccacggtcagctgttttttgaagggtggctgagaagcaagggtgagagcttaggctgtaaatattgggagggtttcttcctgacatcatttataatatgtatgctaaaaaaagaaaaaaggagagagacttaaaacatcataatccctctctccaagataattacttctcgtggtgtggtataattgagggagggttttgtttttacacctgtgtttcttttcaagatggaagatacttgagaagggttttaggctgtagggaaggagaggcagagacactagtggaactgtgacatgaaatcccagaggataggccaacagtggctcacacctgtaatcccagcactttgggaggccaaggcggggcagatcacaaggccaggagttcgagaccactctggccaatatggtgaaacccgtctctactaaaaatacaaaaattagccgggtgtggtggtgggtgcctgtagtcccagctactcgggaggctgagacaggagaatcgcttgaacctgggagacagaggttgcagtgagccgagatcgtgccactacactccagcttgggcgacagtgggagactccgtctcaaaaaaaaaaaaaaagaaaagaaaaaagaatcccagagaagaaagtaatagactggaaacaggacagaggattaacctccaatagaagggaagaaatttcccttagttggtaggagggagctgaggatgtttgaggtgggagactgaggaaatgctcaacttcttttgaaaagaggcagggacactcagtttgatgcggtagaggcttgagggagaagaaaaggattggaatgggctacccttgagcaagaaggatttccctttggaagggtgtaaatgaagtagaaaacttcacacatctgaactgtcaccaactgccacaatcatgtgggcccagcagttaggtgcagcagcaagggcaccagaatggattaatcacagatgggtttatttagttggggtgatgaagttgctgatggaaaaaaagccttggctaaggaaggagatgagataaggggcctgagggactccctgggaaccaaaggaggtcccaggccagggagatgggtgaagaacaggcagggccggaaggatgatgtagtcctagtgggagtttgatttcagtgatgaagcagttcttttcgctgacgcggactacggcagtggatggctgaattggagcacagaggaaagctgaggtcaaggaagttaaataaatggtatctgagaacctacctctggtgatggtcatatcggtgtctccgagggtcgtactcgccccccacgtccaccacgatgtcacaggaagcgagtttttcgggatcccgggtccgcacaatctctgcatcctgcgaggtacacaggggtgaaggggctgccgggtgtcgccgggtaggggattaatgctggacttcagggaggcaggaagggtaggaagggtgcttgggctgccgggcgctatcggagtgaccctgttggcggaatgccatccaccccggaggcatgcatgcacgcagtcccagggtcacttttcgcggaccgtacccggtactccggcaggaggcgaagcagtgcgcatgccagtgcctcgtcgcagtggaaggtgccattgtgcgtcccgattcggggcggtgccatgagtttgctgcgggatcgttttgggggcgggacggactctggaccgagcatgcggtgccgggtatacaggggtggcggcggcagcagcagcgttaagaggccgcgcaggaattggtgtcccataagcagctccctgcagggaggcaggagcgccgacccggaagaggaagcgccagcgcagccccacttccgcttgccaaccgttcccttggcaaccagctctgcagagtgagcagcagcagactcccagcctaggatttcttccagctggtcaaagggccctgcgatggagcctccaagaggcgcatcgcatcacccctgcgcatcaggctctgagacggggcccacactctcgaccacaccccccatctcatcaccagtcccttgcttaatccaagaaaagaccaacattctgcccagctggcacatttattggcattaaaacacaagacccttcccatcaccaggaagccacgcccaaagggtgtccctctgccccatttctgcaaaaactctcaggccttagcagtagcctgagctgcccccagggctgtgagctgctgaatcttctgactcatcatttccatgacggctgtggaaaaaaataagagtcaaaggttagaagcaaaaaggagaacctagagttaaggagaagtgacaggcaagtttaaggacaggcgaccgactaactacagtttgttaataaccttttttttttttttttgagacagaatcctgctcttgtcaccgaggctggagtgcagtggcacgatcttggctcacagcaacctccgtctcccgggttcaagcgattctcctgcctcatcctcccgaacagctgggattacaggcatgcaccaccatgcccgggctaactttgtatttttagtagagatggggtttcaccatggtggccaggctggtcttgaactcctaacctcaggtgatccacctgccttggcctcccaaagtgctgggattacaggcgtcagccactgcgcctggcattgttaataaaactttaactcagtgatccactgtggggtcactaacacaaatttagggtctacaatgcatcggtcaatatgctaacacagctgggtgtggtgagaatgagactcttctcggaaaaaaaaaaaacctgctaaccaaagatataaaaacgaacacaatatggtattaaatgagtctgacataatcagaaaactatgatggggaaagatttttacctttggaacactggttctgaatcctgattataacagaggggagcttttttaaaaaaaaacagaccttggtacaacttcccctcctttgacttccaagttgatttagtcaatctggaatgggcccaagctttctttttaaacttcctgagtgattctcatgtgcagtcggggttataattgctggtatttagttcgtttggatcatgattccttcctgtgtgttcatctcattcccccattccatcgtcattaaataggagctccaccaaagcacaaacatgatttccttcctctaaatttctcaaacgctcaacccaggaatctacagatagtgattatgcaatacacagattctaaagatgccaaagagaaactaagacatagttttactccagcaaaggggacacccccgtggttcacactgcaatccatgttccttattatggagatagggtcaagaggtgccccaggaaaaacttaccctgtttcatggcgtgcttctcctgaagagctggttggattttctccatctgcttggttagaaaatctatcttcctcttgaagaagtccttggcatcctcagctgtctacaagatcagaggtgaataaggggctaaaaggagactccctctggccatgctgcgctctagagcttcccctgaatttcccttccctgtttagaggggcatccacatgctctcactcaccttctctacatagtacccagttcccacatcgatgagcacgtgttccacatcatgcagcttcccagggacatacatctgagaagcaagaattaagggaaaaactagccagcccagcatgagccatgattccgccagccagcctgcttggcctccaaagaccctctttttccaaaaagctacaaggcataaggactgaataatctggaggccttagaacaatacctataactccaaatgga

SEQ ID NO: 915955 - DNA, 4001 bp, Homo sapiens
tggagctcctgatgagtataaacattccttccataaaaatcaatcatctgctctttgctatcgacatatccaaaggacaacacgagacactgaggggtacacaaagttctccttctccacctgtcataaaaggctttagactattaccggaaaaacaaggtacgtgtattaaaatagtgaatatcaattgagtggccctctacaatttctgggtaggggaaatcactgaaatggctaaattgataagattttatggagaagaactgacttgaaaaattaaaaacactctagaggtgatccagagtgaacagtctgagcaaaaatatgagacaggattgtggttgatatgttcacaggatgaaatagatggttaaaacagaatccactttaaggacgatggaaggtagattgagcctcattagtgggaggccctgaattataattaagaatgtggatgctatgctataaacgatactgtaagctgttcttaactgcagagaggtaagagaaggggctgcttattttccctggtggagaatactttcacaaactactcccctcaaacatacgaagttgaaaatcacagtagagtgaaatactaaaacagatgataatgtttcatatggattacatttgttacagctaaaaaaaaaagccaattactgctacaaacattgagtaataactgtggtattctgacgaggaaagaacatggtgatgatcagtctgagtggcaagtaagaccagttaggtggtgcaatgagcaggacatgaaatattaactgtaacagctgtgacagcactagaaagcaggaaaagatcagatgctataaggtaaaaagcatcaaggtgaatggaaaactggcatgaaatgattccagggttcattctttaattcaacaaatatttatccagtgcctaccacgtgccaggtcctagaagctgggactaaagataacagggcaatctttgccttaaacaagttttagtccagaagacgagaaagccagtgccaatgatgaaactcaagtgaggtggatttccaatggacatgttggttttgtttgaaatcagcaaagttgggaagcacccaactaatcactggggattctactgatcaaagactacaacgttttatagtacaatatgaaaaaattacccaaatataggttactcactagcatttaccgagggcacactatggaaaacacgttgctgcaacagaaaaccttgagaacaccaaagttagaataaattaagtaattactggtaatatgaggtgtgaacttcagtgacctaattaggctactgtcaacaccgccactggttcggacagaacaggtaaagcaagtcttctaatatccaccctttcttactgcactcttgaaaagtagtaaagcttggactgtggcaattacctgattagggggtttccccaaaaggtgctgacctgaaaaggaagggacatgctgtggatgtgagttatccatttccttgcgaggacaagtttgaatctcctgataaggaaaattctttcgcaaattccctccctcacaactaagaaaagtacaagaacctggagctcagggcgtacggaactcccaccccagacctccccagggaaacctacagaggttcctggcctgcagggcagttctaaagcgcccagccgccctcgccgggttcgcactgagccagcgccgcggggaggagcccacgcgggccgccaagcctgcccggcgctcctccgtacctgatgctcccttttggaggaaggctcctctttcacctccgtcacaaacacacacggcattttccgctgcacggagcccaagcgcttcatgatgagcccaacaagcagtgcgaatggagggcgtgctttcgagcggcgcccggtccagtcgcggagaagccctgaagcagtcacccgcacggctcaggccacgcacactccgcgcccagccaccgcggctgcgccccaactaccaagcccagcgaggggcgggaacgcccgtccagaagcggcttcctggccgcggcgccttctgggagttgtagtgcagaagctgaggcgcctggtgggttcccacgtgcgtcctccgccccccaccctcggttttaataaccgtgaaaaaaaaaaaaaaaagatgcgtttcccgaacgtgggtacttagcaatacctagtaactaatgattttttgggaaattaaataagatcaaattataagcaatgaacatttcagatgtcgatttaacacagttccaatggaaactgcttgcctgttatctttagttcgtgggggaagcactgtagaagtttagaaatggctagagacatccccagattcccaagcagaatgaaaacttcctttccggtaagactatcagaaaaccctataataaaacacctgggatcaaaaaaagttgtcgtttgaactactccttattgtgcagcatagcatggtcgaaatgattctgatgttcttttcggagtgagtgcgaaatttcagccttagactaatccaaaagtacaggaatacctacaaccagatttcattctcaagtttttcataagaatcttgtttaattaaaggtgagctccaacagcccaaatggcttgagtaatggtagtcaatcaactgcgagctaaaaacagccttaacttactgctcaaaagaatattttgagggtaagtgataagatggacaatgactaaataaaataaatactaaatatttaggaatagtagcctttccatctcattgaatgtagtagttcctagcctgaagttgtaggggaattttgactttactgccatcctttatgggcttggactaggcccaggtctcatttctttgtcttatctgcatgtactcaactgtccagcatgttactgacttagcccttggaaaaattaaacaactatatctcacttagaggtatctaactagtaagggggttctcaaagaataaaacatcttcctttaaaaagttcacagttatattgaatactgacagtgaaaaaaaataaaatttaaaaaaagttcacagttttttgattactggattcagaggggagggaggaagaaagagatttgccatttcaaagtgtttactttcttttctactatctttttctcacaggaaaacacaaaatgttctcccacatcacaccccgcctgcatttatcaaaaaagaaaacacctgatgctggctgtgtgctgttggaaccagaaactttttagcatattatagtcgagtgccagtgacttctttgttctttcagaggcattctaaaaagcggcgtgtttcacgaatctcagagacaacaactttcacaactatcaactgtcacctcccaaactgccacagaaccttttaagtccaacattctgtcatttgtgggaaatactcatcttctaaaacacactctacttattctttgaatagtagttgcaaagctagtcatctctcaggaagcactttctatttccaaaactttggtttcatcagtacctggagcaaagcttctggcagaaacacaaatcctcatcaggggagaggcacaggatcaactcacggttataaactggactcctgctctgacgggtagcagccatcaactttgcccgattctcataattctgaagggtcaccaaggagttgctaccagccactgtacttaaagtggtgtcacaggattacaaaatagaagaaagtctttcttctctgactaatatgttagtgctctagtaagcatcaaagatgaaagacacacaatgtgagcctgctttggccaacacaaagtacttacagaattttcaggcctacttccagccctggagacaaatttcccatcattcttcattacaggagtaatcatcctcatagggctgtaatagcttttttttttttttagatggagtctcgctctatcacccaagctggagtgcagtggctcaatcttggctcactgcaatctccacggcttgggttcaagc

SEQ ID NO: 915956 - DNA, 4001 bp, Homo sapiens
ttccaaggcagggttctcaataatagggaaggaccatggagagaagagcagagagaattcttagggagagttcatgggtggggaaatacaaagcttaagaaaccgttggtaaaaagaaagtcaaagaagcagatcagggaccaaggagtgatcctggagaacttagaggttgtggtcatgagatccgactgggggaaggggagtaagaaagtgttagaaagatttccatgtgggaagaagatacacagaaaagagagagtacaggacctccacttccggcccacaccccaaaggcaaactagacactactaaggaagaagaaaatctagttaaaggcagtaagaatcaacatcaattaaagatttatttattcatcagccttgtaactggacttcctatggctaggctttctcccatcaaatcagttcttacattattttctacactgaagttatagtaatcttcctttttaaaaaaggaatatacttatctgatcatgttgttcatccgcttaaaaactttctatgacattccattgctctcaggataaaatgcaaactctttatcccagtttacaacacccctgcttatatttccactcttctctcagaaactgcacctctccttcctaatacacaaattcacaaattttattttccagccattctgaacttctgtcaacaccaaacttctccttccatgccgaatctttttgaatgccttttcctttgcctagagcactcttactgatcttaatttcattggataacaattgctaattcttcaggtctcagttaagcctctaggaagacttatccaactccctaaaactggattgggtcccgacaggctctcatattagcctagacttatttgaatcatggcacttatcacgctctatttcttactcttggctagaaaacagtcttcttgaagtggaaggaatactgtcttgtattccatgtattaggcaggatgttgcgaatggcaagaactaataaataattgttggattgtatggcgtttttattttatggtgctcactggaaaaataaagaacaaaaaattattcatacggttatttaaaaagatatcacctgaaatataaaaaaaactcaaaggacttttgtacatgtcgtggggcggggctaagttgaattatccagactatattttcaaatctgtatgtaggctatacacaaaaatcttcgtctatttcaccataatgcaaagagatagggtatttgttttactcagaaagaattaaaattaaacgtaaagcaatacaaatttttataatgttagaaaactaccaaaactacataaaggtatattctatgatgtagaaatttcattcctaagtatatatccaaatacacacacacgcatatgttcgctaaagtacacccagaagaatgctcatataagttttatttataataccccaaactggaaacaaccaaaatgcgtattagtaggagaatagtaaacttgtttattttatgagataaatactacacagcaataaaaaagaatcaaccactgataaatgcaaaaatatgaatgaatcaggaatgttgaaaaaaaaaagagaaggcagacacaaaagctctggttcaacatttagacttgtgtttcaagaaactgataactttagttctttctcctctcgctctttttttagactaatggtctatcctgaagcctgggttcagttttagcaaccgtgaaatccaggaaggtttcccataagaaaatgggatggaaggtctggaccgaacacacacagccaacagagcggaggctctgaggctcacattaatcagggaaaaggaagacagacggtcgagctgagaaacttcagccgggtgaggggactaatccctctgtaacggttgtcagtctgaaagggcatcctcactcggttctgggctcacctcgtctagttccgaagtcctgggcagtccgctcactcgagctgtcagcgcgtcctgcactgggaaaccagctgacttgccgacatactttttccacaccgcggatccgcgaacgtagattcgccacatccttttctatttcctggcatcttgtagaaaatttctcagtccaagtgcccctatgtcccaacctgtttcaatttaacaatttgaaaggtgcaataaggtgtatttctattgttattctgtatttcagagacagggcaaatccgccgttgtgacgaaagtgcagggacaaagcacaaactcggctctggtggaccggatacggaaaagcggtgccttggggagggcgggagcaaattcgctttccccacagcgcgtgcgccgccgcaagcatggctggtgatgattggacgactggtaacagggggcggagggctccgaagtctggttttgggcgggaattgaaaccgccgctgaagccaacaagaatttgagaactgtaaataccaagccttgaaagggaccatggtgcggcctgtgaggtgggtagttcctgacattcgtcgggggtgggaggaaaactaagggaaaagacatgagactaaggggaaaggatcgagtaagaccggagggcagcgatggtggggttaggatggacggttatcaagaacccagtctccagtgagagccacccgttgctcagaagtatcctagcatcgtagctttttccttctctttgcctcccttcacaaccgtcgccgtttcttttaccaagaccttgttagcgtttgaacagcgctttacatttcaccgagcgcccaattatgtgttattttatttgtttatcactgtagttatttgatatagaaagagtaagcattcctgttgtattgatttaacatttctacgtatagagggtaagttatctgagtcatacagcccagtaagtggcagggcaatactcaaacctaagtcatctcactcaagatcctctgtgctttccatcgtggtattagaaacgattcttctatttacacagttgagtgccatggaagcctatagttagccattcatttaataaagttattgaatatattcacttctttagtgtacgaggtgctggaggttacattccagtgggaggtgaggttagggggccgaaaataagcctcgaaatatgagagtgcgaaagaggaaagcactactttaaatatagtagttaatatgtgactctgaggcgataatgcatgcactgagtcatgaatcagggtagagggaataggagccaaggccccatacttgaccatattttagggacagtctaatgctataggattaacaagcagtggggagaatcgtagggggattaggccagagaaataggcaggtgccagaacagatagggtcttgtaagtcttagaaaggagtttaggttttattttaagtcaatgggaagtcagtggagggttttaagtaggggagaggaatctaagtttgcttttataaaggtcactggctgttggtggagaataaatgatggatagggtgaccagaacgggagcaggaaaatcaggtattatatcattggagagcggtttgggatagggtattattagtgggcatggaatggaacagatgaatttgggatgtatttcggaggcactgtggacagaacttgctgatgaagtagatgtacaggtaagggaaagaaagaatcagagatgactccacaatagttttggtctgagctacaggatggatgatctttgtattaagatagggaagactaggaaaaggaaggttaggaggtgtgagggatcaagatttctgtttcgaacatgctgaatttgaaatgggttttaagcatccaggcagtggagtcataatccctttgtaaggaacagcagttgttaaagtatggtctacagacctctgtgggtccctggaaacttctctagaggtctatgaggtcaaaactcctttcataacaatactaagatatgatttgcctttttcgctgctttgtcatttgcactgcagtgaccccgataaaactgc

SEQ ID NO: 915957 - DNA, 4001 bp, Homo sapiens
gtgaaagttgatcacacaaattgagtcattcttgtgatgtccaaccacatcagagttgagatgtcaggaggcaaaagcacacagggcacatagcattgctccaaaaacatgattctctgcaagccaagcttctgaaactgcctaggaccagttataccaaataactactaaaatgaccttccaggaggtcattttaactaccaccatcacccaccagtcaaagcttgccagcttctcacaacttcactactgtcaatgaactttctttcaaaaccatatgtaacatttctctttttttgtaaaatccccacccttttctttgttcttcagacataccaaagacatactttgtgtatgccctgaattgcaattctgccatttccaaataaaacgttaaatttagagatttgtctctacattttattttgacttcgacgtttgtataaatttaaacacatattttctcctaatctctgattaaaactgatccttcggggagatgtaaccatgtttcttaaaccccctggtacctaatatctccagatgctgcacctccaggtgctgcagtacacctcattttcagaaacacaatcctaggttacatgtttcctgcagtatattgtttttgcatcctcccagtagcaactaaaatattactcccaaaatagccataaaagtttgtgatatatgacagaataatagcaacatctacattttaatagtgctaagcatttgtaaaattatttcatataatcctatttaatattttaaagaatactaaattcaaaaagatcacattataagcatgtatcaactaaatcctgttgaagcctgtaagtaaattttcacttttctccagagtacgtctgctgccagaacactagccagaagtaattcaggtaaatttctaaaatacaatgctagcatattcaacaggataaaagtgcatgctaaaattatcaggcatagctacaatacttagtgaatacaaaagctgtctttcctccgataaattctttagaattcaaacgcattataatctaacatataattactgtcctgggtctacttgtgacaaaaaaattacatgtaatggcttcttgtttcaatcaaaacaattcttctcatcaagaattttgatcaaatgaaattacaggcccacatgatttccacccagctggactttaaggtcaataacaatgaataggttatataacactaaattttcaatctatcacgctttatgtgatcaatcctaaatacaaaataaatggcaaattcgctcaagttattcaagtaaaaacggttcactttacttccccttaaaatacaaactacaatttggatttatggtgatactggtgccctgccattgatttaagtgcagctgggactgggctgtttcacaatttccaaattcatgcaaagactatatatcaactcagaagaacctaaaagaggtgtagacacggaaagaaggcagtaggggagggctcaggtgctaaaaggcctcattacagtaacagagcataggacatggagaaggggaggaggggcagcagggaaggttactcacagtggcccccacaggtgaagcctttgtaaaggcagtgagtggggagaagctgagttacttttgtctgaggagtagagatatggttctagagtctccaacccgatttggataacaataaaaagaccctttcctaccaagttctttccagctaaggctgtgacctctccgccaggaactagaaagaggagtcgtaggaatgaatgtcccagcctcaaactccagctgcacaacttaccgggaccccccgacccaattcatcttcccaaatcttttgacactgaggtccctgtgtctagagctcagacatctcagctctgcgccaaatcgcagcttcagcaggatcccccagggcctcctgacaacgtcagggcccgagtaagctccttctggtccaccgcctgaggcccaacctcccaacagcctctgcggcttctgcgtgttccttccggtcctgatagggccgcaaggggacgctgcggcaaagcagccgacctggctgacatcgttttaatcgctgaggcaaggcaggcctaaataaatgaaagcctaaatttttgacaggggccacaggattagtgtttcaaaacacctccatcataattttatctagttctgacaggtctttgacgtctttttcgagtcagagaccagacttgagaaagaaaaagaaggcaaggacacagttaaggatcgctaaccctaaaaatgatgtttcccttcccatttattaccccatacccaaattccttaaatatccttcatgtgcagttttaatactccgtaaacaggtgtttataagaaacatagcgctgtagtaagttaccattctgtgcattgagttgctaagagagcttaaatcaggccgggcgcagtggctcacgcctataatcccagcactttgggaggccaaggtgggcagatcacgaggtcagcagatcaagaccatcctggctaacacggtgaaactccgtttctactaaaaatacaaaaaattagtgggacgtggtgggacgcgcctgtagccccagttattcaggaggctgaggcaggagaattgcttcaacccaggagggcagaggttgcagtgagtcgagagactccagcctgggcgacagagcagactctgtctcttaaaaaaaaaaaaaaaaagaaagaaaggaaaaaaaagagcttgatcaaaacttaattagatgtaaaagtccaaagatgttaaaatccttactgaaaaaaaaatctcaaaacaaaaattgaattatgctatttgtttctgtattaagtttgtatatccttacaaaacaattatcttacaaactgtcctatattattttggttagaaactaggcatctcttcttccaaatacatgcacaaattacatttttttaaattgccatgtttttttccagaacataacctggggaagatttcacaatttgatatataataatcgattttttgttaagtcattggaaaatagtacttagaataggattatgtcccagggtagatatcttgtttaatcacaaaaatcctgttttttatgacaaaattcaccaaggtgtatctaaaattgaattagaccaagtgaattcagcatttccgagaatatcagactttgacatggagttgttttttcagtaacaaaaccatacaggcaaggaagaagcaatggccctgtgtatcagcctttcctactttcaacattttaaaacatattgactaaattaactgaaaggggaaataatttgctaagggattaactctttttttctttattgtgagtaaagggacataaggagaggttgaccaagttgttgggtaaagaactaagagctggcactccatttgtgggagccaaaaattaaaacaattgaactaacggagatagagactagagtgatggttaccagaggctggcagtgggggatggggaagtgggaatggttaatgggtagaaaaatatatttagatagaatgaataacatctagttttgatagcacaacaggatgattacagttaacatttattatacattttaaactaaccaaaagagaataattggaatgtttataacacaaagaaataataaatgcctgaagtgatggatacttcatttaccttgaaagattattatacatcttatgcctgtatcaaaatatttcatgtaccccataaacatattcacctactatatacccattaaaattaaaaagaaaaatacataaaaattttaataagaactgagagctggatgggccatctcttcccccttactagagtcacttctttccttccagtcacagggaggcagtgaattaggctaaggaaagattaacctatgagatacatgttcagacaagatatttactgggttttccttcacagaaaaagacatttccttatgaactaggtattaggtagttatg

SEQ ID NO: 915958 - DNA, 4001 bp, Homo sapiens
aagtatttgaaaaagtcattatgagcccctagaagagtctaatgcttcttttctcattgtaagtttgcatagcaaggatctaagacaagttttaaaataaaacaaccctctcttagggccatgggtacatgaggcatcatttctccacaatagcctggccctctcgcctccctttgtcttctgcaatgcctctttgtaactcacaggtgtttgtgggcataaagcccatcagaagggagtttattgtgaagagttctttctttgccacttgttctaaacctgttcagagagtgctccatgccttagaccaaatctccataaaaatcaagaaacaagaagttttctgtacgcctgtacaacagccacactatgacattagtttcgacagctctgtgaccctgtattgtcccaactttattcactagtctctttttctctttctctctccattcctttttttaagcctttattggcatttttttatctactgtaaaataaaaaggaggaggatgggtgggggttttttaagcactctatgtggcagataaaaaaaaaaccactatctgcagttactgtagtaatggtttcaaaaaacacctgcaaatcaaagaaagacaccacggcagtgtcttcagacttttttttcctcttcttctcttaaagttccttcttggccattttaagtaggcccggcaatgaatttatgtgacagctatgaagttagtattaaaattgtgaatagtgcctagcagttttcatgcccttagtataagatcgcctcaatttgccacacagcggtgaatagggtaaagaagggagggggtgtcgaatgaatgggaggaggaggttacgtgaatgggagggtttcccgggagggggcagcacagttgtcacagggagaagagtgatttatttttgaaattccagaaaggaagaccaaaagaagctgcctaaaagatcctgaagtgcggggttggggggatgtgagataaataatatgtctacacacatttaacaagtgtcaaggccagctctagaagtagggacagggtgggggcggcggtggtaaatccattcctctggtcttccaagattcaatattaaatgccagcagggagcagatgtgggcaggggctgcagaacaggggtaaggagcgctgaaggaggggttaagcgtttatctcaatggaaattaaccacttggggggaattaaaagagagctggagcgggcggggaaggttagggggagaagcgggacagggagagtgtctctacatgtaaagagaggaactttcctggtgcggagatctggggagggcattcagtaaaatgaggtgagcagggctgcaaagagcaaggcggggcgtgccctccaccgcccccaaccgctccgcccggcccctcccccgctccctcccccacccctcccccttcctgtattagcatgcgggcggcggcgagccggccgggtggggagggcggcggtggcatcgctgcgcggggcgcattgtgggccgcgctcgcctccgcgggggaccatctgctcgctgtcaatgcatcacctgctcgtctgggccgtcgccggggcaacggggggcgggggattaaggagcgtgtgcgtctcggtccgggccgaggcggcgaggtgggggttggggcgggggaggagagctccttggccccccacccccctgccccgagacgggtcgacccgctcgggggccggcgaccaccgcgacgggttccgccgcttgcctccgctccttggcctttgctgccgtgctgcctcttctcacgggcgcggctggagtcccggggagcagcagagagcaaacggtccggctctacctcaccctgccagggggcgagtcccgcgctccctgcgtctacctggagctgcagggtccctatcccggggcgccgcccgcagcctcctccgcgggagctggagcactctgctgggtcctggggacgcggcgcagcgtggttccaagcgctccgcagtcgccgggcaaccacaatggggctgccttgccgtgagaccctcccccgcgactgccaccaaagtcacagaaaactttcacacctctcatctgacactgtggcctgtgcacgactccaagcactggggaagccttcgacatcagaatatgaatggcacctgttcttccgggggcggcaagggggatcccgatgtttatcaaaatgggttgattttccacggagggggtacttctggaggtagtaatccccagaaatcctgaaattcccccttccacctactcatctgcctcgaattgtaaaccattttgaatagaggagtagtgcatccaggaataatgcagccaacagcagggggcagagcaaggctgtagatggggacagtggccatttggggatacttttaatccaaagtcatgctagttggtttagaaacttctgaggaattttactctctgctcttcctcatctctatcccacctccgactggtcaaggacatttagctgtgccaacaaaggtcgttctcatctgcctgaggagtccacacacttcaacaaaggactggttaacaccccctaattcctgcccataagctgtccataggctgcacagaaccaaagagttgttaagtcttcatcacaactcataatatataaatattttttctgggctagctaattactgaacactcttctgcagaatcacaggaccaaaagaaagtggacattcacacctgagtcccaggatggacaccctccccaccaccccacacacccacatctaaaatatttctagccgggaaaaaaaaaaaaaaagcagcttgtttttaaagactcttgagtcttgttagatctcattcaaaggtctagcaactcttgggaagccaacagcctttctctgacttagcaactcaaacccattttctgcatttatttctttaaaaaaaaaagtaagtttgtactattgaccctatgttcatcttttccagctaaagtctcgtgatcatcgagtaaaatttctctcatccttttataatttctagatagaaacaccatgaatcaggctaattttatgattaaaatgcatttttttaaatttgctgtgaccacacagaaaatgacagttccactaatgtatcactttctttttatcattcatatgcaagagagaaaagtcaactatcaaaatatccatggctttgacataatagatgaaggggaaaaggtttgtatgtataaacttgctccaaatataaaattctacccaccattttactttaattatgacttccataaattaaagttgagagttctgagaagacatgcccttcaatctacaaggtactcctaaatacatagaatcatggcatcattccaacttagagaagggatgagctgagtccaaccctcctatctatagataaggtagcaagccccaaaatggtaagtgactggcccaagactgtactgctagtggctatggatacccagtgctctcttaaccccaacaatatcacagaggtgcagctttgcacaccaaaaacacctgaaaatgccctttgtctactctgttaccattcctacagctgctgttttcactacagaaatgagaactcttcatcaatttcagcaaataatccttgagtacctatcacgtgtcaggcaaaataaacaaagatccccatccctgtagagctcattcttttgtggtgcaaacagattttaaaagaaagaaaaggctgggcacggtggctcacgcctataattccaacattttgggaggccgaggcaggcggatcactaggtctggagatcgataccatcctggctaacatggtgaaatcccgtctctactaaaacaaaataaaaaaaattagccgggtgtggtggcacgcgcccatagtcccagctactcaggaggctgaggcaggagaatcgcttgaacctgtgaggcagaggttgcagtgagcagagacagcgccacttcactccagcctgg

SEQ ID NO: 915959 - DNA, 4001 bp, Homo sapiens
gcctgtaatcccagctactagggaggctgaggcaggagaatcacttgaacccaggaggcagaggttgcagtgagctgagatcgtgccattgcactgcagcctgggcaacaagagtgaaactccatctcaaaaaaaaaaaatgcaaaaaaaaaaaaaaaaccccaaaaaacaaacaaacaaacaaaaaaaactagaagccgagcacagtggctcacacctgtaatctcagcactttgaaggttgagaagggaggatcacttgagcccaggagttcgagaccagcctgggcaacatggcaaaaccccatctctacaaaaaatacaaaaagtagctgggactatacatctgtagtctcagctacttgggaggctgaggtgggaggatcatctgagtagggggaggtcgaggttgcagtgagccatgattgtgtcagcctcggtaacagactgagtcctagttttgaaaaaaaaaagagcgagaattaggcaggaggaggaaagcagtccatgtggaaagaccaaccacatatttgccaccatgtattgggcctttaagatgtgccaagcactgtagattgcattatctcagttacttctcaaccttatggggtgggtactatcactacccgcactgtacagatgaggaaatttaggtacagtgagatttaagtactttgctcaagttcccaccgctaatgagatggaaaggcagatctgtaaatagaacttgcagagaaaactgtggttatggtactagggggtgagaggggcagactatggtctggaagctacctacaggaagtgcagtatggcaggagggaaggaagggagaggaaggcaatggatcaccaaagggcttgtaagtccttttaaacaaatccagcggttcttaaccttgctttgccatagccttctctaacagcctggtgaagcccggttctcttctcagagcaatgttttaaatgcatgaaatgcaacatacaggattacaaagaaaaccaatgataccgaaatttaattatcatgatagtaaacaaccaaacttgtgatgtatgtgcttcttacatcttagatatagagatgggtctaaaaattagagtggcacattttaaatcagggatgagtgtaaatgacttttttccccaatatctttttatcaataaaatgatatattgatatctgtatctgcaaagattgtaatgagatatgaaaatctgtgacttctgttgggataaagtaacggcattgccagaactactgtggcttagtgcttgcaagacggaaagagatgctaaaattcagtcagagatgaatagaaagcaaagatgcaacatgttttcattccaaattcaagaacccttgggttctatccatgattaggccccttgatgttgcggggctctgtatttattcccagggcactagggagtcacggtcagagtgatgtgctgggcactgctcttggcaacaacctccagggtgggagaatgtgttggaggtggggaaaggctgggtgcgagaataccgggagggggctgttgcagttatctcgaagagacggcagccttcccagtgtggggcagtgaggatagacccaaggaggcagaatcaaaagacatttgggtacctcagcttccccgactggaataatgaaataccctccctactgcacctgcccatgctttcaatctgcactacacccagtccctggaggtctctcggggaaggaagccgagtcccagtgactctctcctcaccatccatcctctcaggctccaggggaagatcccacgcccctcagccagtctccccaaacatagtaccctaccggctcttggcttccctgccacgtgcgggcgttgctccaagccccaagccggcattgccgcctcgcggcaccgctccagctcctccgcatcgctactgctgttactactttccgaatcgctcactgtgccactgggcgccgccatcttgaaccaccgcaaaggattgtggagaacaccgccgttatcaagcctccttcatgacgtcacgtgagaggagaggcgcgaggcattgtggggattgtagttccaagacttggaccgccattggccatgaactgtactgggttggggataccaggtgggaatggggaggtgggcggttctcaaaggcaagagctagaagggcctaagagattaacttctccaatcatttcttgatgacagatctccagaggggatgggaatctcctaaggagttaatgacagacccaggattagttcccaggttttgattccatgtcatttattctagtaatttcccagtccagctgggcctaagaaacaccttagagagctggttaaactgcagacttttgggtctcacagaaaatactaacagaatcagaatctctgataggtggaatccaggaatctgtatttcctttaatagcctagggccttactacttaagagtgtagtccatgagccagcagcattggtaacacctgggagctcgttagaaatgcagaatccaggctgggcacggtggctcacgcctgtaatcccaacactttggggggctgaggcaggcagatcacaaggtcaggagttcgagaccagcctggccaacatagtgaaaccccatctctactaaaaatacaaaaattagctgggcatggtggcacgcacctgtagtcccagctactcaggaggctgaggcaggaaaatcacttgaacctgggaggtggaggttgaggtgagccaagatcgtgccactgcactccagcctgggcaacagactgagactctgtctcgaaaaaaaaaaaagagaaatgcagaatcctgtccgggcacggtggctcacatctgtaatcccaacactttgtgaggccgaggcgggcagatcatgaggtcaggagttcgagactagcctgaccaacatggtgaaaccccatctctactaaaaatacaaaaattagccaggcaatactgactcccaggacccatccaagaccaaaaaattagaatctctgtggttaaaatacctcacagtgaaggatgaacaaaatcactttacttttgtgtgtggaatgctgtttcatgttttatctttgaagacaggtatgtcaaaactttactaaaataaactctctggccttgagctttttctatttcaaagaagaggaaggtgactgatatggtctgaatgtgttcctccaaaattcatatgttaaaattgacaccataaaataaataacagagagactgactctccaaaataaagcgtttattccagaattgcaaggaattgcaatttgagatatgcatgctatagtggactataggcacattaaaagaggttgtggcaacgagaaaagacaaagtccacataagcttctttaaaacaagtaccgttgatcacaggagcctgttgcaggagttggctttagcttattgtggagacacccactgttaggcaaatattcttatgcaagtggtttatctataatactgcggattttaggaacttcttgagataatttttgtgacaggcatttgttagggtttgacataagtgactccattttgatactgataatttccaaaaagtccttactcccaaggtgatggtattaggaggtgggacctctgggaagtaattagtgaaagggtcttgtgttggttcgaaccccaagagcgtggccaacagacaacatgaggcagtgtgtgtgcaggtgggctgaggcttaaaatggcgtcagcaccaaatgaggacggggcaggggttttgtagtctcctgtaaacaggaagtttctcagtctgttgtaaccgctacattgtacccggatgacgtctctctcggtcttcagggggtaggtgtcttctggcccgctctcttcccgcttctgctatcttgctgacacatgctgctggcgcgagtggccttgcgccttgggaccgggcccaaggagggaggggagggaggggtcattcattctcttaagctttcag

SEQ ID NO: 915960 - DNA, 4001 bp, Homo sapiens
ccgtcccacagcttaatcagacaaaactcagcattagagagggtgagagaggggaagaggtacttacagggactcctctctatccgaactgtttgaagagtggaggtctttctggacttaggttgggagttgatgagcaacctgtcccatatacctgaaaatacagacacacaaacacccttaatttactacagcataaaaaaacaaaggcccatcagtaagcctctcacatgaccagtcttaagacttgactgtccacactcccccaaaattttttttttaaaggagaactccaagctccattacaacattttaattctttatgtacagccagccacctctcctttcttacatctgtctcattcacctctatcaccaatggcaggtaataaatgcacaccaatctgcacttttctggatcagaaattcattagcagacaaacgtgggtctgcaatgacagaacggaggaaacagtacagagcataacaatggttaagtgaagccagaaatggttactagttgtgtaacactgggcaacttacctgatcttcaagcatttgtttcttcattagtaaaacatgcttgcctggtatttccccttccctgaagacgttcaacccaaggaaagcagccttttggggattttgtcacccactctacctttccagcctcatttctcactactcaaatcatcccaactctctatcccatcagagttccaagaggggaacgtacaaaactcaaggctttgcacaccctatttctaatacccggaaaatcccttaactctctggttaaaaaacaaatcctgttcacctgcaaagcagagccgcaacaaacatccattgaatgcctactacttaaggcctactggattcgtgatcagagcacagagtctggagccagactacttgaattcaagtcccagttttgctactttctagccacatgatctccagaaggtaaattacctgtatgataaatcatgtctcaggttcctcaactataaaacagagataacagattttctgcaaagggttgttgtgaggattagatgagttagtttctggggcatacatagtaaggactacataagctttggttatcattattatacttccttcggaatctctgggttctcacaaaaccttttcttcaagctagtatttactgacaacatgcccaagcctttttaggcattctcctcctcacaaaaattctacaggcattactactatcaccattttccaaatgcaaaaactgaggcttagggaatgaaaataactctaagtcccaccagttaattactagtggagctgggattcgaactcgtgcttttaaattctacctatagtgtctgaaatgctgtgtggatttcctggatgcatgtctccctctacaagacagcagcactaaggggtggtctgtgtgggtgtgaaagaggtagggactgttagcataatattactccgcttccccctatcagccaactgctccgacccaggcagccaaaccaaaagccctcccttccccaaaagaactcgagagcttcccagcttccagggcagggcagatgcctggcagcggcgcctggcagggtgggcgctcactaccttgcagaatataagaaccactagctggggaaaccattccgggcccgcagccgggtgcccgccccaaagcccccacccctgccgcgggcagggcacgccggagccccgcagcagtccccggggctcccctcgagggtacggagcccgggcagggagccaccggccggctcccaaactgcaccggccgcgcctcctctgccgcacgtgtgcggcccatgccgccgtcacccgtccgtcacctccgcggccgtcgcttcccgccgtcagcagctccttggacactgggactcctgaggaatcccgggtgggcgacgaacaactcgggctagccttgggcttgccatggacctccatgcttccctcaagcctgcactctcaggcccggatgcaggaaaaaggctcgggtaagggggcggggagagggccgcgattggaggaaactgcggtgggcggagtaaggagcggagagagaggcggggcgagcgtggtgcagcctggaggctgcgcgggagcaggggccattcctactcctgggaaaaagaaaggttcagacactgtcataggaaaaaacagcgggcaaggctcgatttcgccaaattcgggcataaagagcataacattaggcttccctcctctttatccttttttattaaatttttttttaattggtgaaaaaacacgtaacaaaatctaccatcttaaccatttttagttgtacaattcagtggtggcagacctctagatcattttcatcttgcaaaactgaaaccttatacccatttacccctactccagtcccttggtaaccaccattctactttcttctttgtttctttctttttgaaacagccttgctctgtcgcccaggctggtgcctcagcctcccaagtagctaagattacaggtgcacactaccacgcccggctaatttttgtatttttgtatagagacgggttttcaccatgttggccgggctgatcttgatttcctgacctcgggagatccacccaccttggcctcccaaagtgctgggattacaggcgtgagccatcatgcccagctaccatcgttctactttctgttactatgagcttgactacttcagatacattatgtaggtggaatcatacagtacttgcctttttgttactaatttcacttaaaataataccctcaaggtttagacatgttgtagcacataacaggattctcttcttttttaagcctgaataatatgccattgtatgtatataccacattttcttaccattgatctctcaacaggcgtgctggttgcttccacctcgtggtcattgtgaacgctgctgcaatgaacatggtggtacaaatatctcttagagaccctgcttttcaatgctttgggatacatacccagacatgggattactggataatagggtaattctactttttaggtttttgtgaagcctccgtatagtttttcatagtggctgcaccattttacattcccacagtgcacaagagttccaatttctccacatccttgtcaatatttcctttttctgtttggttgcttctttctttttgacagtgagcatcccagtgagtgtgaagtgatatcttgaagttttggtttgcatttctctaatgatttagtgatgctgaacaccttttcatgggcttgttggccatttatatatcttctttggagaaatgactattcaactcctttacccattttttaatctggttatttgtgtttttgttgttgagttgtaggagttatttatatattctggatattaaccctttatcggatatatgatttacaaatattttctcccattctgtaggttgccttttcactctattgcttcctttcctgtttgttcttttaacagtctttattgaccacctgcagtatgcccagacccctcttatataggattcaaagcagaagcagcagaaaccttggaccaatcttttctgcttatttctgacagtgcagaggctccagaatcagcctggagtggattaaatccagtgtcatattattcatttagtagctgtgactttgggcagatcactccctgagcgtctgtccttctctgcagaatcaggataataatacttcatggggatgttataaggaataaaagaggaaaaggagtaaaatgtatgtaatggcactggtgatacagaattattgggctcccagctaaaccccactctaaagcatggaactgtggccctaagtgacaatagctgaccccatttttcgcccaaatgttgcctttttagcctgccattcccatatcctgcgcccataaaaggaccagctgacagagcaatatgaatggctaagtgttggggatacaagaagagactacagatagctgcggcca

SEQ ID NO: 915961 - DNA, 4001 bp, Homo sapiens
taaaaaaaaaaaaaaaaaaaaaaaaaaaagatgggaaattttatgtcgtattttaccacaataaaaaaaaattgaaaaaaaaaaaagatatcaactaggcaattggatataagaatttggggatttctggacagatctaggctgttgttatcaactactggcatcaacagcatacctccagagatcacctgagtatttaaacaatggcccagagattacctgagtcagatagagaggaaggcagaggacggagtcctggcgcaccccaccactcaggggtcacaagacagagaagggacaacacgcgactgtgaggaggtgtctgaggtggcagaaaacacaagtcacagaagtctggtagtcacatgattgcccagacatcccggccaataaaagggacttacaacactcagcctctctgtttgcctaaggtggcaggtcacgtacaattccctattcttcccttttcacagctcccctgccaatccactaaatgtagagtgaccacatagttttatcaatgttctattcacttatatattttatttacacacttgagctttgagagtaaaaaggagagctttttataaccatgtcaggacaacagcataacccattatcctgggtgcaccctggggtgtaaccaccctttctacacaactaagcactcaacctggacttctagacaaacttattaatgctttgggtaagatttccccacccgtgctccttgctgtttctcccagaaattctcacatggaagaaaaatgaaagggtgcagtgtgttggaggggtggaattctaccaatcaagttatgcacaaaaagcataaaaggaactgtgggtccttttgagtcacccaggaggacacagagcccccaaattaaacgaagggcacccatgcgagggctggccgaccctcgccacctatgtcttggtttcccccactgtaatactgggaaccccacttctcccaggcctgctgcgaagatgaagccagcaaatgcacgccctctcttagctctggaccgggcaggtgaaaagcagggaggtgttcataaaagcagtccccaccgctgaagggtcctcaactcggggttctagtcccagctctgccctggcctagcaaccccttcccgctgcagggaccaaggcggtgggcaggtccctcacccgtgctgagaccgggacaggaatgcgcacctctccccaccctcggacgccccggcggcgccgctgcagaagtcgggaggtcggacaaacgcgaggagtaaggaaaaagaggaggaagggaaggaaggaggaagaacgaagtgaggaaagaggatgtcagggaagaaagggagtaaaggaagaaggaagggagagggggacagaaaggaggaggacggaaggaggaagggaaggaagaaagacggaagggaagggagaggaaaaaggggaggaaagaagaaagggaagggggaggaaggaaagggggaggaaggaaggaggaggaaggtgaggaaggtaaggaaggaagggaggcagggagaggggaaggaaggaggaagataaggaaggaggggaggtaggaagaagggaaggaaggaggaaggaagggaaggggagaaagaaaggaagggaaggggtaggaagacagggaggaaggaaaaaaggaggaaggtaacgaaggaaggaaggagaaagtaaagtaagggggaggaaggaaggaagaagggaaggggaggaggggaagggcggccactgacctgcttgaaggtgctgctgaggaagtagacgagcgacagcccgaagaccagggcgagcacccacctcttccgcagaagccggcgccacaccatggccgccaggttcaccatcccggcgcggacgtggggcgcggcggccggggcgcggaacgcggcaggcccgggtcccgggcggcatggcccctacgcgcccggcagccccatccctccaggcaggcgccggccccgccgcccgcagcccagtctgctcccggcagccttgggcgcagccccacgtgaccccgccctacgccccgcctccgctccgcagcgacaagggctagtcgcgcaagatcttctcaccattggtccctaaggaacggcggcctcctattggttaagtgccgggaaagggggcggacaatcgcgtgagtgctgcgggcgtagctgtgcccgggtcctagcgccggacccggcgacgccaagaaaccacccaataggaggccggaagcatcggaagtcacatgctgcccaggctgcgcgggtgattggcttggctggacctgaatgatgcggctgtgattgctgaattgtctgggcaggtaaaaagagaacgcgatttttttttcttttctcccatcatggtctgtgtagtctcctgcccttgcagtcccagagcgttttgcgctgtgtgttggttgcagggatgaaaagcgctcgcgacgttgttcccgaagtgcacctgccggcttccagtccaagtgatgcaggcgatgctcctctgagtgcatttcggtgcagtcctgtaacgggccccaggggcgcaacttgaaccatcgcaagcatcgaaaagtctcggtgcggtccttcaaagggacatagtgggatgtacagagcagaggattaaaaagcgtttcattcattcagatgcatcccgcgtgcaaaaatttattccagaattatgtacggcctgcttccgacaaagaatccgaagcctcttccaatacaagcatccgaaagtagagtttcgagcattcgatttaggagttaaatgtgtggatgagaactttggaatatgaattttattttcccccaaggatttgcaatgtgggataatggagggaggggcgagaggaggattaagttgagattgcaaattcttgaaaaatatttatataatgaccttttcttgatatatgaagatgctgctgctgaccggtttgttacctaatttttcaaaagagaaaggaggcttcactggcgggtcatttttaatcagtggccctagtgacaccattgctgccccctcaagaagcctggtcaggattaggaagtcattcaacagccaataatcgtgccctaaactgaagtcagacaccatctgactgatatagacaccctatatccacaatattggctctgcctccagagacaagaagatattcacggaggctaaaccttttcatgggaagtagatggcccttattaccttgctagggtgaaaggtgggacagggagcaagggatctagaaaaggggaactgggagacccatagatgttttattcattgagtaaatacttgttgagcgccactctgtgccaaacagtgtcctggatgctgaggcagaggggtgatccaagtagacaggatccctactttcaggaatggcatttatattctaatggggaggacaaatcataaataaataagcaaacatgaacaaataagtgctatgaataatataaaacagggcaatattacggggagtcaggagaatgagaagagaaggcctctgggaagagacgacatttgccctgcgggaccaagccctgccacatttagaggagaaagtattccaaggggagggcacagcaagtgcaaaggccctgaggcagggacacgctgacacattagaggaacagaagggccactgtgggtggacaggagtgggaaaagggagaatgggaggaaatgcagttggaaacagatgatgctacatcaggaagaacccgtaggctatggacagagctcgggtttgattctgattgcactgggcagccgttggagggtttaaaacatattttctggcttccccaatcaggactcttagtttgacaataggatgaaatacaataccttaagagtttcaaagagggccgggcatggtggcttatgcctgtaatcccagcactttgggaggccaaggcaggcggatcacttgaggtcagaagtttgagaccagcctggccaatatggtgaaatcccatctc

SEQ ID NO: 915962 - DNA, 4001 bp, Homo sapiens
acatgatccaagtgatcttcctgcctcagcctccctattagctaggttcacaggcatgcaccaccacagccagctttttttttttttttttgtagagaggaggtttcaccatgttgcccaggctggtcttgaactcctgtgctcaagggatccacccacttccgccccccaacgtgctaggattacaggggtgaaccaccttgatggtctgagtttcaattataaatatgacactgggctggctgggtcaggcgtctagaaagtgcactaacattggaagaaagggtgatcaggcctctagttcctgttctgctaccgattagctgtgtgacctttagtaagttaagaattctcccaaggcattctatacaaccgagaggggtgggagaagagatagtgaggaactagatttctaaggtagccattaaaatcctgctaatcctaaacagacaattttagaggattcttaagattatctttcttataaaggaaggacaggccagaaaagatagctgttaaagtcaattgacaaagttaaatcatattaatgtcctttgtgagctccatgaatgcagaaatggtatgttatttatctgtatgatccagtctactggcacacattacctactcaaaatgctggtgtgctgaactatacgttcgtatttgggaatcaactgcacttttattggagctttctttatagaagttatttctcagatatatttctttccctgttgcatcatacactttacctgtcccccatttaattctcgcattaaagtagtgagatacgcactatcatttgcatatcaggaaacttaagtccaggctacctggctcttagctggagaacagactccaaccgaggtctaccttgcctgaaaaatctgtgctcttagcagggcgcggtggctcatgcctgtaatcccaacactttgcgaggccgaggtagtcggatcacttaaggtcaggagttccagacctgcctgaccaacatggcgaaaccctgtctctactaaaaatacaaaaattagccgggcgtggtggcgcatgcctgtaatcccagctactcgggaggctgaagcaggagaatcgcttgaaccccggaggcgggaggttgcagtgagcagagatagcgccactgcactccagcctgggtgacagagcgaggctccatctcacaaaaaaaaaaaaataaaaataaaaatctgtgctcttaactaccctgattttcacctcccgttaacacttggcaaatacataaagacctatcagcatgcagctccgtgtaacgttatgataataaaaacatttatttgggatgatacggtctgctgagatcagagctgtgatcctcttttctctcccagaactgtaacctctggggaaaagaaagaagtctcatatatgtgcctggggggctgactgcctggggaaacgagggggaacctcagaaactgagaggatagcggaaggcagccggcatcaaaaacatcagccatggacgagcaattctgcaaactctttgcaatctgctggggagcaaaatcggtacccagacaagtctgtggacatgtctggcaccgtttttggtgcagccaccaagtgcctacgaaccccgatcccttgctcctccgggcctcactttatctgaaacacggaacgaagctatctaagacctgccgtcgtccctcggggctgctggggtgagaggaggggcgacacgggacggccccagggcaagcgccccggaaaaagcgcttccaagccagccctcccgggctggagcgagcagggaggggagagggtggtggacccgttttcccttcacccgctccaacacactcaaggaagagagagagaaagacatcctgccacagccatactcactgccggacaacagtcagagcgaagcgagccatgttcccggagccgcgtcccgtcggtggccccgcgccgcgctgcccctgcactgcgggctacctcccccacaccacttccgccaagcagccggccggctccgccgccataggccgaggcggcctcgcacgtcatccccgaaggccactcagggccgggcgaggccgacggggcgggggagacgagggagccacgggggccccgcccagggctgcggcgcttgcgcccctgcgcgccggcctgtgattggcgcgcggcaggtgcgggaggccccgcccgcggagtccgcggtaggattccttccctcgatagccggcagcctgcgttcggggcagataaggaagccggcgcactgatttgtggttgttgcgattgaggctggaatgcaaccgttcgtcttatagctggccactgtgatgaacccctcacgggtgtacagcgaccaacagactgtgttctatgaggtctgttagtccctaaccttagggacgtagcgtcggccaggtctgtagacttagacccacccaccccaactccgccgggacagacgccctccgtgaccaaactttagtcgggctcctttgaggccttttctatactagacggcatcctcggcctgctgagcctggttttaccaaagaatcctgctaagcctgtttatcaagagagacctcactgttgatgctctcttctaaggcccttgatatctagtaaagttcctcctccccctcccccagatagcttaccacgttctggtaatttcccatcttctctttcatcccttccatcccgccccctggctataaatctccactggtcccggttgtattctagagtcgaattcagtctctctcacctattgcagtagtcttgagtaaagtcttgccgtttttaacaagcctcagatgaataatttctctttaatagccttcagaacgttgagggagttgcttcatgttagatatgagttctaaatttcttttcaaagaatcaatatgtcagtatgttcaattctttgctttttacttttaaacttaacttcctcctaaagcaaccttctcttttttatttatttatttatttttttgagatggagtctggctctgtcacccaggctggagtgcagtggtgtgatctcggctcactgcaagctccgcctcccgggttcacgccattctggctcagcctcccgagtagctgggactacaggcgcctgccaccacgcccggctaattttttgtatttttagtagagacagggtttcaccgtgttagccaggatggtctcgatctcctgacctcgtgatccgcccgcctcgacctcccaaagtggtgggattacaggcgtgagccaccgcgcccggccacaacctttttcgattacctgctgcactctgactccttcccattacctactccaccctgactccttcccattacctactccaccctgactccttcccattacctacgccaccctgactcagattacctgctctgtcataactgtttttcccgccaaaccactcacccccatcactctctttagattagccaatcggaattagtttagcctgtgcggtggggcactacacagcagcaggggccacgtgcgtcagggataagaaccccttcccctcccttgtccaagtgtgcgctcaccattgctccatctgtaaggacgcacccttctatagaagtaccttgccttgctgagaattaaaaagaaaattttatattcgagtgctatttcttttgtggcactgaaagtttatttataacatgagcttctctaaccctgggttttgtgacaggtaaactgggatagcagtacctagcaatgtgacacaagtaacaataatgttagctaggtgacattgtcttccatgcactgttacctaaattcttgtatttcataatgcatttatttccttgaatccccacttatatatgaaaagatgtgtttagagaagagatgaatgagatacttagattcataggcacacatttcaaaacagtcttacatgtaatatcacatttggccttctgaacaattctaaggtagacaggataggctacatt

SEQ ID NO: 915963 - DNA, 4001 bp, Homo sapiens
caacttaatttctcttttggaagaaagccagatgaaatttttaagaatctctacctacattctaattgtgaaaatgatttctattaatcaatccttttattagataatctattttctcagtctatggagatactgttaagtttttatggagcttaaaatttatgttattgtggaattttaattattgtattatgatatactacattaaatatatgtgctttgtgcctttggcttagaaagataaacaattgcctatacatatactcactgacttgttaatatgccaacaaaagtagatgtggattgttttaatgggccgctattacttcttaaaaattctatgttcttttaaatgtaaatgcacatttggtaaaaactacaagcccctgttgtgtgggaagagaggtggataacattcttccctcttttgacacatgttccatggttgttctttatcttttatctctctcctacttccatcttcactctctcccccttgttaaagtagatccatatactctcatagcacgggttagtaggcaggggttttcaagtcaataaactggtatttgaaaccctgggcgccaccacttgcccattgtcacaaagttaatacttaactcatactctctgtgcttcagttttctcatctgtatacaggaaataaaaactactttccttacaggttagctgtaaaaatgatgtgatataaggtattgtgagctattattattatttattcatttaattatttactggtaacttactcattagccactctgctaagtacttggggatacagcagtgaaatagacaaaacactctgcccacctgggacatgaaatctgttattattctttattatcctagcatttaatctaacaggtaatagaagtgaatccaatttctgtggtcagagaggttgactccattcaggtttcctaacagagaggaaacacttgaaaccagacatatcatctttttcactggattatttcttgcatgagcacaaagctccaaatattgagtttctacctttatctggttttactaagatctatacatcctaatacattggaggaattctcagtttttcccatttaactttataaagtttaatttatatgtggccaatttgtttatattaattttcttttttaatgatatttaaatatttgttattacttagacttttgacagaggaaaattcagtaattgggttaataaatttcaaataggaaaacagatttattacactaagattgacacttacctgaattcaactatttgaattataatgactggaatcatattaactaaaacaatatcttgtaacctatgatgttttaatattaggaatttaatgtctcaaggtgtcataatataggcaaaagtgccacatgaagattcaaaagctatagacatataactggtatatataagggtagtttcaaacaaataataattttaaattatctcagatttcttcagagaaattcagtatgtcaaaaatacatgataagctgttactccagattttacaaatataagatatcttgcaagaaaatagtaaatttttgttcagcaatacaagttattgccatatctcccttcattctactaaaaagattaagcatgtgaagtactgtcaattgtacaatatttacctttatgcatgtggaattaaaaaagaaatagcagtcattcccaacttctgccattttcaactctcttgctgctaatccaatggttttttttttttgaaaaatatatatgaatttcaggaatgcaaatacaagaactatcagtgtgtaagggggaaaaataatttcttttccacagtctttcaggctatcagtagtattcctttaaaactgacctcctgttgacagtatattacgcaatagataattcttaaagacatttaaattagaagataccttctctagctttgcagaaacgctgaaagtggttgctagtaagcacacaaactcaaacttctagaattttcctcattgttacctaatccattgtttgctcatcataaatgacctcacatgtaactgcaggccaatgttcactcaggtaaactacagtttacctgagtgaacactgtatttcccttactcagttttagcatattaactacaaaggactagcaaaaataaaatagcatactttaatctttcaatgttctcgttgaatatggactataaactagtttatacttttataatagaaagtgataagtatttcacaagtaaacagctatttctaaatcttcgtttctatagaggttttgggaataacactaaaaatttgccataggtaaatgagctactcatattctaagataataaaaacaattatttaaatatgtactctctactatccattgatttgggaaaaatcatattcaaattgtgatatattaataggtacctgaaaatatattgggctacttattcatcttgtggctatattccatttatttttcatccatcataaaaagaggaatatcttcttcctatagcagaaagtttccagagtgcttgaaggctttgagaatttgttgaaaacaagggaaatactctgatttccagaatgaaacatttcaatcagcagttatttatatcttcctcttagtatctttaatcaaataattaaaacccagcagaaattaataaaaaatattcctcataaatgtattagtccgttttcatgctgctgataaaagcatacccaactgggaagaaaaagaggtttaattggacttacagttccacatggctggggaggcctcagaatcatggcaggaggtgaaaggcacttcttacactgcggtggcaagagaaaatgaggagaaagtaaaggtagaatcccctgataaactgatcagatcttatgagacttattcactatcatgagattagcatgggaaaaacccgtacccatgattcaattacctccccctgaatccctcccacaacatgtgggaattctgggagatacaattcaagttgatatttgggtggagacagagccaaaccatatcattccaccacttgtccctccaaacttcatgtcctcacatttcaaaaccaatcatgcctttccaatagtcccccaaagtcttaactcatttcagtattaatccaaaagtccacagtccagtgtctcatctgagacaaggcaaatcccttccacctatgagtctgtaaaatcaaaaacaagctagttacttcctagatacaatggggatactggtattgggcaaagccactgcaagtgggataagttggccaaaacaaaggagttacaggacccctgcatgtcctaattccagcagggcagtcaaattttaaagctccaaaatgatgtcctttgactccaggtctcacatccaggtcatgtggatgcaaaaggtgggttcccatggtcttgggcactctgaccctgtggctttgcagggtacagcctccctcctggctgctttcacaggctggcattaagtgtctgtggcttttccaggtgcatggcacaagctgtcagtggagctaccattctggggtttggaggatggtggctctcttctaaaagctccactaggcagtgccccaggagggactctgtgtgggggctccagcccacatttcccttccacactgccctagcaggggttctccatgaggtccttacttctgcagcaaacttttacctaagcatccaggtgtttccatacatcttctgaaatctaagtggaggtttccaaacctcaattcttgccttctgtgctcctgcaggctcaacagcaatgtggaagctgccaaggcttggggcctgcaccctctgaagccacagctcgagctctatgttggcccctttcagtcatggctagattggctgagacacagggcaccaagtccctaggctacagatggcacggggaccctgggcctagcccataaaaccactttttcctcctgggcctctgggcctgt

SEQ ID NO: 915964 - DNA, 4001 bp, Homo sapiens
ttttaccaccaaaaaaagcatatcttcattggcagaaaggccagggctctggtgtggtttatgtgctttctcatatagaagtctaggagactccaatatctactcattattttttcctcaaggtcctgcagctgtctggaagagaattcatactcttagatagagcagattcccaacttcctccagattcagtcttctcaattcctcactgggtctcaggcttgaggtccagttaaccattctgagcactttcaggcagcttagaaatttagaagtcatttttcactttctcttcccaaatttctacaaactctttgtttcgctcttattgcccaggctggagtgcaatggcatgatcccggctcaccgcaacctccgcctcccaggttcaagcgattctcctgcctcagcctcccaaatagatgggattacaggcatgcaccaccacacccagctaattttttgtaattttagtagagatggggtttctccatattggtcaggctgatctcgaactcccaacctcaggtgatccgcccgccttggcctcccaaagtgctgggattacaggcatgaggcactgcacccagccccaaatttctacaaactcttatctcaaaacatctgctgcaagttcaaaggctcaagccaagttctgattccttatgaagctttcctgacccataagttcacagtaaaccctccttcttttctgacttcatggataccatcacctgggtctcatatttagcctcaagcagcagattctagccctcttttccactgtaggccaagagaagcttgattttagatggttgaccttgatttacactatagaggatataaaggacttaggcaaagtcaatcctggaataaattaatgtccctagtttgtataccccgccaacccctagaggaattgcaattgatgcctgatttctaaattaaaatgacaaagatttgctattatctctttcattaaggagatggagaagagggaggacacatgaaagtccccatcttattcagccaggaagcaagtgaagccaaatgaagagccatagaagacaggaggccctggttcttctcccatagagtatagcaatctaaggatgtttgagggtcatcattagccccattaccttctctgctgcttggaggtcatttctaccttttgttcctgatcctggcagggatgctgtgccatttgttctcagacagaaaccaaggactctggagctgaagatggagatagctccaggccctggagaggcataaatgaatatgcggagaaggcaggtacatggtgagaagaaaagcgcttattcagtggagaactaccagcagttaatggagcatttgtattttgaatgggtgagtgtgcatgtgcatgtgtgtgcttgcatatatgtgcatgtatgtgtgcatatgcatgtacatatgcataaggaaagatgaaggtaagaggagggtaagaggaaggaagtatttgccctgggtaaaatcttcctatagtctttgtcagtaacaacagaaattgcagtgaggaagtagacgaaaaaaaaaaagagagaatctaagtgaaaaataagttggctgagattggggatgggggattggccaaagggtctttgagttcaggcaaggacaggaaatagtgtagagtgaatgcaagattgtcaaataccccaccccctcccacctcagtcagaattttcatggttaactaaggatagaggagtttcaggatggagggccatcagctccagccttaaagtgctttgtagagaagaagggctcataggcagtggcccagacaggagacaaatcctcctttgagaagtttccctcccacttttcccactcccacccttcttggcctccaagccccagtcaagaacgaggtcaattatgcctagaaacttaccctgcttggttccccaaattacactttgccccactccttcacccctagactttttcctatttgagccccatctcacaacagcctcctgttcccatatcaaccttgccattttcaatactttgtgacttcagctgtgacctcatagacggacaacttgctttccctcccagccacacactaggctccattcaatccaaacgataatggtaaaatggagggataatgttgtgggattttaattttaatttctgggaatttttgcttcttcattgccttctacccattgcattggaaatccattgattcttagagatgaaaggaatgaggccagaagaatccagtttttactttgaatttcaaaatcaggtctgagaaatctggctttcaatttcaagagctaggtccttcagagagaaatggttttgttgtgaattcccaaagtctttgacctagaaaatcaccaaagatttgtgaatgatcatggatttaaaaccatttagatttagaagggatgaaaacagtttttctgaagaaagtatagggttttaatacggaggcaggaagtgaaaattagggaagaggcattaggtgtaggtgtgcaactctgggacctgcttccttttggtgatggtgcatataaaatatcccaatatgtctagaaatctaagaacagaaggaaccaagggccagcttctcccttgaaactagacccctggaggagcagcctcagagagagcactgtgcctacatggggaggtcgtggtgaagtgggaattgtggtatagcgtgtttaggcagacaggacctgagatagtacctttcaggtcccatagcctgcccaggtgatggtgggaaaactcctcatgcagaaatgcagagtggagaaggagagggctaaaatctaaagaggactcacaaatcatgcaacctgcgacaaaatgccagggtatgtacaacagatggaggtgtcaacattggctcggcgctccacctgtctttagcagactttaaaggaaaggcatactgtcccatcccttgttttgattttagagctccaggtgctactagtgagaccaccatggaccctctctgcacaccaccttcttactatcatgaagtgcttcaaattagactctgattagaggttactctctcccaccctctaagagaccagcagggccatttccatcataatctacctttttatttacctcagtttccataaggagtctaagctcctccctttatcatctcacatcacagggacttttaccctttcatggccagatgtatctcataatccaactcaattcctacctctctcaaaccaccccaagtcttttgctatccaaaagtcattttttttaaaaaaaaaactctatttttattttggattcagaggatacacatgtaggtttgttacaaggatatattgctgaggtttgggcttctattgatcctgtcacccagacagtgagcatagtacccaataggaagcttttcatctttgccccctccctcccttcttttggagtctattgttcccatctttatgtctgtgtgagtgtagcttccacttacaggtgagaacatgtggtatttggttttctgtttctgtgttagcttgcctgggataatgacctccatctacatccatgttgttggaaagaatataatttcattattttttatggctgcattgtatttcatggtgtattccatgaagagaaatgtaccacactttatcccatccatgattgatgggcacctgggttgattccatgtctttgctattgtgaatagtgctgcgataaacatacaagtacatgtgtctttttgttagaatgattaattttcctttgggtatatccaaagtaatgagattgatgggtcaaatggaagttccatttttagttctttgagaaatgttcaaactggtttctataggggccgaactaatttgcatccccaccagcagtgtataagccagcatctgttatcttttgacttaataatggccattctgactggtgtgagatgagatgtctcattgtgattttgatttgtatttctc

SEQ ID NO: 915965 - DNA, 4001 bp, Homo sapiens
aaaggaaatttaaattaaaaaaaaatttagttcaaggccaggtgctgtggctcttgtctgtagtggatcacttgagcccaggagtttgagactagcttgggcaacactgcaagatcctgtctctacaaaaaaaaatttttaattagccagctgtgatggcatgagcctgtagtcccagctacttgggaggctgatgtgggaggatcgcttgagccctggaggctgaggcggcagtgagccgtgatggtgccactgcactccagcctggatgacagagtgagactgtctccaaaaaaattgttttagttcaagagaatggaaacaatggtagtgaggaaaagcaatgttgtatcccgaacttttcctcaacaaagaaaataaattggcacagttacattagttcacaaaggtattccgagtagaaaaaaaatctttttttttcatttaattttattcttttcttacagactcgttcaaaacaagccatgactcctcagcaaaacagctccatcaagcgtctcgccaacctctcccttggggctcagtcaagggaatgaaaaaacgaggctagacacctgtccccaacggaaaaaccaagaacacacctggagagcagctcagacaaagggagccaggcggggaaaacagtaattggagaggagaccgtgcttccagtctgttgctggtttacaaggtaaatctattcctggacgaaaggggtacaggaacagcacccgaaaaccggcgacaggctgtggcaggcccgacgtctttcaagcccagctcctagcgtcgacgcccctccttccaagacgtttcccagcaggccctgcgcccagtttggatcaagtgagccgcctgagattgccaagcgtcctgtgcgcatctcattaacgcatctgcttattcatgcatttattcttttgctggggagggggtggaggggaacggtgtctcactcattctgtagctcaggctggagtgcaggtggggcgatctcggctcacggcaacctccgcctcccaggttcaagcgattcttgtgcctcagcctcccaagtagttgggattacaggtgcacacgaccacgcctgggtaatttttgtacttttggtggagacggcgtttcaccatgttggccagcctggtctcgaacccctgacccccggtgatctatccaccttggcctcccaaagtgtaaggattataggcgtgatccacggcacccggccttatgcatttattcttattgagcatctaacatgctctaagcatcgggggcaaaaaagtaaatgagatataacagcacttaacacacagcatttatttgcacgggtgttggctttctagccctccagcgactgcttctaggtaggggccctctttcgtttttgcatcctccgagtctagcacagtgcctggcactgactaggtgctttgttaacaaaggaatgactttaaaaggtatttttgatagggagctcggttctcaaacctgtagccctacgtggggtaggggaggcgggagaatgggtgaacaggcagacacgaggagaatgggagacgtgtttgtattaggagtgctcacagcaatccacagcttccctgtgttcctcgttctcaaataagaggaggggagtcgagggcaggatggggcagccctccccgcgcaggagggctgggtttgggggccccagccgggagttctcactgcgctcccgagcccgcctgcccacccgcgccgctcaccaggtcaatggccacgacgtcccgcagagccactacccgccggatggacttgggcgggttctcggttaggtagacgagccggtcgcttagcaccacatacttgaggatgtggttctcagagttggacaccacgatgcatggctcgtaggcgcggaccgcgtcgtagacctcgggcggcagatgccgccgcaggaacacatccaggcggctgttcctgcgcgcggggaagccggacggcaaggggctggccatgcccggcgcccgcagcgtggcggagtgctgggactcgaggccctcagctcgccctctccccgcccccgcgctggaacccgcgcgccacaaagccgccggccacgcgtcgcctcctctccaggcgcggggacccgggccgcaactgcaggaatcgacgctaggtcggcttccctggagcgccctccccagccctgtccagcctctcgatctttgtcctaacctcagacggcgatgggcggggcaagacgctggtccttcaggcccgagttgatgggcacctcgggctcatcaccgtgaagtcccctgcggccgaagggcggtggatttttagggtctctcccgcccacccctaatgccagtccccaccactgcgtactctgttgcggatcacaccatccaatacaaactttattggtaatggaagccagcttcaatctggtttcctgttagaaacttgaaagagtttaatttaccgatttatttttaacaaccctagaaacctattaaacccaatcacacagatttagcttttggttataacatggcctggcacagctttctgatattgtcggagtgtaaacataggtcttctttctccaaccagtgagaaagggattttttttttcttttctctttttttttttgagacgcagctttgctcttgttgcccaggctggagtgcaatggcgccatctcggctcaccgcaacctccccctcccgggttcaagcgattctcctacctcagcctcctgagtagctggaattacaggcatgcgccaccacgcccagctaattttgtatattttagtaaaaacggggtttctccatgttggtcaagctgatctccaactcccgacctcaggtaatccgcccgcctcggcctcccaaagtgctgggattacaggcgttaagtcacctcgcccagcctttgagaaagggattcttcacatgaattgatgtgagcacacccaaaccaacctaaggcatatggttttgtttccaatgcccaggacaatctatgcaggaagaatgaatgggtgatgctggcatcttgaaaagttgaagctgatagactgaagaatgcggattacataccctgaggctgcagaggagtaagtattccttagtttttacaggccaagaataacttactaattaggttagagaaatgagaagggcacaacagaaatgctctaagtcagaagttccattttttatttcgaatcctagaaaagttattctcttcccctccccattgacccaaaaacctgataatgaaaccatatcgttcattgctgtggctgccagcaaccctgaatcaaatttgatatattctttatattctccctttctacatattttattattgtatactgtatgttataagcaacttcaaatcccttgtggaaagaaggtataaatatattacaatccataaacagatattgtagactacactagtacaaagggaaagagaaatgttttggtctggctaaactttttttttttttttttttttgagacagagtctccctctgtcacccaggctggagtgcagtggcatgatatcggctcactgcagcctctgcctcctgggttcaagccattctcctgccacagcctcccaagtagcttggactacaggtgtacaccaccatgcctggctaattttttttctgtgtgtatttttagtagagacaggatttcaccatcttggccatggcttgtctcctgacttcaactgatctgcctgccttgacctcccaaagtgctgggaatacaggcatgaaccaccgccatgtaagggtctggctagacttaagtctaagatcatgttaaggaactcaagtgagtaaagagaagtgccacctgctggcaaaatcttaaatgacctagtagttaaagttttcttaggatctcatcacacatctgagccttcctaacttcataaatggatgaaaaatgaatgaactacaccatccgtagcaacctttattgat

SEQ ID NO: 915966 - DNA, 4001 bp, Homo sapiens
tggaaccccaagaatgaacacgagaccccaggtctgtagctggaactcaggaaggctatgaggcagcagagctgaatcagtcaacacctttggggaacaccaggatctcaccaaaaatttaaccaccaaccccccccaaacaaaaattagctgaaacaccctggagagactgcagccactgctgtcatgcagacatgtcactaaaaggtggcacaacagcatttaagtccagctctgctactcgagagtctgcaccattagagtttgcttcctcatcacaaaatggaataataatgtgattaacagtacaggttgaccatccttaattagaaaatccaaaatctgaaattatgagtgccagtgtgaggccgaaaatggaaaattccacacctgacttcatagtggggggtgggggagactgtagtcaaaacgcagtcaaaactttgtctcatgcacaaaattattcagactattatataaaattaccctcaggctatgtgcataaggtgcgtgtatatgaaacaaaacaatttcgtgttcagatttaggtcccatcccccaagatatccatgtatatgtaaatattccgaaatctgaaaaaacccgaaacacttccggtcccaaccatttcgggtaagggatacagaacctctactgtacaaaacgcaactcggacgcacaagctcagggtagaccctgggctctgagtgccaagaatgttagtcagattgtggctgccgccgtgtggcgagaaaggggacaaccgctcatgggcccacagatccggcgccctctcccgacccaactcccgccttcccgcgtctgacccgccttcccgcgtctgacccaccttccccgtcgcagctgaagccataggctttgataacctcctgctggatctgcgtggccacgggcagcacgaattgcagcatcttacccatgtcgttgcaggcgttatcccgagcctcgtccatgcgcactgcattctccggggcggagaacgcctggatcacctccgcgaggaccactgcgcgccagaagcatcccagggaggcgtcccgggtaggcgtcggagaacagacagcgggcccagcggagagcgcaaggaattagtggattgaggctgtaggtaacccaataagatcccaagtcttgggggcaagcgccccacttagaaggacggtacccggcgtcccctaccccattttcccggcggacgtagccaggtttgtcgccccacatcctccgcccgcatcctccccagaccagcagcccatgccttgactaccccaggccagcagcctatgccttgactaggacgattctcaccctttgcttgctcagcgctcaaggccgccggttgggtcgaggcggacgccatagggcgtctgaagctctaggttcagcggaggtaaatggaaaactcacgaataaagagccacgtcctacaaccgttcccaacgcccctgggagcggaaaggaaacagcatccggcgcagccggaagcgcccaggcgtggcccaaaccttcataccccaagcttacaactgcatcaagaccaccaaaactacccataatttttgcacagtgaaaacaatctatcattggcaacaaacatcataagaggggctttccggtaaaaagccagaaagcctactagacaaattctaaaagagctgtaacactgctgcgtatgtgtttggagagaagatgggatataaaggaactccacaattgatgagggtgagcttaggtgacttttttcttgttcctattactgtataaacaacgacgcatgtggtaactttcagtaggaaaaataatattctaaggaacttacttaagtcattcatttctagagttcgcgaacatttgttctcagcccatgcaaatgagttcggtgctgattggttgagaaagcagccagtcacagccccttcgttgttgttaagcccggagacctggattcggcagtaaaggcccagagcaaaagccgttgtcgcagtttcctaaaggccttgtctattgatgagcgatggagcctaatgcccggcccgatttcccttcccttccaggcttttatcacccactcccttctcaaactgtaggtggttaaggatgccaggtactaatcgcctggacctattaaaactagcccaccccacccccgcttcataaccggctttgttttttgtttttgagacggagtcttgctctgtcgccaagctggagtgcagctgggggggatcttggctcaccataacctccacctcccgggttcaagcgattctcctgcctcaacctcccaagtcgctgggacgacaggcgcgcgccaccatgcccagctaatgttttgtttttagtagagacagggttttgccatgttggccaagctggtctggaactcctgacctcgtgatccgcccgcctcggcctcccaaagtcctgggattaccagcgtgagccgtcgcgcctggcctcataaccgtttcttaaagtattccacggaaaggtttcaggactctgaagcccttgttccggaggactctggtggctcctagcagtgagacccgtctgaatagattcctagaactgaccacgtcagaggtgggcctgtcccaggcctctagtgtttggttggttggggtgtcttttgtttgtttgttttgagatagggccttgctctgtcacccaggctagagtgcagtggtgcgatcatgactcactgtagcctcgacccccaagtgatcctcccacctcagcctcctgagtagctgggaccacaagtgcaccacaacccccagctgattttgtcttaagatggggtttctctatgttgcccaagctggtttccaactcctgggctcaagcaatccacccgcgtctcacaggcataagccacagagcccagaccgaggcctccactggcgcgcagcggtcctgcccagccttggggcaggagggggcaccagcacccatggtaccgcctccagctgagtcaaggctctgggctcttcagggatcccctctccaattcttcccagcccccacaccccgttccttaagaaggtctggtctcttcccgcttccctgccaggccctggctgcagttctctctaagcaccgctgcactgagacccagcctcacccccatatcccgcaaagaatagtcacagccatgttcctggggagttgtgaggatgtttttgtttggttggttttggttgggatgtttttttaagagcgtcatatagatatttatatatataaattattagtgtggggaaggggcaaggggcatacattgcagagggggcgcgcacacagggatcggggaggggcaggggtggcacacgatgctacgcaaaacagccacatctaacagatgaaataatcacaccaacggggcaggggaggggcggcggccacaggggttgggcatgggggaggagaaaagcaggggggacaaggaagagagacctggtccaagattctgtgcgctttctgtccccatcctcgccacctccccacctctgcacaccacatcgggccttggccttctgtctgtccctccctcccccactctctgtccagctgcggaggccctgcaactgagcagcaccctcttggctctgggtggcaggccaagggcacggtggggggagggtgggggtgctccaaggtccaatgtaggagccatggtgctctcttgatcgcaggttctacagtggcttgtcgctttccttcttcaggtgactagggaaggggcagtgcatagcagagaggtaagagacttgagaccaactctgaccttgccccctcttaccgaaggggttgggagaggaggggttccctcccccaggagcacggtgcccagccgtaccatgcccacagctcctcccaggctcgctgagcccatgtcccctgggctggggcaccctagggtacctgtagtagtcctcctgggcaggcagcggcacactgtgcagcgggtgatgggc

SEQ ID NO: 915967 - DNA, 4001 bp, Homo sapiens
agcagagctgaatcagtcaacacctttggggaacaccaggatctcaccaaaaatttaaccaccaaccccccccaaacaaaaattagctgaaacaccctggagagactgcagccactgctgtcatgcagacatgtcactaaaaggtggcacaacagcatttaagtccagctctgctactcgagagtctgcaccattagagtttgcttcctcatcacaaaatggaataataatgtgattaacagtacaggttgaccatccttaattagaaaatccaaaatctgaaattatgagtgccagtgtgaggccgaaaatggaaaattccacacctgacttcatagtggggggtgggggagactgtagtcaaaacgcagtcaaaactttgtctcatgcacaaaattattcagactattatataaaattaccctcaggctatgtgcataaggtgcgtgtatatgaaacaaaacaatttcgtgttcagatttaggtcccatcccccaagatatccatgtatatgtaaatattccgaaatctgaaaaaacccgaaacacttccggtcccaaccatttcgggtaagggatacagaacctctactgtacaaaacgcaactcggacgcacaagctcagggtagaccctgggctctgagtgccaagaatgttagtcagattgtggctgccgccgtgtggcgagaaaggggacaaccgctcatgggcccacagatccggcgccctctcccgacccaactcccgccttcccgcgtctgacccgccttcccgcgtctgacccaccttccccgtcgcagctgaagccataggctttgataacctcctgctggatctgcgtggccacgggcagcacgaattgcagcatcttacccatgtcgttgcaggcgttatcccgagcctcgtccatgcgcactgcattctccggggcggagaacgcctggatcacctccgcgaggaccactgcgcgccagaagcatcccagggaggcgtcccgggtaggcgtcggagaacagacagcgggcccagcggagagcgcaaggaattagtggattgaggctgtaggtaacccaataagatcccaagtcttgggggcaagcgccccacttagaaggacggtacccggcgtcccctaccccattttcccggcggacgtagccaggtttgtcgccccacatcctccgcccgcatcctccccagaccagcagcccatgccttgactaccccaggccagcagcctatgccttgactaggacgattctcaccctttgcttgctcagcgctcaaggccgccggttgggtcgaggcggacgccatagggcgtctgaagctctaggttcagcggaggtaaatggaaaactcacgaataaagagccacgtcctacaaccgttcccaacgcccctgggagcggaaaggaaacagcatccggcgcagccggaagcgcccaggcgtggcccaaaccttcataccccaagcttacaactgcatcaagaccaccaaaactacccataatttttgcacagtgaaaacaatctatcattggcaacaaacatcataagaggggctttccggtaaaaagccagaaagcctactagacaaattctaaaagagctgtaacactgctgcgtatgtgtttggagagaagatgggatataaaggaactccacaattgatgagggtgagcttaggtgacttttttcttgttcctattactgtataaacaacgacgcatgtggtaactttcagtaggaaaaataatattctaaggaacttacttaagtcattcatttctagagttcgcgaacatttgttctcagcccatgcaaatgagttcggtgctgattggttgagaaagcagccagtcacagccccttcgttgttgttaagcccggagacctggattcggcagtaaaggcccagagcaaaagccgttgtcgcagtttcctaaaggccttgtctattgatgagcgatggagcctaatgcccggcccgatttcccttcccttccaggcttttatcacccactcccttctcaaactgtaggtggttaaggatgccaggtactaatcgcctggacctattaaaactagcccaccccacccccgcttcataaccggctttgttttttgtttttgagacggagtcttgctctgtcgccaagctggagtgcagctgggggggatcttggctcaccataacctccacctcccgggttcaagcgattctcctgcctcaacctcccaagtcgctgggacgacaggcgcgcgccaccatgcccagctaatgttttgtttttagtagagacagggttttgccatgttggccaagctggtctggaactcctgacctcgtgatccgcccgcctcggcctcccaaagtcctgggattaccagcgtgagccgtcgcgcctggcctcataaccgtttcttaaagtattccacggaaaggtttcaggactctgaagcccttgttccggaggactctggtggctcctagcagtgagacccgtctgaatagattcctagaactgaccacgtcagaggtgggcctgtcccaggcctctagtgtttggttggttggggtgtcttttgtttgtttgttttgagatagggccttgctctgtcacccaggctagagtgcagtggtgcgatcatgactcactgtagcctcgacccccaagtgatcctcccacctcagcctcctgagtagctgggaccacaagtgcaccacaacccccagctgattttgtcttaagatggggtttctctatgttgcccaagctggtttccaactcctgggctcaagcaatccacccgcgtctcacaggcataagccacagagcccagaccgaggcctccactggcgcgcagcggtcctgcccagccttggggcaggagggggcaccagcacccatggtaccgcctccagctgagtcaaggctctgggctcttcagggatcccctctccaattcttcccagcccccacaccccgttccttaagaaggtctggtctcttcccgcttccctgccaggccctggctgcagttctctctaagcaccgctgcactgagacccagcctcacccccatatcccgcaaagaatagtcacagccatgttcctggggagttgtgaggatgtttttgtttggttggttttggttgggatgtttttttaagagcgtcatatagatatttatatatataaattattagtgtggggaaggggcaaggggcatacattgcagagggggcgcgcacacagggatcggggaggggcaggggtggcacacgatgctacgcaaaacagccacatctaacagatgaaataatcacaccaacggggcaggggaggggcggcggccacaggggttgggcatgggggaggagaaaagcaggggggacaaggaagagagacctggtccaagattctgtgcgctttctgtccccatcctcgccacctccccacctctgcacaccacatcgggccttggccttctgtctgtccctccctcccccactctctgtccagctgcggaggccctgcaactgagcagcaccctcttggctctgggtggcaggccaagggcacggtggggggagggtgggggtgctccaaggtccaatgtaggagccatggtgctctcttgatcgcaggttctacagtggcttgtcgctttccttcttcaggtgactagggaaggggcagtgcatagcagagaggtaagagacttgagaccaactctgaccttgccccctcttaccgaaggggttgggagaggaggggttccctcccccaggagcacggtgcccagccgtaccatgcccacagctcctcccaggctcgctgagcccatgtcccctgggctggggcaccctagggtacctgtagtagtcctcctgggcaggcagcggcacactgtgcagcgggtgatgggcatgcagccactgctgctgttccagcgccaagcgctgcagctcagctgactgtgcgtgcatggcc

SEQ ID NO: 915968 - DNA, 4001 bp, Homo sapiens
atcctgggcttcgtaggacttgaccaagcgagcaaacttaaggacacctgcaagagggagtggaaggtcaacccttctcctaaggaccagcgtgcctaagacacctggagggggtggtagtctaagcatgaactgctcccccactggctgggcagctgtttgccaaacaggacgcatgcaggcctctgtcccgtgtggtttggatgatgacatttggtctacactgggcacaactagatgggatgcagtgaatgaaaatgtcccaaggcagtgtgcttcttgctctcaggtgaaccattttagcagtttagtcactggaaccccaagaatgaacacgagaccccaggtctgtagctggaactcaggaaggctatgaggcagcagagctgaatcagtcaacacctttggggaacaccaggatctcaccaaaaatttaaccaccaaccccccccaaacaaaaattagctgaaacaccctggagagactgcagccactgctgtcatgcagacatgtcactaaaaggtggcacaacagcatttaagtccagctctgctactcgagagtctgcaccattagagtttgcttcctcatcacaaaatggaataataatgtgattaacagtacaggttgaccatccttaattagaaaatccaaaatctgaaattatgagtgccagtgtgaggccgaaaatggaaaattccacacctgacttcatagtggggggtgggggagactgtagtcaaaacgcagtcaaaactttgtctcatgcacaaaattattcagactattatataaaattaccctcaggctatgtgcataaggtgcgtgtatatgaaacaaaacaatttcgtgttcagatttaggtcccatcccccaagatatccatgtatatgtaaatattccgaaatctgaaaaaacccgaaacacttccggtcccaaccatttcgggtaagggatacagaacctctactgtacaaaacgcaactcggacgcacaagctcagggtagaccctgggctctgagtgccaagaatgttagtcagattgtggctgccgccgtgtggcgagaaaggggacaaccgctcatgggcccacagatccggcgccctctcccgacccaactcccgccttcccgcgtctgacccgccttcccgcgtctgacccaccttccccgtcgcagctgaagccataggctttgataacctcctgctggatctgcgtggccacgggcagcacgaattgcagcatcttacccatgtcgttgcaggcgttatcccgagcctcgtccatgcgcactgcattctccggggcggagaacgcctggatcacctccgcgaggaccactgcgcgccagaagcatcccagggaggcgtcccgggtaggcgtcggagaacagacagcgggcccagcggagagcgcaaggaattagtggattgaggctgtaggtaacccaataagatcccaagtcttgggggcaagcgccccacttagaaggacggtacccggcgtcccctaccccattttcccggcggacgtagccaggtttgtcgccccacatcctccgcccgcatcctccccagaccagcagcccatgccttgactaccccaggccagcagcctatgccttgactaggacgattctcaccctttgcttgctcagcgctcaaggccgccggttgggtcgaggcggacgccatagggcgtctgaagctctaggttcagcggaggtaaatggaaaactcacgaataaagagccacgtcctacaaccgttcccaacgcccctgggagcggaaaggaaacagcatccggcgcagccggaagcgcccaggcgtggcccaaaccttcataccccaagcttacaactgcatcaagaccaccaaaactacccataatttttgcacagtgaaaacaatctatcattggcaacaaacatcataagaggggctttccggtaaaaagccagaaagcctactagacaaattctaaaagagctgtaacactgctgcgtatgtgtttggagagaagatgggatataaaggaactccacaattgatgagggtgagcttaggtgacttttttcttgttcctattactgtataaacaacgacgcatgtggtaactttcagtaggaaaaataatattctaaggaacttacttaagtcattcatttctagagttcgcgaacatttgttctcagcccatgcaaatgagttcggtgctgattggttgagaaagcagccagtcacagccccttcgttgttgttaagcccggagacctggattcggcagtaaaggcccagagcaaaagccgttgtcgcagtttcctaaaggccttgtctattgatgagcgatggagcctaatgcccggcccgatttcccttcccttccaggcttttatcacccactcccttctcaaactgtaggtggttaaggatgccaggtactaatcgcctggacctattaaaactagcccaccccacccccgcttcataaccggctttgttttttgtttttgagacggagtcttgctctgtcgccaagctggagtgcagctgggggggatcttggctcaccataacctccacctcccgggttcaagcgattctcctgcctcaacctcccaagtcgctgggacgacaggcgcgcgccaccatgcccagctaatgttttgtttttagtagagacagggttttgccatgttggccaagctggtctggaactcctgacctcgtgatccgcccgcctcggcctcccaaagtcctgggattaccagcgtgagccgtcgcgcctggcctcataaccgtttcttaaagtattccacggaaaggtttcaggactctgaagcccttgttccggaggactctggtggctcctagcagtgagacccgtctgaatagattcctagaactgaccacgtcagaggtgggcctgtcccaggcctctagtgtttggttggttggggtgtcttttgtttgtttgttttgagatagggccttgctctgtcacccaggctagagtgcagtggtgcgatcatgactcactgtagcctcgacccccaagtgatcctcccacctcagcctcctgagtagctgggaccacaagtgcaccacaacccccagctgattttgtcttaagatggggtttctctatgttgcccaagctggtttccaactcctgggctcaagcaatccacccgcgtctcacaggcataagccacagagcccagaccgaggcctccactggcgcgcagcggtcctgcccagccttggggcaggagggggcaccagcacccatggtaccgcctccagctgagtcaaggctctgggctcttcagggatcccctctccaattcttcccagcccccacaccccgttccttaagaaggtctggtctcttcccgcttccctgccaggccctggctgcagttctctctaagcaccgctgcactgagacccagcctcacccccatatcccgcaaagaatagtcacagccatgttcctggggagttgtgaggatgtttttgtttggttggttttggttgggatgtttttttaagagcgtcatatagatatttatatatataaattattagtgtggggaaggggcaaggggcatacattgcagagggggcgcgcacacagggatcggggaggggcaggggtggcacacgatgctacgcaaaacagccacatctaacagatgaaataatcacaccaacggggcaggggaggggcggcggccacaggggttgggcatgggggaggagaaaagcaggggggacaaggaagagagacctggtccaagattctgtgcgctttctgtccccatcctcgccacctccccacctctgcacaccacatcgggccttggccttctgtctgtccctccctcccccactctctgtccagctgcggaggccctgcaactgagcagcaccctcttggctctgggtggcaggccaagggcacggtggggggagggtgggggtgctccaaggtcc

SEQ ID NO: 915969 - DNA, 4001 bp, Homo sapiens
acacaaactctaggccttcgaatgagacagaaatactaccatatttttgaccatcagagtaaatctggttttctgtaaactagaagagactgaaaaatggtttgtaacaatgtgcttcaattaggacaggaagctgatctgtaaacgtctactgattacacaatgtaaaccggatggatttgaaaatggtaaaaatcaaaactaaaaacatcaaggtcctgtttcagtcactgcaatcaaccctgaccaactgtgataattaaatatcgctcaagtgaatgttcaaacactgaaacatttagaagacaagaaagcaaaacacagctacacatattgcatttaggatgcagaatagaaggtcactactcaaagcatttgtcatttaaaagaaagtcataatttattataagctttcagaaaaaagaatataatttcattttcaacactagcaaaaaggaggcagctgcctttgctacatgacgcattaggtgggccatttcactaattacctgattttagaaaacgccaaaggctatggaagcctattaatggttccgctgaatctctgcagatgtgtttgttttctaaatcctttgccaaccaataattcccatgaggactcttttagtctatactgacaaaattattaatatgctgttgatgccagactgtgtttgttatagttgattctcccatccaagtacaagaaatgtattgaaataaaaactgctcagcatatcttaaaaatagtagctacatataaaattttagctacatgaaagactttaatatttccaacatacactgttttctctttctcttcttgcattgtttttcaaaacgagttgcaaaactatgatcactaatgtgttaggaaagaaaaaaaactagttgcaaaacattacaacttagctcaccttcgcagttcaagattattttcttttttatgtactacctggtttatcagctttaacctacaatatctcgtcattgctttctgacactcaaattcagtctaaaatcaaatcaagaatttcctaacacaaaggtaagtttaggtataggaccgatcttataccttcaagggcagtttaaagattctgctaaaaattagtatgtatctccatcaatattttgaaatatttataactggtggtaagaatagccttcctacatgggatagtcaggttaagattagaaataaccaagcgtatcctctaagatagttttttaaatgtttaaacttacctttaagggaaataagtgggggctgactcacggaaagaggggatagaaggtagggaaagggcgaaggctagagttaagtgaagaatcccgtacgtagagtgacatcatagaggacttttggctggtgaaaagaccagtcgggaatatagccaatatatatcaaccttgccactcatataacttaaaaccgactgcatatgtatccccgtatttcttcttcaaaacactactaacaaataataaatcaccgcccatataagcaatctgcgactctaatacgggtgctaatttatttgttcaggtggtctacaaacgttctgttctgcctgtctattaaatttccacacgtactaggcgctcacatgggataacctgatgcttacaaagcggattaaactcagtggcaaatgttatctgggtattcgtttacacacggagacacccctaaaggatcgcacctgcttgggtcataagaaacagaaaaatgcaaaaactaaggtaattccaaaagacagaaaacgcagaacgcttctttatctgcagaatgtaccgttctcggacggctcaacgtaccaggctcccagcaactaagtcaagatgcctccaactcgagagacaggaccgtcagccactcagttagcagctatcttcttctaattcctattgtactagatgagcgcaatgaggcgggctcttagccgacaaccaaccaattgagtattgtatggaaccggaagagactctggtcctggaattcttgggtattctctatggttccagggtcaagcggcgctaagagaaggcgggacagaggaatgggaaatgacgtgaggagtgcggaggggcgcgaggtttcaagatggcggtagctgaggggttgaccgagagacccagttgaaggcctttacgaagtgaaagaggccgggagtcgccccctacccgcttctcgtagtcctgggagcacagcagaagtgtgagtgtattgaattgatttactactcttcctcacctctttcgtcccttccacgtcccgcgcagcggcttgggggacacccagcccctttgccccgctcctcctctccctggttgaggtctccctgttgcggactgggctattcctgggcctggggtggcgcggcgaccagtggttgcgcggttggcatcgcccgggtcggttggggccgcttcttacgcacgttgattagtagccttaggtttgacgtcttgtacctcgagtcatggtcggtcagccgtcgctatggtttcgtcagttgctggtgttgcctcctttggtgaacctggaccctatcccattgaagcttctttggctgtttagagttatccaacgcttatttggcttgattttccagtcgcctccgcttgtagacaaaaaactaatctgcagacttaagctccagtgtcttccgtaaaattctctgtaattcgtatccgttgtgtttcatttgtgggggaggagattcagaacatgagcctgaggaaacttgagaaaggaaagcacaaaaaacgcaggcaatcaaagatgggagagcttgtatatgtactgattttgcttgttttcctccttccctacctcctactccctgctgctctcccacccccctaacccccccatccccagtttttcttagaaggaaaccacttgacagggtgtatggtagctaggccaggaatatggatccattataaagattttagttaagtagtgagtcaaacatcacaggatattttatttgtaatctcattgtatcatcagagctttgttataaagtaattgatgtccccattttttagatgaggaagctaaaaatcagagcctttgataccgctgtcttgaagtaattgccaccagaacagctgtgaaacatctggctttctgaaacatctggctttcggggcagttggacacttggtgaaagagacattaactgtaataaactgggctgacaaaatcttccctttcttacctttaaaaagtgtctacttgcaaaaggaagcaaatttgtccgcctttattactggaaagactgcgcttcaaaaaattaagccccattattttggaataagaggaagaagtcatgtaatagggtactgtgttaataaaagttttagcttacaaaatattttttcctcaaacaaaaataagtattccctttaattaccttaagaaatatatattgggagtcaggtcttagtaagaaaaatatgtgtcttaatatttaagttttggggagctctcagtatagcactaatttcaaatatttgcatttttagttgtgttttgaactcttgagagtcaagcattatatctgaactagaactgaatctgaattaaatatgcttaaattaatgagtttttagtgtcttagaagtattgagaatgtacagcatacatgccaagaaaaaccatggagagaggcaaaggtgaggtatgtgttttgagcctagatccattacccccattcccttcttattcttcttttacaattacatgttaataaagggaggttatagaagaaggactaatgaattctgatgttcatggtttgtgccatatcgttaaagcattttctagttgtttttatcagttgacaaagtcagtgctgtgatccataagaaaaaagctaaactgatgacttgaggatattcaaagtggtcttcacactcatcacatttctgaagaatgatagagatctaaattttcatggtcaagaaaggtgatgccatctttcttg

SEQ ID NO: 915970 - DNA, 4001 bp, Homo sapiens
gagaagggggaaagagtagaacaagaagtttgatctgtgactgtgaacaattaattaagataactcactaccaggccgagcgcggtggctcacgcctgtaatcccagcaccgtgggaggccgaggcaggtggatcatgaggtcaggagatcgagaccaacctggctaacacggtgaaaccccatctctactaaaaatacaaaaaaaaaaaaaattagctgggcctggtggcaggcacctgtagtctcagctactagggaggctaaggcaggagaatggcgtgaacctggggggcggagcttgcagtgagctgagctctgtcacacacacacacacaaaactcactacgtttggaccagcctgactttctgtatttgacgactcctctcattttttcttttgtcccaaaaaggccttcctgccaaggattgcgagctctgtggccaacagacctgcgttcaatgtctcaatgccacaatttacttactgggtaactttggctctaattcctcatctgtagaatggagatactactacctagagtgcgaacaaaatcatacatgttgccataaatgtaaagtacttagtggtcactaaatgggagcatgtcagatctctcaactacaaggctgaggaactttggaatgacacaccacatacactgttgtcttatgacacaaacccagtctgggaactgattatttcatcggcctttgttttagagcttagggtgaaaaggcatctacaacagtggcttgtaaattattttacttggtatggtccaatttaagaagtacttgataagccatgacattactgaaaacatgttatttggtgggatcataattctggtctgtgaaatcaggtactaaggagatcactgtgatgccaaaaatatagcctgacttcccagcaggttcacactgaaagataaaaccatcttcaatgaagtaagtcctggtttaaacataaaatatcttttggaattatgtaatataatttaaaaaatcatgaaagataggataacatcaaatttaccctttgaaaattgccaggcgtggtggctcatgcctgtaatcccagcactttgggtggccgaggcaggaggatgacctgaggtcaggaattcgagaccagcctggccaatatggcaaaaccccgtctctactaaaaatacaaaaaattagccggatgtggtggcgggcaccggtattcccggctactcgggaggctgaagcagaagaatcacttgaacccgggaggcagaggttaaagtgagccgagatcgcgccactgccctccagcctgggtgacagagagagaccttgtcccccctacccccctcccccacaaaaataaaaaaagtaaaaaaaaattggtaggtatacttaggaagctccaatgagatgtaacgcctcctggcagatctgttattccaagggcagatccatttcctgggttgtggaggcctaagtgatagtgccagggaagtccctttactgtgagccagaactcctggaggtaaatcgagtagctggaaagaccttaaaggttaactatgctgaagaatgtggcctgcacagtgcgcatgaaatgggctggggtcccacggggaggagagcgagttccctttggtccttcaaaagtagggctgggtggcttgcgcctgtgatcccagcactttgggaggccgaggaaggaggatcgcttgaggccaggagttcgagatcagcttgggcaacacagtgagacccccccaccccacgtctattaaaaaaaaaacgagtatctccgcaaaagcctagcaagggcagtgctgacctctactacgtgccaggcctgaaacagcacctgatgcgtgctcacagctccattccgctcagttttgtacatgaggatccttccgtttcgccttgggcctccgtggaaccgttatctccaggacggtagtctctcctctcccctgccctgagtgcctgaacagccccagggccgacccacagcacctagcgtaaaccaggtcccgagaaaactgagctcgggtgtcacggccggccccaccccaccgccagcgcggcctcaggtaaactggctgcgccactcggggtcgcaagtcgggaaaaacccaggcgtcccggctcgcagtcctctctccggagcctttgacagtcgtcggcagccgtagggttacctggcttctccgcagatgcttacctggtctcaggacccgactcgtgccctcaacgttctagggatatccaaatcacctcagcggaggattcgcaatcgcgatccctgatctgcgcacgcgccgtactccgatcgcggtttctcttatctaccagaggctcatgtttactcactgcgcatgcgagaaactgaagcttctttccctcgtggcagcggctggctcccagagagccaatcagagaagagagtttcacagcaatcccgcccccttgtcactcccccggggttggatgtctctctttggttggagctgcgcgagggggaacggcgaggtggacgcgcgcgccatgcgaggctgtctccgcctccttccgggcagccaatcactggagagacgccgggcgcgcgcgcgctccctcgggtaacggtcgcgagaggccgcttgcatgaccctgacatcggcagcgggagcggcggccaggtaagcggccaccagcctgcagggagctgtaggccgctggggacaggagacgagacttaggagacactgtcttagcggccccttgagtgtggtgatgggctggggtgtggggtgacggctgccgattggcctgaccccctcggagcccttcggcgtgtgggagctctgcccggccgcggtgcgccttttctagactcggcgcccttgagtgacactcgcgcggcccaatcgcagatcgctcttcctgaggggcggggggtttgtggggtttttttaatttttccccccattttttgccaaggtgccccggtttccttttggaatcgcggttgtagttgcaggagcggtggcttttctccgtcctccctgctttccgtagcttaggcgactgcatagattctccctctccttcccactttgacccgatagccgccaccagccattgcgggctgactgtgagctcagaatgtcgggatctggcctcatccccatctgaaatctcttcctctcccccaagcctcccgtcaaggcggagcgcccagttaactttcatgtttcataaccatcaatcgttccttttccccagctccctttttttgctagggggtagggacaccaaaagcgtcatatcttgttgctgggaaatataaaagctctgctcttatattcattctgtatcaagttaaaaaaatttttttttgcattgtatttgtgggtgtttaaggatttttccctcttacttccctgccctccccccagcacctccaccccaaatggagaagcatctttgaatttctagtggttttccatctggatctgcatccggatccggattaccttagcaggggaaataatagatggggttgcaggttcatctccctggagagcttgtgttttcctggtgtaatagcatggtgattggaatccaggtatttctgttgccagttggaaggggcagtccttgactgtttcaatgccccatttgtcgtgggtgatgggctgagccactggggaaaagtccatttagttaggtccggttaccctttgcattcactcctgtccctgaaggaaatggtccctgtttttgtgtaatgctttataaaagcaggccctagaaagtgggaatctagcagaagcggaatactagataatattcctgttgcactctctaagcttttcagtttgtaagcagctgaagttttctttctttctcctttttcctcttgctcccttgctcttttataagtgcatgaattccccaggaaggaggcatcttgtttgacctgttacagccaatttgccatggtatatatccagcttcactgaaattt

SEQ ID NO: 915971 - DNA, 4001 bp, Homo sapiens
aaggcaggagaatggcgtgaacctggggggcggagcttgcagtgagctgagctctgtcacacacacacacacaaaactcactacgtttggaccagcctgactttctgtatttgacgactcctctcattttttcttttgtcccaaaaaggccttcctgccaaggattgcgagctctgtggccaacagacctgcgttcaatgtctcaatgccacaatttacttactgggtaactttggctctaattcctcatctgtagaatggagatactactacctagagtgcgaacaaaatcatacatgttgccataaatgtaaagtacttagtggtcactaaatgggagcatgtcagatctctcaactacaaggctgaggaactttggaatgacacaccacatacactgttgtcttatgacacaaacccagtctgggaactgattatttcatcggcctttgttttagagcttagggtgaaaaggcatctacaacagtggcttgtaaattattttacttggtatggtccaatttaagaagtacttgataagccatgacattactgaaaacatgttatttggtgggatcataattctggtctgtgaaatcaggtactaaggagatcactgtgatgccaaaaatatagcctgacttcccagcaggttcacactgaaagataaaaccatcttcaatgaagtaagtcctggtttaaacataaaatatcttttggaattatgtaatataatttaaaaaatcatgaaagataggataacatcaaatttaccctttgaaaattgccaggcgtggtggctcatgcctgtaatcccagcactttgggtggccgaggcaggaggatgacctgaggtcaggaattcgagaccagcctggccaatatggcaaaaccccgtctctactaaaaatacaaaaaattagccggatgtggtggcgggcaccggtattcccggctactcgggaggctgaagcagaagaatcacttgaacccgggaggcagaggttaaagtgagccgagatcgcgccactgccctccagcctgggtgacagagagagaccttgtcccccctacccccctcccccacaaaaataaaaaaagtaaaaaaaaattggtaggtatacttaggaagctccaatgagatgtaacgcctcctggcagatctgttattccaagggcagatccatttcctgggttgtggaggcctaagtgatagtgccagggaagtccctttactgtgagccagaactcctggaggtaaatcgagtagctggaaagaccttaaaggttaactatgctgaagaatgtggcctgcacagtgcgcatgaaatgggctggggtcccacggggaggagagcgagttccctttggtccttcaaaagtagggctgggtggcttgcgcctgtgatcccagcactttgggaggccgaggaaggaggatcgcttgaggccaggagttcgagatcagcttgggcaacacagtgagacccccccaccccacgtctattaaaaaaaaaacgagtatctccgcaaaagcctagcaagggcagtgctgacctctactacgtgccaggcctgaaacagcacctgatgcgtgctcacagctccattccgctcagttttgtacatgaggatccttccgtttcgccttgggcctccgtggaaccgttatctccaggacggtagtctctcctctcccctgccctgagtgcctgaacagccccagggccgacccacagcacctagcgtaaaccaggtcccgagaaaactgagctcgggtgtcacggccggccccaccccaccgccagcgcggcctcaggtaaactggctgcgccactcggggtcgcaagtcgggaaaaacccaggcgtcccggctcgcagtcctctctccggagcctttgacagtcgtcggcagccgtagggttacctggcttctccgcagatgcttacctggtctcaggacccgactcgtgccctcaacgttctagggatatccaaatcacctcagcggaggattcgcaatcgcgatccctgatctgcgcacgcgccgtactccgatcgcggtttctcttatctaccagaggctcatgtttactcactgcgcatgcgagaaactgaagcttctttccctcgtggcagcggctggctcccagagagccaatcagagaagagagtttcacagcaatcccgcccccttgtcactcccccggggttggatgtctctctttggttggagctgcgcgagggggaacggcgaggtggacgcgcgcgccatgcgaggctgtctccgcctccttccgggcagccaatcactggagagacgccgggcgcgcgcgcgctccctcgggtaacggtcgcgagaggccgcttgcatgaccctgacatcggcagcgggagcggcggccaggtaagcggccaccagcctgcagggagctgtaggccgctggggacaggagacgagacttaggagacactgtcttagcggccccttgagtgtggtgatgggctggggtgtggggtgacggctgccgattggcctgaccccctcggagcccttcggcgtgtgggagctctgcccggccgcggtgcgccttttctagactcggcgcccttgagtgacactcgcgcggcccaatcgcagatcgctcttcctgaggggcggggggtttgtggggtttttttaatttttccccccattttttgccaaggtgccccggtttccttttggaatcgcggttgtagttgcaggagcggtggcttttctccgtcctccctgctttccgtagcttaggcgactgcatagattctccctctccttcccactttgacccgatagccgccaccagccattgcgggctgactgtgagctcagaatgtcgggatctggcctcatccccatctgaaatctcttcctctcccccaagcctcccgtcaaggcggagcgcccagttaactttcatgtttcataaccatcaatcgttccttttccccagctccctttttttgctagggggtagggacaccaaaagcgtcatatcttgttgctgggaaatataaaagctctgctcttatattcattctgtatcaagttaaaaaaatttttttttgcattgtatttgtgggtgtttaaggatttttccctcttacttccctgccctccccccagcacctccaccccaaatggagaagcatctttgaatttctagtggttttccatctggatctgcatccggatccggattaccttagcaggggaaataatagatggggttgcaggttcatctccctggagagcttgtgttttcctggtgtaatagcatggtgattggaatccaggtatttctgttgccagttggaaggggcagtccttgactgtttcaatgccccatttgtcgtgggtgatgggctgagccactggggaaaagtccatttagttaggtccggttaccctttgcattcactcctgtccctgaaggaaatggtccctgtttttgtgtaatgctttataaaagcaggccctagaaagtgggaatctagcagaagcggaatactagataatattcctgttgcactctctaagcttttcagtttgtaagcagctgaagttttctttctttctcctttttcctcttgctcccttgctcttttataagtgcatgaattccccaggaaggaggcatcttgtttgacctgttacagccaatttgccatggtatatatccagcttcactgaaattttagttggcctggcaaataatttttttatttttatttttattttttaagagatggggtcttggtctgttgcccaagctggagtgcagtggcaggatcatagctcactgcagtcttgaactcctgggctgaagtgatcctcccacctcagcctccagagtagctgggacatgctcccagtagctgcaggcaggctccagtgtgcccagtggtttattttctaagaatagctgcacagagacaaaagaccatatatatagttcaaa

SEQ ID NO: 915972 - DNA, 4001 bp, Homo sapiens
agacctgcgttcaatgtctcaatgccacaatttacttactgggtaactttggctctaattcctcatctgtagaatggagatactactacctagagtgcgaacaaaatcatacatgttgccataaatgtaaagtacttagtggtcactaaatgggagcatgtcagatctctcaactacaaggctgaggaactttggaatgacacaccacatacactgttgtcttatgacacaaacccagtctgggaactgattatttcatcggcctttgttttagagcttagggtgaaaaggcatctacaacagtggcttgtaaattattttacttggtatggtccaatttaagaagtacttgataagccatgacattactgaaaacatgttatttggtgggatcataattctggtctgtgaaatcaggtactaaggagatcactgtgatgccaaaaatatagcctgacttcccagcaggttcacactgaaagataaaaccatcttcaatgaagtaagtcctggtttaaacataaaatatcttttggaattatgtaatataatttaaaaaatcatgaaagataggataacatcaaatttaccctttgaaaattgccaggcgtggtggctcatgcctgtaatcccagcactttgggtggccgaggcaggaggatgacctgaggtcaggaattcgagaccagcctggccaatatggcaaaaccccgtctctactaaaaatacaaaaaattagccggatgtggtggcgggcaccggtattcccggctactcgggaggctgaagcagaagaatcacttgaacccgggaggcagaggttaaagtgagccgagatcgcgccactgccctccagcctgggtgacagagagagaccttgtcccccctacccccctcccccacaaaaataaaaaaagtaaaaaaaaattggtaggtatacttaggaagctccaatgagatgtaacgcctcctggcagatctgttattccaagggcagatccatttcctgggttgtggaggcctaagtgatagtgccagggaagtccctttactgtgagccagaactcctggaggtaaatcgagtagctggaaagaccttaaaggttaactatgctgaagaatgtggcctgcacagtgcgcatgaaatgggctggggtcccacggggaggagagcgagttccctttggtccttcaaaagtagggctgggtggcttgcgcctgtgatcccagcactttgggaggccgaggaaggaggatcgcttgaggccaggagttcgagatcagcttgggcaacacagtgagacccccccaccccacgtctattaaaaaaaaaacgagtatctccgcaaaagcctagcaagggcagtgctgacctctactacgtgccaggcctgaaacagcacctgatgcgtgctcacagctccattccgctcagttttgtacatgaggatccttccgtttcgccttgggcctccgtggaaccgttatctccaggacggtagtctctcctctcccctgccctgagtgcctgaacagccccagggccgacccacagcacctagcgtaaaccaggtcccgagaaaactgagctcgggtgtcacggccggccccaccccaccgccagcgcggcctcaggtaaactggctgcgccactcggggtcgcaagtcgggaaaaacccaggcgtcccggctcgcagtcctctctccggagcctttgacagtcgtcggcagccgtagggttacctggcttctccgcagatgcttacctggtctcaggacccgactcgtgccctcaacgttctagggatatccaaatcacctcagcggaggattcgcaatcgcgatccctgatctgcgcacgcgccgtactccgatcgcggtttctcttatctaccagaggctcatgtttactcactgcgcatgcgagaaactgaagcttctttccctcgtggcagcggctggctcccagagagccaatcagagaagagagtttcacagcaatcccgcccccttgtcactcccccggggttggatgtctctctttggttggagctgcgcgagggggaacggcgaggtggacgcgcgcgccatgcgaggctgtctccgcctccttccgggcagccaatcactggagagacgccgggcgcgcgcgcgctccctcgggtaacggtcgcgagaggccgcttgcatgaccctgacatcggcagcgggagcggcggccaggtaagcggccaccagcctgcagggagctgtaggccgctggggacaggagacgagacttaggagacactgtcttagcggccccttgagtgtggtgatgggctggggtgtggggtgacggctgccgattggcctgaccccctcggagcccttcggcgtgtgggagctctgcccggccgcggtgcgccttttctagactcggcgcccttgagtgacactcgcgcggcccaatcgcagatcgctcttcctgaggggcggggggtttgtggggtttttttaatttttccccccattttttgccaaggtgccccggtttccttttggaatcgcggttgtagttgcaggagcggtggcttttctccgtcctccctgctttccgtagcttaggcgactgcatagattctccctctccttcccactttgacccgatagccgccaccagccattgcgggctgactgtgagctcagaatgtcgggatctggcctcatccccatctgaaatctcttcctctcccccaagcctcccgtcaaggcggagcgcccagttaactttcatgtttcataaccatcaatcgttccttttccccagctccctttttttgctagggggtagggacaccaaaagcgtcatatcttgttgctgggaaatataaaagctctgctcttatattcattctgtatcaagttaaaaaaatttttttttgcattgtatttgtgggtgtttaaggatttttccctcttacttccctgccctccccccagcacctccaccccaaatggagaagcatctttgaatttctagtggttttccatctggatctgcatccggatccggattaccttagcaggggaaataatagatggggttgcaggttcatctccctggagagcttgtgttttcctggtgtaatagcatggtgattggaatccaggtatttctgttgccagttggaaggggcagtccttgactgtttcaatgccccatttgtcgtgggtgatgggctgagccactggggaaaagtccatttagttaggtccggttaccctttgcattcactcctgtccctgaaggaaatggtccctgtttttgtgtaatgctttataaaagcaggccctagaaagtgggaatctagcagaagcggaatactagataatattcctgttgcactctctaagcttttcagtttgtaagcagctgaagttttctttctttctcctttttcctcttgctcccttgctcttttataagtgcatgaattccccaggaaggaggcatcttgtttgacctgttacagccaatttgccatggtatatatccagcttcactgaaattttagttggcctggcaaataatttttttatttttatttttattttttaagagatggggtcttggtctgttgcccaagctggagtgcagtggcaggatcatagctcactgcagtcttgaactcctgggctgaagtgatcctcccacctcagcctccagagtagctgggacatgctcccagtagctgcaggcaggctccagtgtgcccagtggtttattttctaagaatagctgcacagagacaaaagaccatatatatagttcaaaatgtacttccagacaatggggaagctatggttgttaacagtttaattggctctttttaatacaaattaaatattaagtagttcagttcttcttgtctctgtataagtcaacaaacatatatacttggtagaatttattaaacaaatgaacaaggcatgcaagtattccaattgttacataatag

SEQ ID NO: 915973 - DNA, 4001 bp, Homo sapiens
gtcagagacagtgaagatcttatacacacattcttacacacagggcagccagttctgtttacgtaaaaacctggctcattcaacttaaaactagagtagcagatttttttaaatggagtcaataaatagactttagaaaattcaactgaacccactcaggttatacgcaaaattatatgtacatatatatttttctggagagtaagtacacagctttcatcaaatttccatggataagttaataaaaaaaaaaagcaaagaatcatggcacttgaatcagtcaccattctttgaggtgggggagtctaaaaacaactgaaactgcctaaatattacctaccttcagtattacagctagaatccaccccattttcacatatataaaaaacatatatctgtatatattatacataaattataattttcatacacatttttaataagttatatgaatgcaaactcaatctgagagtacaagggcagatattttggtttcgactctatcatctacccaacataactgcatatataatttgctaatctatagaaaggggaataataacaccatagcagcaactgcaaatttgtgagaaatgccattgtaaaaaggggaggaaaaaaataaggtgaaactatctgaccagtttttgctaataaattagcatactaaataagtatgtataaatcaacatacttgctacagcaattacgaactcaggaagccctgtctcttgagtgtttactgaaagctcaataagatgtacatggtcaccttcaggcaatataaggaaagtagggggctggttagggaacgggggggggtggatcaaaatgaaatctacaccaattttacatttctattctctgtattttatatacgtgtccttcattcacatcagacctcacgcttctgaaaattgaagagtctaaaacaggtcaaagtactgactctgaaacccctaggattcaaatatatttatttgtcataattaagcagtaatattattttgtatgcatattccatgccttttacatctattatttccttctcatctacttatacttattgcttctactagtaaaaatcagttgaatcagctcttgaatcttatttcagaggcaagatgtacatgaagtgctaagagtgtttaccattttccccttaagtctcttcttgctagtgttaggcatatttcttgcctttcctgcccaatattcatttattactttagtcattaaatatgtattgggggactatgaagacggggtaggactctaaatgtgactctcgggccttaaccttaagaggccacacaacagtgttcagtaatagaactaggttgttttgcaaagttttgctcttctggctgcagcgtcactaattaaaacaatgaagacatagtttggttaacttctcatttatggcatcaatccatgcacgaggcaaaagggcaaacccttcggtttgggtcacagccctgcaaagagcatctacccagttcgccaatctatcagcagcgcaggccggtgggcggggcttgtggaagcccagggaaggaaaggaacggtgggaggagatctgggaatgccgagtcgagcctgcgactagaagtgacacagagacgggaaacccaagccactgccgactggggaatataccccctttacttcctcctcaaggggctcggggggcggggcggaggtacctagtttctgccccaggtaggtgaggctgtgatagaccttctcggccgcggccaggtgcgccaaggccgccagcagcgacagccagctgccccccgcgctcttgttggcctctcgttccttctccacattgtccttagccttgtcgtaagagaagatacccaggtgagagaagaacgtctccagcaccgcctgttccaccgggaccggggcggccagcgggatagactcccccatgcgagctgcgccccagctcgacccacgtggctctcctcggcctcgcacttccgggttctgagggaacgggcttgcgcacaagcgtgcgtgcgcgtgaccgcctccaccggcggactcgtgagcgcgccgctgccgggaccgctcctgggccttagagaagacgcggataagggccaaggaaagagggaggtagcggttgctgagctccttcggcgcttcggctcctgtagctctgactattcggaccgtcaaggtagaataggaggcggccagttccccgctctaagaagttgcctgcgctctgaggtgagctgacaggcccctctctgtgtggttcgtcagcgctggtgacgtcatgcaaacgtgacgtcagccctggccagaacatctggcctgggctctccaggcacctcgctgggccggctgggagatggggaagtgcctggagttgtgcccacactcacagcagggaccctagtcagccctgacaccttctacaccaactcatggaagtgatttgctgagattagaagactgacgggtaaaggttgatctccttcccattgcctagttttcatcacatcacacaccaccggttaactctcacctgtatcccgttctagttctcccgggtctgtgttagccctgcaactaataagtagagcccctggcccaaactgcattaaccttccttaaaaagttatcttttttttttctttttttttgagacggagtctcgctctgtcgcccagactggagtgcagtggtgagatctcggcccactgcagcctccacctcccgagttcaaacgattttcctgcctcaacctccctagtagctgggattacaggccagcgccaccacacctggctaattttcgtatttttaatagaaacagggtttcaccatgttagccaggctggtctcaaactcctggctcaagcaatcttcccacctcagcctcccaaagttttgggattacaggtgtgagccaccacccctggccagaatgaagaatacattaatgtaaattgtgcacgttgtcatttagaataattacaagttcctttggcatttaagaaaccccatgaacccggctcatacttgtatgtccactactttgaaacactacccactactcaatagttttttcctttcttctttgtgcatacttattttatgcttcttagtcacactatttaatcgcatatatttacatatctctttccccaagtggtgagatccctagggtacagtagggttcacttacagttataatcttttcatattggacggcgcagccatgtttgttgaacaaatgagagaattgcctattttcgttttttctcaaactagagctgttctgccatcatcactaccttttaaaggaaatcccactaatctaattttaatgaataggtattgtgcacctgttccctatactcaagaatgtaattggataagatcaaccctgttaacaatgatacaaggcagttttttttttttttggttgttttattttgttttgtttttggacagggtctcactctttcccccaggctggagttttccccaggctggagtgcagtggcatgacctcggctcaccgcaacctccgctttccaggctttagtgattctcctgcctcagcctctggagtagctgggattacaggccagtgccaccacacctggctaattttcgtatttttaacagaattggggtttacaccatgttggccaggctggtcttaaaatcctgacttcaaatggtctgcccgcctcggactcccaaagtgctgggattacaggcatgagccactgcgcccagcttcaaggaagattttttttttttttttttttttgagacagagttttggtcttgttgcccaggctggagtgcagtggagccatctcagctcactgcaacctccacctgccggattcaagtgattttcctgcctaaggccagcctccagagtagctaggattacaggcatgtgccaccacgccctgctaattttgtatttttagcagagacggggtttctgcatgttggtc

SEQ ID NO: 915974 - DNA, 4001 bp, Homo sapiens
aaataggtaaactagggtaaaatacagtaagaatgggtgagaggagagaaaaagaatacttcagtttaggaagcataatactacttaaaatttcctgagaataaatttgtcttctagacaacacatatactttcttttctttttttaaatttttctttaatttttatttatttatttatttatttatttatttatttatttgagatagagttttgctcttttgcctaggctggagtgaagtggtgtgatctcagctcactgcaacttctgcccccaggttcaagcgattctcctgcctcagcctcctgggtagctgggattataggcgccccccaccacaccaagctaatttttgtatttttagtagagatggggttttgccatgttggcctggctggtctcaaactcctgatctcaggtgatccacctgcctgccgcagcctcccaaagcgctgggattacaggtgtgagccactgcgcctggcccacatatgcttgaaatgtgagtcaagatggtgtgctgggagaggaagatgtggggtaacaagagcatttattttgtttattgaggaaaaaacaaactgatggggattattaatggaatccttattatggattattttaaactttccaaaaagtttaaaaatctgtctatatgggatgtcctaattcaagggtttcttgaggttgaattctcttgcctctgtgaaagagtcttttcgttggtgctgaccgatggggacttttggtggcattcacagggtgatccctcctcagcagagaggggaggatacgctgcctcagccagctgaaggcccacccaaagttcaggcagcactgggcctgtgtgtgtgaaggagtgtcatccttctctggctgctctgacaggattgaggagatctctggagcgcttgtcctttggctggcggttgcctggcttatcatctgccatgaaaatgaaggatgtgttaggtaggaataaccatgacaacagccaaatcaacgtttactcatttgtggaactcacatccttttaccaaaaatagcccaagtgtcaatgcagagtttcaatgctcatcaatactaaacatatacgtttttggtggggagggagatatagttagcccttctccttgcttgctaccctcttgtttccctcagcattcccagtcttttccctacagcttcaccctgactcctttccttgttgtctcccactggtatcacgtcagtccccctgggacctgcctcctcctagtggtcataagattctgtggttcaacccaggcctatcccttcctgtcctgtgaggcatctctgctctcctcagccagctcatgtcccttaagccttagaggagtctgtggagactacataacatctttattttctggtggcttgcacttgggcaggtcttgacaagcatcatattcctgatgactgacctgaaccatttccggaggggagccgctggatagctggaaatcttgctgagcagtttcaggaaatacagcgtcatcatctttcagattttctagaaatatctgaaactcttgcacaagattattcagtttgccaacagacagttttgttctctcttttggtaacttgtctatccacaggttgtctccatttagaagcctattagctcttgagtctgtgttatcggagccaatgtccacgtcccaggccaggaagatgcttagtttgcaaaactgctctggttcatcctgaatttggtcttgtctcttcatgcgtctccctatcctttcagtcccccatgccccttggacgggaggcagaaagtggatggaaggacccttggaaggtgcatcttcccaggaggttgtgtcctcacagggggtgtcctcacaggggaaatagcccacagagaggctcaggttggaattggatttggagctgtcgtcctctatgtcgctgttagaggatgaatatgccatggagttcaaaggcacaaatttctctcaacttgagaagcttcaaaaaagaaaaaagaaaaaataggtgggactaaggagaagagagtcatagtacttaagcaaaaacattatccattcccttctcttttttctttttttttttttgagacgaagtctcactctgtctcccaggctggaatgcagtggtgtgatcttggctcactgcaacctcagcctcccgagtagctgggactacaagcacacgccaccacacctggctaatttttgtatttttagtagagatggggtttcaccatgttgaccaggctggtctcgaactcctgacctcaggtgatccactcacctttgcctccaaagtgctgggattataggtgtgagccaccacacccggccccattcccttttctattcagaactaccccatttagatagaagtattatccaatagtttttgtttgtttttgtttttttttttgagatggagcctcgctctgttgtccaggctggagttcagtggtgtgatgtcagctcaccgcaacctccgtctcctggattcaagagattgtcttgcctcagcctcccgggtagctaggactacaggcacatgccaccatgcccagctaattttttgtatttttagtagagaaggggtttcaccatgttagccagaaaggtcttgacctgacctcgtgatctacctgcctcggcctcccaaagtgctgggattactggcatgagccaccaggcctggccagtgttatccagtttttacaatctctcagtgaagggcagaagaggcagccctctcccttttaaaacttatttcattgtattataatcctctctactaagcatctccacttctcatcatttgtcctactgtggttgtaagatcttgtatcataaaagaaaaggatgatcattgtataaaattggaaaaatataggaaagtatgaagatgaaataaatatgctgtagtcctaccttctaaagataatgataactatcaaaacattttgatggacttccttatcttttctatttatataaacacacatatacatatctgtacatttatacaatatgtccacatacacatatacatatatgtaaatgtggatatgacatatagttgaaactgaaattattttatcccatagcctacaacaaacatatatatggttactctgcaatttttaaccacttcttattaatgctaaataaatctgtaataaacccgcttttccataaatctttgactatgtctcttatttttctatatgtaggattaatggaccaaaccccataaatatattaaagtcttgtggtagttgataccaaattactttccagaaggttttggtatttagatgcccatcctcccaccgtctgatgacactgtttagtccagctttttctgtgaagccccagagtaagtagggctggaagaatgtgcacgtgcatgcacgcgtgcacgcgcgcacacacagacacacacacacaaacaaaagactgtcacaccctgctctggtggctgcccacgtggaagaagtgctgctaactcctgaggcaaaaaaaggagacacgagaaatccttcacatcccgagtctccgtggctaaaagtccagctgtcagaagtctgtgttctgagactgttggttaccatggcaacagaaagaaccaagttagagccaggaatgtggaaagagaaaaggaaaaaaggggacagaaagccacagaatctatccctttgtttccaaaatattctatgcccataccatcctaggctgaagaggatccctcttgagtgtagaagaacgaatgcatggagtttacttctctcttgtcaggtggcagatggttcccgtccttaggagatttagagctctaaataaggggcatgggtataaacatacacatacatacacacacagagacatgcttacaaatggaaagcagaaagccaagaaacacttatctgacctacctattggattcatcagttttcttaagatctttccccaatatttgtctctctc

SEQ ID NO: 915975 - DNA, 4001 bp, Homo sapiens
ctgaagcatgagatttgcttgaacccggaaggcagaggttgcagtgagctcagattgtgccactgcactccagcctgggtgacagagtgagactgtgtctcaaaaaataaaaataaaacataagtgcaaatacaaatggagccaggcacagtggctcacacctgtaatcccaacactttcagaggccaaggtgggaggactacttgaagccaggagttggagaccagcctgagcaacattttgagaccttgtctctacaaaaaatttaaaaattagctgggtgtgatggtacacagtcatctcagctacttaggaggctgaggcaggaggactgattgaacccagaaatgtgaggctgcggtgagctgattgcaccactgcactccaacctgggcaacagaatgagacctgtctaatttttttaaaattatttttcaataaaaatttctaaaaaaagaaacactaatggttgactctctgaaagtgttacctgtccaggcagagtccaaacagaaatgactgctcccaacattgtgctccaaaccactattcacacctatagcataacagcacattcttgtaattatttgtgccatactttctcatctccacctccccaagactctaattcctgaaaagaacctttaattctagttcctaatgaatgcttattaaaattaatttaaatttctccttcctttgaatgcctatagtcactcatccttcattcaacaaatacttattgagtgtctgctacattccaagcagttgagatacaagactgaaccagacagacatagtctggagcttacattctactgaagcaaactgacaaagaacaaataaatagacaaagaactgcagacaagtgctctatggaaacaaaagatgagacggaatcgcagaggaggaattctttgggagctaacccaaggaccctcattgctggaggagagacttgtgctaagacttgaagttttgaagaaggaaaccaagccaagttgttgggggggtggtggggggaggaggacatgccaaggataatgaaaagaatggcctcgaaatggggacaggtttgatgagttggagaaacagcaaggaagcaggcgtgaatgttaacaggggaaagaactggtaaaatggtggcagataggccacaggtaggcagcggccagactgtgtaagacctcacaggccatgcattgccctagatgcaatgggatgccatccaaaggttttgggcccagggcaaatgtgatcctaatttcgttcaagatcacttttgctgccacgaggagaatggagtggtccaggagcatctgcattgctataaaggaatgcctaaggctgggtaatttacaaagaaatgaggtatatttagctcaaaaataaaatagtagccctcccgcactcaccaggtccggtcggtagtacctgtgcaccacttctgcccctgcgcacatggccaggagactggctgcgaacattttcaggtaggtggacatgggcacgcccgcgggcatggtcggcaggctggacggggaaggaaggggcagtgtcagaagttccagctcacgactacaccgcgccagggctgaggcgctccagccagcgctggacacgagacacacggcggcgggggtgcaggaggacccctgggttctcgcccaaccccacgcctcggtttcctcctttacgagctgagggcactgagaggacgaacgccctccaggccgaggcccagccccaatcgtttatcagtgaggggcgccggcctgcgtgcggcattaaagggagctcttgatcagcaagcggaaaaccgataccaggtcgtttccccgcgccccttctacctcttggaggagaggaactgtggacttcactcctctctgcctctatacacgcgctctactagagactgtaccgcgaactgcagggatgctgggcaacaggtctaagggcggacggagcggacggcgagcaggccggacccaaaatacagggacccggggccgcaccggacaggaaagtgggagcgctgccggcgcaggcacgtgacgcagaggaggtggggcgctgggagaaagccagtgactttttttttttttaaaccaattccgacactttctcagccccaggctcccagcacctccatcactctccctatagttaaattttcctggcagatgtggaatctaaggccaggccgtggactattattacatcgtttgttctttcgtgcacacaaaggaaaccacgcctttaccacttttttaggaggggtggagtcacacattgagcatttgcgtgcttttatgggaggtcaccctcctgtgacctcttaagagtgaagttaaaggcactcactgtccctgtgtctggcgtcttttgatacccgaaatagagccacatccagacagctgtggccttatgacctggtgctactgggaaaggggaaatttgaaatcgacataacttaatccaggaatttttccattgttttgattattggttgttttttaagtaaaaggttagtgcaagggccgggggcggtggcttacgcctgtaatcccagccagcactttgggaggccaaggcgggcggatcacttgaggcctgaaatttgagaccagcctggccaacatggcaagatggcaagactccatctctactaaaaatatatatatataatatatatttttaaatatatattttatacatattttatattatatatttttaatatatattatatatttttaatatatatttatatatttataatatatatttatttttaatatatatttatatatttttaaatatatatgtatatatatacacacaaaatttagccgggcgtggtggcagatgactataatcccagctactcgggaggctgaggcaggggaatcgcttgaacccaggagatggaggttgcagtgagctgagatcgcgccattgcactccagcctgggcaacagagcaagactccgtctcaaaaaaaaaaaaaagttagtgcaaggctaaattctgaaggattaaagttgtatgtatgacaaatcataatactcatatttgtaaagagtcttatggaggtatatttgacatacaataaactgcacatatttaaagtatacaatatgatgtttgacatatgtgagaccattaccacaatcaagataatgaacatacccaagaccctcaaaagtttcttagtgcttctttctactccctccctcctccatggcctcatttccctaggtaatcacagatctgctttctgtcactataagttagtttgcattttctggaatgttacataaatagaattataccgtatgtactattttttgtgttgcttatttcatgcagctcagttattttgagattcatccacattgttgcatgtcttagtagttcactccttattgctaggtgggtttagactacaattggtttatctattcacttattgatgaacattttggttgtttctagttgttggtgtgtaaataaataaaattttaaaaatgttggaacctaaaaaaaacactgtaagccttgagagagatgtgactaatctgagtcacatacggttacaacttctgttctcagattatatattaactcactttttcttgttctatacaatcactagagaaaattaaatgccagtgacaaaaacctcctttcttaatgacccttgattaatttgccctttattgtcctgctttgctgagaccagataacagaaaacccatgagtattacaccctctgtaaaaagtgttaaatgcaccttcccaaaaagaaacactgcgtataaccaaccaaattgctgtaactttgtgccaatcttgtatgaaaagtgttgcaatcctgctaaaaactcctgtctctgccatacaaatgaaatcttaactttcttacttcagaacgctgactccattcctttggagctggtgtttccaggtggtccattcttactctttgtgcttga

SEQ ID NO: 915976 - DNA, 4001 bp, Homo sapiens
cactttgggaggcaaaggcgggaggatcccttgagcctagaagttcaagaccagcctgggcaacatagtgagaccccatctctataaaaacctttttaaaatgccaaatgaaactaacaggtactggatttcagactggtgagttgtttgaggaacaacttagatgcaaactaacgtcaattcaactcttattcacaaaagaaatctaaaattcttaatgttgtgtttgctttattttgagctgaggactcaattgttatagaacttcacatgtagaactaaaacccatgaggtacccttttttgcagagtggaggaaagagggcaatgccagtttaggaaacttatgttcagttaaggtgagattgtactagttttggttttagattggtaattcctggaggctgctctgaaggttgataccaacattgctggagaggtatgaaatggtccctccctaccattgataaaataaggtacattgttgctacatggagaggccagttcctcattctcccaacaaacaaatgctgagctgagcatcaaatctataggtactttctttctttttttttttctttttagagatggagtctggctctgtcgcccaggctgagtgcagaggtgtgatcatatcgcactgtaacctcaaactcctagcctcacagaatcctcatgctgcagtgctcctgagtagttggggctatggatgcttaccaccccacccagctaattttgaatcaataggtactttcacacatacatacaatcagggccgttctattatttttctcctttagaagactgtccaagttctaggcagcaacaatgttaaaggaattcagtatatttgcataggcacttgcataatagttagatcagatttcttagtctttgggtttcccctctgtccttctggccttttcctctcctcttttgaggggttaggatacggctttgggtttcctttgtagtcgttcagacacaggggtgtagctgctggtaggaagttatttatggccaataggattcacatcggtaagaattatttattagccactgtcttaaatattggaaccaaggcaatagtaactgccgacatgatgcactgcggaaatggagaaactttaaaaacagcagggcttagggaggtggtttgcagaaaggcaggaagagctcaagcaccagaagaaatgggtctggtttctcttccagtatcaccgccaattggctgtgtgacctaggacaagccacttctcctctgccaactgccatgcagcatttaccaagaggacatcaaagaacctccctcacaggcctgttgcagaaattaaatgagataatggctaaggctcctgggaagctttccctaaatgactacacccagtggatctggtagaatcaaaagttaacaagtcaatccattcatgctaactcttctttatgtttaaaagaggaaattaatacatggtcaccataaagaaaattcaccaacctttgaccttccaagctttgagaatccagcaaacacccacccacactgttggggaagccatctcactgtactagaaatgaaaccattgcaggttaatgattcactaattctaatgagacctggagagatcagcaaaacaagcgaaactgatagcaataggacaaaaggaaagtgcaagagagaaacccagaaagcagctgaatgttgcctttaatacctgtaagatggtctgtccctgaaggcaactgcacccaggtgggtcccgaggctcctcagaacccgcagatccagagtgagctgccaggcgagggctcggagcaacaagttccacacctgtaacaatgcgtcctcctggctgagtgaaagcaaccttgctaccagctgcaatgaggaactggtctctcccctccttagagacatttccagttatttgtttatgaaaaagcctaaagggaagccagctcagaatctaaggcagcctaagaacaagtcaggtaaacaacggctgatcaaatacagaaatgatgcaaatgtaactttttacttcctcttgaggcattcaacaaatcatcactcatagttcagtgaagcagttctaggtttctatttcatttattttctctaaggttgtgagatgcattctttgggactctactttcttcacatcataaaacattttgtgttgatctattttattaatgacttgctttgataagcattgaatagtagaggaaatgattagagcaccagggagtgaatttgtgaacattagttttcaaataattaaaatgcaaatggaagagcatttatatctaccagtattctcattagatcagtaccccaaagaatatttatttgatgcctaggtggagataatgcatatgtatgcagcattaaacaaaaatgtctatagactttcccaaaacaaagttgaagtaattctaatgaagtctaattcactgaagttttcattgattggactcattacagatacttactgtgaaggttccctgaggtcggtagttcttaaagtagggtccctggaccagcagtatcactatgacttgagaacttgttagaaaggaaaaatcttccccctccatgctctccaacccctggaactctgggatggggtcagaagtccgtggtttttttttgagacagggtctcactctgtcactcaggctggagtgcagtggcacgatctcagctcactgcaacctccacctcctgggttcaagcgattctcctacctcagcttcctgtgtagctgagattacaggtgcacaccaccagggcccggctaacttttgtatttttagtacagacggggtttcaccatattggccaggctgtccgaactcctgacctcaggtggtccacccacttcggcctcccaaagtgctgggattacaggtgtgagccactgtgcccagccagaagtctgtgtttaacaagacttccaggtgattcttacatgggttaaaatttgagaaccactgcccttagaggaaaagaaaaaaaggtctaacttatagatgttggccttgtgataaactttatattagtctttaattctctcatattgatcttactagaacatcatttacttagaactttgaaaaatgacttgatctcctgccctcaccaccattgccaacattaccatgactcaaccaaaagcaggatatcaaaaaatattttgcctgcatggagcctgcataaacagttctgagctcctgccaaggatgtctagaagtgaattgcttcaatttgggaaggaaaaaaatgaataaagtcttttagcttttagtttgtggaaggaaggtcatactcttttctaccaatcccctcacgcacatgggattgtaaagctgtctctcctaggggataatgataatggaatacttgatcccaatgcaaaaacttccaacctctggttgtaacttcaagaaggaaattaagagtcttatagaaaggtcacaaaagattatcacggaaaaaaatgtgccacctccatctgatttgtcaaggagatggcaacagggaggcattttgggtggggaagggacaccccagagtcagcttttcctttaagaacctggggcaacctcactgtggccctttctcagatgacacatggaggtgctctccaatatcgcagagggagcagctcgcctcagcattttttgcctgtgtgtagttttacgtttatgtatgctttgcttcaataaaaagtataccttaaaaagtatgtctatgctaaaagatgacatcctggtttgcttactttatggctttgaattggcaaattcctaaaagatattttctttctagttgttgaaaagaggtatgagatttatttgagcttccttttaggttttagggctacaaaaattcagttgtaccatatttacaatgattaatatagctgggcacagtggctgatgcctgtaatcccagcactttggaaggccaaggtgggcagactgattgagcccaggagt

SEQ ID NO: 915977 - DNA, 4001 bp, Homo sapiens
gcctcagcctcccaaatagctgggattacaagcaggcgccaccacgcccagctaattttgtatttttagtagagactgggtttcaccatgttggttacactggtctcgagttcctgagctcagatgatccacccaccccagcctcccaaagtgctgggattacacaggcatgagtcactgcgcctggtccatcattctgattttcatttggcaatggtaccccctccccatccctaaaactgacaagcagttcattaataaatcaaaatgtacatgcatgaaactagcctcattttaagggaaatctgctacaaatccttcctacaattttttttaatgtggataacttttcttcaccttttttaagtaggctacacatgcagtggattgcatacggccacagtacctagtagactgagacacaatttgagtgcggggtgtggccctgacattgtttcatacaagcagagctttctggccacaggcaggtttgaagcccgtctgccctcattagcataaggtgctacactaaccttccccactgttaaatgaatctaaaaagttcgctctcctgtggctctctgcattgtcaccaggacaggatttaattcaagactcaaattgagtcttaaactccattttttaccggcgtctgggttaagggatgtgacaggcccaaggttacaaagtcattgccagggcctccacagccgcctaggaaataccgcagcctctgactgctgtttgcatttgctggttaggctaggatgtggcatctggttgacttcaattggaggagataggagctctttatccaaaaggacactgaaataggtcagcagttattactcaaaacagatccagggtaccttaaatcccgagacataggcagggtgaaatagaagggtgagttttggcaaaagtcacttgacacaaagcctggctggcccggggaagctagaagaccttgcctgccaatcaacatgaagtggtataaaaagaagtttctatttgtgtgtgtgtgtgtgtgtgtgtgtgtgtgtgtttaatgaaaagtatcttaacagactgttaataataaagctctgtctcacatatgtaaaacatccttactgctgcagcttctcagagaaatcctaagagcagcccagccggtcttcggcatcaaggcagacacagatgcgtttttgcagctctgcttctagttctccccaaccccactcccacccttccccgcttcctgccccaccaccactgcccgaaaagtcctgtcttgctctgctgcacttttccaggtgcagcgccttggttccgaggagatgggggagaggcctggaggagcaagtgtgggaggtgggggagcggccggggaccacgtccgggaatcctctcccccaggagagccctgagacccgccagctgcaggtgagccccggcggctgcaggggagcccgcgacagtcctccccgcgctccctcggcagagacgccccgcaggctcgactgctccaggcgcaaccgcccccgcgcgggggacttgccacgctttcggtctttccagaaacgggcggtctgctcctgtcccgaaaatggggacggggagagggggctgcgcgccccccacccaagatccctgcacccttccttcccgccgcctctcccgcccgcccccgccggcccccgcctcccgccggactcaccttggcccgcgcccgcgctggtggcggtggagttcccgcagcccatcgcgcagccggccggggaagccgcgctccggagctctcggccgcgggtcctgggggcggagacccagacgaagggcggcgcaccccgagcgggaggctgacggggccgcgaggggccaggaaccgagtgggggccgccccctcccaccgccgggagacgcggcccggggcgcagcgggctgcgggctgccgggcggaaaccacccggcacccctcgccccggccccgccccgcccggggacccgccggacccacccgtcgccccagcaacctcggcactggccaatccccagcctcctgcgcgcttcgcggtcggccattggtcgttattacgaggggcgggagtttaaagtgggccccggggcgagggagcggcaaggggcgtggccggcgcagcggggtgggggtgcccacctgcccaccctcagcatcctcctcgccttgtctttgcttttctttcctcacttcccctccctgccccaggatgtggggaggagaggaagtagcagggggcaccctgcacagtggacgcccaataaatgctattgactgaatgttgtgcaggtctgaagccaaaaccgaaatccccagctgctttaacagaaggccaacgcagctctgttccccatacgcactgcctggcaaaagttcttccccagattggtcatcttgacctattcctctttaaaacaaatgtctgcaacgatttcaataacttggattcaggacctcctctctgataaatgagagaactgtggatgggcacggtgctgtacgtttcaacatgatagttgggccagcgttactgcagtcagactgtctgagttaaagtcttcgttctgccccgtgatagctgcgtgacctcaggaaagtaacttaacccattgggtacatcccttgtttcacctataaaatgacagtaactcaggtacatataaagtacctaacaaagttccctatctttagtaaatatcagctattatcattattattattaactctaatagaaatgaatacaaattccttaaagggaaagactatctgatttttcatagcgtcctcctggcttgtaatacagactcactaaatgttttgtgaggtgacttcaagccaggaattaaagctccattttaaattcacttaatatttgtagggagcctagcctgtgccaagtcctttgttaagttccggggatacaaatatgtgggagacagtctaaccaggcagatagattaaaataaattaattacaatatagaaggaatgttaacagaggaatacaggtgccatagagtcccagaggatgctgggatgctagttaaaagacttgcctaaggccaggcatggtagcttacacctgtaaactagcactttgggaggctgacacgggcggatcacgaggtcaggagttcgagaccagcctaacatggtgaaaccctgtctctactaaaaatacaaagattaattgggtgtggtggcatacacctgtaatcccagctacttaagaggctgaggcaagagaatcacttgaacctgagaggtggaggttgcagtgggccgagatagcaccactgcactcaagcctgggtgacaaagcgagattctgtctcaaaaaaacaaaacaaaacaaaaaaaaaacagacttccctgaaaccatactgttgtgtttacataaaaataaaaatatgaaccagaatcaaggacttggcaggtttttgaacatggcctttgaggcaatggtgcgttctatcattcaggatgcaaaatatacagcattctccatttgaaaattagctgtggtagccatgtgctgagaggataattaattcttggataaataaaggcattttttagttgacttctagaagtactgcttctctaccagcctgtgctgtcttggttcagtgtccatcctaatacatagccagaactggggaaaagggaactatcaagtagccgaaagatattctcctgcttatttctgtgctgacactagactccagccttaggacacttgtaagagacagaaaatggaccttgacacctagaaactggcctagaagctgtgacactcaacagctgggcctttgcattctcctgttaaacacagttgcatagaacaccaatatcacacaaggccactctataaactatgaaatgagacaaaaaacaaggtgactcggtaatcttgtctaagtgctgacaaaaacaaggtcattgtgcaaacccccaaaacaccaaacatctccccatcctgc

SEQ ID NO: 915978 - DNA, 4001 bp, Homo sapiens
actctatgctctgcacagtggcccatgagagcttctagaaacatgagtcagatggtttcacttctctgcataatacttttcagtggcttcccatggcactgaaaatcaaattccaactcttcccctgtcctgccccctggtctggctctaccctcctctcttaccaggttctggaacatgctgtccttgctgttcctcttttgtgcttccagatctttgcatttactgttctcttggtcccgtgtatcacgtggctggattcttctccttctatggggtcacctccagaactgggtcatctctgaccttctgacctccccctcaagctctcacatcacctaggtgtcaagggtgggatgagaatgtggcagacctcatgtttctatttccccgaagatggtcaggggcaggccgggcgcggtagctcacaatttgggaggccgaggcaggcggatcacttgaggccaggagttcaagaccagcctggccaacatggcgaagccctatctctactaaaattacaaaaattagcctggtgtggtggcacacgcctgtagtcccatctactcgggaggctgaggcagaatcacgtgaatccagggggcaggggttgcagtgagccaagatcatgtcactgcactccagcctaggtgacaaagcaagactccatctaaaaaaaaaaaaaaaaaaaaaaaaaaaaaaaaaaaaacggctgggcgcggtggctcacgcctgtaatcccagcactttgggaggccgaggccagcagatcacctgaggtcgggagtttgagaccagcctgaccaacatggagaaaccccatctctactaaaaatacaaaattagtagggcgtggtggcgcatgcctgtaatcccagctaactcgggaggctgaagcaagagaatcgcttgaacccgggaggcggaggttgccgtgagccaagatcgcgccatttcacttcagcctgggcaacaagagcaaaactctgtctcaaaaaaagaaaaaaaaaatcgggagcagaggggccacgcttgagttggatttgctcctcctggtgtctggtgcctccccgacctccgtgctgggctcacttctattcagctggaggaggcccagacccacaggtgtgtggccacccactgggaaataggtgtccagccaggagctccattttaatagccacgaactggtacagcaacaccatctccatggcgacggccagcctgggaccacgaatgagaacacaggctcactattggccccagtggaggctaactgggcagaggagaagcagcacctgtgagtggagtttgttctcctgtccctctctcaaccttccctagtctgtggccattggaaaagcttctgtgaggactgttctccagggaagagggaaatcttcccaagagaatgcaaccatcttttattcctttgcttacaatcttcccatggcttctcaactcactcggaataaaatctaaagaattctcctaggtggtgccatcgtaagcggcttggtttaagcaatagcttggtggtcacagaaaacaaatagtagttaagtaccaaggtgagctggcagcctctgtgggccaagtcgcacatcccaaatgagcaggtcttctggtgggactgaggaaggaaccaaggtaagaataggagctcaacaattacctagatagagtctccacagcccagacaagccaggactagagaagtagacttcagaaatccctggaatttctggcttttgggaagaccttgtaacagatcactgtattttgtctgcctaccctcctcacttccttttcccattttgtctggtaacaggatcttccttcctaaggaaaatccactggatgtggttcagtagggctcacactgctccgtcatcttctcgaactccagacctcaggtgatccacccacctcggcctctcaaagtattgggattacaggggtgagccactgcacccggccggctcagtcatcttctccctatttcctgccacaggaaccagcacatgacccagactggccaatgggatgacaccttggcccaggcggtgattggttcagggatggatatgtaattcacacccaaccaatcagagtctttcccgggactttcctaacagagcatcaggaaagacttgttggctcctctgaggttgctaagaagagaatgtaaggatttcatgctacatagagagctgttcaagaaggaagccaaaggccgggtgcggtggctcacgcctgtaatcccagcactttgggaggctgaggcaggcggatcacctgaggtcgggagtttgagaccagcctgaccaacatggttaaaccctgtctctactaaaaatacaaaaaattagctgggcgtagtggggcatgccagctactcaggaggctgaggcaggagaatcgtttgaacccgggaggcagaggttgtggcgagccaagatcgcgccattgcactccagcctaggcaacaagagggaaactccgtctcaaaaaagaagaagaaggagaaggagaagagaagaagaagaagaaagaagaagaagaagaagaagaagaagaagaagaagaagaagaagaagaagaagaagaagaagaagaagaagaagaagaagaaggcggccaaatagaagcaaatggaaccaagacgtagggagagagaacctacctgatgacatagtgtgaacccttatcttcatccatgtccaaggacagcacaatctcttcaactgcccagttacatgattcaataaattcccctttgaggctttgtggttaacgtaagctgggtttctgtcacttactgcgcaaacaatcctggctaacatagacctgcttagcatcctatctacataaacctgcaacgctaactcctcttgtagctgcatccctgcctctgactccagatctgaacttagttgtgagaatagaagaagctggacaggttcttgtttaatttcccccataaccagtccccagtttctatcccagtttcagtaactgaggccctgtctccttattctggctctttatccttccagccccagtagggacagctggccaaaacctgccacttgctactgtaacctgaacattgctctagcctgtctggattgccacctatggtccacaccagtactacttggtgcaaactacttccgccaatccctacaccccattggtatacccgctacacagatggctaagtcatggttacataaacttaaggcttcacactgcaacttaaggcagcatttcccaagctgtgtactgtgagactccatttggtgagatgatagtagatagtccattaacaaagaggaaaaaagcaaactggcaatagttttttcttcaattttatattttaaaatataaactgtggagaaacgttttacatggaggttatcttctaaagacggcacttcagataaaaatcatggctcatcgccaggcacggtgcctcacgcctgtaatcccagcattttgggaggccaaggcgggcggatcacgaggtcaggagatcgtgaccatcctggctatcatggtgaaaccctgtctctactaaaaatacaaaaaattagcgggacatggtggcgggcgcctgtagtcccagctacccgggaggctgagacaggagaatggccggaacccgggaggcggagcttgcaatgagccgagatcacaccatcgcactccagcctgggtgacacagcgagactccgtctcaaaacaaacaaacaaacaaaaaaacccatggcttatcaaaattgccttttaaacccttaaattgtccacatagcacagcaaacaactccttcttcccagtgggtccactggagccaatttctagctccggaacaagttgctgttattacagttttgctccaggtgaaggtgaaggaattggcttattttaggggtcatgtggctgaaaattatgtacctagatttaaaggcagagcagcaagatgctcactctgtga

SEQ ID NO: 915979 - DNA, 4001 bp, Homo sapiens
gtcctgggattacaggcatgagccactgcacctggcccctttcttctaatagtgcctctcaaccatacacctcccacctcatttgtatttggttagacaaagtgactccctcagatcaaccagggattaatcctggagctccaacacatatttaaaactactggcttgatagtctaacaacattgtagattacctagagagaagcagatacgttatttaaacggatttcttgacctatttacatgataagatttaatttccttgaaatgccattttgaaaactgggattggcatcccttacaggttctctaattagttgctttcagattacttggcaagtaaaggactatgttgttatgaaccccacctgcagtatatcccgaacaggaatctccatcttgggtttctttttgtaaagtctgcatttgacccctttacactcttttccgtgttcataaacgtgctcagggttggaaaagctgtttcagtagagatggcatatttctggtggcattcgggggcaggtacaggagttgcaggcatccatcgtatgctgtccagcgtctgcacgttcccttgtttgctcccagtgggtagagaacccggcattgtgggtaccttattagaactgtcaggaggtaatattacataaataatgaaataacatgttaatgcaattcattacaggttcgttggaatttattgttcaggttattcctttcactgctctgagaaacatcaggtatactagactcacctgaagcaggatgtaagcgtataatttgtcagacgggcaatatggtctagtggatccagaatttgaatattatttctggctctgctgctggcttcctttatgactaggagggaaatgtctctgggtgttgccagtttcggtatctgtggattgataagcagatcgcaagcatggatgttataataggttatttcatgggaaattaaacagcaaatctaatgagaggagcgggttacttggtcatttctttctaggtgctatttggtgctttaagaggacctctagtattggataagttaaaggagtttcagaaagtgcatcataacaacattactgagagctcagaatgtgctacatggttctgagggccatctgcgtattaacctcatttaatccctgcagcacacccggaggtcattgcatgatattgatgcaattttacagatgaagaaactgaagcacatatggttaaataatttgtccaagatcacaaagctagtaagcagcagaactggggtttgaactcaggttatttaaactcagagccccagttcttattccccagtatttgactcccctttgctctcacctggtgatagaaatgataatgaccaggctgagcgcaatggctcacacctgtaatcccagcaccttgggagactgaggcaggtagatcgcttgagctcaggagtttgagaccagcctgggcaacacaacaaaaccccatctctacaaaagatacaaaaattagctggctgtggtggcatgcccctgtcatttcagttacttggcaggctgaggtgggggagtggcttgagcccagtaggcagagattgaagtgagctgagatcgtgccactgcactcaagcttgggcaacaaagcaacactccatttccaaaaaacaaaagaaaaagtatgagatttaacttaaaaataattttccttcatctgattagaaagtataatcaggatgagctttagtgtgttgttttttgtagagccgggcggggaccgggggtgggggggggtctcaccatgttgcccaggctggtcttgaactcctgggctcaagcgatcctcccacctcagcctcccaaagtgctgggattacaggtgaaagacactgcacctggactatctttctgttattgctgtggtggggagcacaccaaaatagtgcctgtcatcctcatccttcctaggcatctttcccagcactgctgctgtgattagtaccttaactccagcctaggcaggtgcagtgcatcagcggctctcttctctagcttcttttacctcagcccaagccactctgtagaaatgggctccacccatgtcatctgacctgtaggtctccactctttcttcccagttctcagatggttcttggagcactggcgaagtcaagcgaaaataaggtggtgagttttccccaacgaaataattaaattttggctgatgctggcctttagtcatcgaaggccgagaaagtaccgccctaaccagggaaaagcaatatcagatgtaggctgttctgttgtgtctcaacctcaaaatgcttgtggcaaaagggacaaacctccaataagtctatattagaggttcaacagagttcattgaaaacttgaaacaaatctgaaaagaaaaacactctacaaatagggaaaaaagatgggtagctgagagtgataaagtgagattccccagatatgttgctgtcaccacaggcaaatctcaaattgttttcaatggagcttttggaaatttaaattaatcctgccattttcaggcttggtcgtttggaatgtgtgttagtgaaacgcagtgatgtagttttatagactgtaagaaccttggaggcacctgaattcttgaagctagagatttattgtaggtcttctcttgttctctgagaagaaaaccagacttcatataacaagaagtgagacagaagaacagttttcagaagcatgtgtcactctgctattttaggaattgttccaataagagatgtttatagtaagcttggtgtgacccagccaagaagcttaatataacaaggttaactgaattgtgggaggaaagtttctagcctataccagcttgcatttattaataatcagaaaggttgcggatgacagacttgctgagcatttactaaatctggtacttgtggtttgcaaatcatgtgattaacagctgctatcatctatcctagaaacggcaggaagaagtgttattattttatcacataaaatagtagtcacaaagagaatgaaaacagtttaatttggcagatataaaattcactggttaagcagaaaaccatgctctgccctcccactgagctcactaaagatgggtttcctgggaatgtctcagtgaacagatgtttcttcttaggttttgatgaagagtttagtggcatctaatcattagtgaagggttgttttggcaaaaggaatctcttgtctatctacacacatacttaaatttttttttttacgtatattaaggattttgcattaattaccaataggatctcacatagatgaatcatgaatgattgactggctttcctaatcaagttttgaatgattttaaaaatcagcctgcctgatctaaggtttggaagttcaatgctcaataaataactttagtaaagggaggaaaacattttaaaggaaaaaaacaggaaagataattacattgttaatctgtttggagttagaatttgattcagaaagatttctacagagccttttgaatcaccctgaaatctgccagctttttccaggatgctgcttttgtacctctgtatacatcatatgccattctttgcaataaaatgcaactttcttagtgattgaataatatagatgttgataaacacaaattatgtcatgttgtttacatatacattcctaaagaataagaaatattgtctacattgtacatacgtagtagattaactcattgaagtcagaacaaatgtagatttctataagtcccaaagagtatggatgtcttagaggttgatgttgaagtctgcagttacactggtggtgaaaatcaaatatataacgaataactttaggtaagaatcaaatcggacttgttttacagatgttgccatgtgttagaggattttacttgttgctttatagttttggatcgggcagatggttgaaaagtgttgattcaagagctttgactgtatggaacaagataattgaggcaata

SEQ ID NO: 915980 - DNA, 4001 bp, Homo sapiens
tccaaatatgaaaataaaccggttatattttgatagcagccatatataaaagttcagtggcagagactgagagataagtctaaaatgttggcagtctgtataccttcagataaataagaaatctattcagttttagacaatccaagatatactttttgaagacttccatgcatagataaaactattgacaaatgttctccatatagcctatcaagaggattttatcacatcatttgaaataggggtgaaaaggggagaggaagtatctttaaacttcaatatgcaaagtacaacttcagttatcatacctctcttctgtaaagaggaagaagagagagtatcagaaatgttaaaagtcacgcagggagaagtccaatagtagatttatttgctcccaagattaaagggagcctggaaacctgtagtcattaaacactagccatcgggaatacggcttccttccttttaacttgaaggccaatttcataaactgcaacacctatacaaaacaaaattaattacttgcaatgtgtgagttataatgacttaaggaaactatttgtgcaatgtacctgaaagccactttctggtggcctttccagtctattattatagaaatattgcacataaggataaagacatgagattcccattccagatgacaaagataacagccgcattatcctgcatgaaccagggtaactcttgctatacaatccacttgaagccttgtttcaacattacagagggaggcactacttaaatttggaaaaaaggaaataatttcaaaactacctgttaaaacttagaaagtaacactcctcaaacttactgccaatcacaactatgaattcctggtgccaaaggcaacaataattttgaaagtagtcatcctatcttaaaaggatttataataaaatatttcaaaacattccccagaaacagtgaacaagaaatacatcacaaacagctactgtaccgcagatacaggttcagctcaattgtctggggaaggtaaggttaaagtcacaggaaacagctggtctcagagtgatgtgtgcaagcctttttcaaagacaaacttataaacagctcctcacaagccagacatcacctgaattctaaaataaacatttttattaactgtttccatcattttcaaagattgaaaaagtctgatgtcaagatcttcaaaaacaactttccatttgaaaaaaggctttatgataaaaaaaaaaaatggttgaggtacttagtttcaatggagttaccagatgaaatgtagttggtaaacaacagtagtcagcactggggtgagacccatttaaaaacaaccctacctggtgtttttattgtaattcaagtttgaaataccgaggagctttttcacagaataggtttaaaaataaaaccataacaattggcaagggtagtccatgtgttgcgggtctacgaattctaactctcgagaatggtgtgccaataatatccacagacatttgtactctaaatacctgcatattcagtggcctattcctgtgttgtctacaaaatcagaataatttattcctgggtgtagaaataacttcttaaaagttatttgagattactaatttcaagtaattactaattttatttcagactgcgtatttccagtgtcaacatgtttacatatataccaaaaaaaggccactatatgttaactgtgtagagcaaaattcaatttttccactttcaatttccactgaaaaacgctgttatcctctacaactaaacagcaagtccttctattatatggggtagtgaagtaatctacactacagcattatcaaggttcacttaggtttttagtatttatctgaaataaaagtctgaaaatgaggaatcgagaaagtcagcatttcaacttttgagaataaaagttcataaacataccttttgttgaattccagcttatgtgatttttatgtacatcttgcaggtgatgaaaagcaaaaagcaaccaatctctctgtggtgtttagcctgttctttaagactatgggtcacctgccccggggaaatttctaattgaacaaagaatccatggggcaaagtaattgtttttcaaaggtgggtcagaatggaacatttatatcttcacttcaacagggaagcaatgaaatgtaatcctttgagtatcacatttttggtagatgctaccgtggtctcttatccttatttcatgagatcattagcctgtgaatgtgtccatgttttgactttagaaatttttaaaacatgctactcctgtgtttcctgtaaaacctaaacatgtatatacagagcatcttcattcctcatcaaatgtttttccagcatgaccagtgtgcaacagagattcagtttatagaacctgtcttctaagaaaaaatacttttagctaaacctctataatcatgacaagagattgattaaaatgccaagataagaaacgatttattatagagagaagaaaaatttctcatccaaaatatagaaatctgtacaactttgccacaatcaatatacatgaactgtacaaatttacaccagttcataatttaccaaataaaagatgactaacaaagttcacaaaatagatggtggtttgtggaaaagacttttacccaattaagtacaaggaaagttacaaaccagacctccactttctaaaaataagaagtttactcagtcttagaaaactacaagctagcaaatgtacagagagctggctggtgctaacaccacagttgagacagtgtctttttaagggtcttttttaaagcctgttgccatggcagattctggtcacttgctactttcaaggccaaaaacacaatacaaggtctgaccatttccccaggtcatgcttactagtttgtctttatgtacatttatacatatttaagtgctaggtaaaagtcttgtaaaatttccagtactaccatgtttaaaacgtttaactttcctattaaaagctgccgaaaaggttaacaataacaactttcaagtgtaatagtgcaaattcccctgcgagatttactgcagagaaagattctttgaaatacagattttctttaaaaggattgatgtaaaaatttaggtatgtctgggagaaactgaaaccaccctaggacttccctccctagcaaataaagtgatcatttacttggactcacaggctattaaaattaatcattgaaaggtactgtccaaactatggcactgtcacttaaaattttttttttttttaccattctatcttgtgccagatcttcacagctgtgacatggtttaaattccataatccatccccaagaggagcccacccaaagcaaaaatcaaatttatccatcatcatcagatgatccatccacagactatatcttaacctgatacagtcatcatattgtagtttttggaagggctcgttctgcccaagagaagttcctccttacagctgattcggctgtctaccatttgcacgttggtgctgttttgagtgctacctcctgctggtgaggcttcatacagcacacagatggagccatcctctccaattctgtaggacacttcataggggtcaacccagagtgtgagttcacttgggagaagcctgaacagctcctgactgctcagtccaatccgctgtgctgcctgtccaatcagaggatccattttatggttgatgcgaatacaacggtaacccgatcccttgcatggcttttctgggaaccagtgatgtttataatgttctatagaagaaaagaagaacagagaaacaacgcttaggatcgttagctcccactgcggattcctcctaccccaggctcctttgaggagcgaaaatgaaaactatcaactttttaaaatgtccaggattgcatccgttgttgtgcatgtgcggggatggaaaaagcgggcagggttttagaaataacacagtagtaccggacaaaacaatctccaggaaccaaccg

SEQ ID NO: 915981 - DNA, 4001 bp, Homo sapiens
cggcagcaagagggatcgaggtgagacggcaagacgttctgacttccagggctgcatgtcatcaacacgtgaggggcgtgtttcctggagagggagagctgcttaccagctcagtcgggaagtgggaggatggacggcccacggtggggtctctgttcaggcttgtgtgtgagcacctgtgtgtgcatcatgtgtgtgtgcccagatatgtgtgtccacagtctttagtgaggcatcttctgcctccacgggctctgagatctccagcagtgtctgttattgcgagcacaggtccccccggagaggactgtttcctttgctgatggtctgaaaggtactttatgttcggatgcagtgctgtcttgattggggaccattctttttcctcaaatgtcctccaatttggcagaccatgtattccaatctggaaaactccacccttactttcaggaatttttctctgccccttctctaaggacctccattccctttgcctttccttgaggataaacgcctttccttgatatgactcgttcgtccctgctgcgttccagcttccacaggattggatccactgtagcgagtccacacatgcttagtagcacggatgcagggggagaaggggtgcatgaatgactgtgtgtggctgaggacagccctcgggtgctctctgtcaggtgtcatgttggcagctggccctgtctgcccttggtgtccaagcctgtgccccgtgtcagggtctggggtcagattctgtgtttcaagatccaatagcaacacacacacacaaattcctggatgtcagggccaggtgggaccccagagaccacctaggtgcatctatccttcattgatatacaaggcaccccccagagagggaagggccttccttgcccaatatcacacaggaagttgaggggatacagccgggtctcctgactcctagtcacagctctcttcaccattccacattctctccctaattttgacaaccccctgtcccttcctctctctctctctttgctgtcatctctgtacttttctcatgccctcccctttcagaacctgcccatttctcaaggcctatcctggccctccttcactctggaacctgcctgattcctctcccctaacttcttctgcaccattagtgacaagtcctgctaattctcatcccctaattgtctgtaacacaaattaatgcttgattacttgatgctctaatgacctgggctctaaccaggctcaattgctttctagctgcgtgaccttgggctacttacttaacgttcttagtcctctgttttgtcatctgtaaagtggggctggcttttgagcctgagtaaatagcagaagccaagactcagaggggtaaacttcaaaaacggcagtgttaaaatctaagggcagtgttaaaatctaaggtgtgatggtggtgtgttgggagcagtggtgagaaggcaggcaggggtcaaactgggggagcctcagctgtggggggcttatgttattggtaatggggcttccatgaggctttttggaagggaagtaacaaacccctacctagagcttgaagtggggtagaaagggcaccggctttgcagctggcagatctggattgaaattccagctctaccactgactagctgtgtgatgctgcacacattgctagatctctctgagcctcctttttcaatctataaaataaggattatactcaccctatggaattgtggtaaggattaaacaagaaaaggtctattaattgcttagcttggagtcttgcacttagtaagtacttaacaaggagtagccgtgattactggtgctgtcgtcattacccagcagcgcgtgtctgcctcctgacctgcctctgtcctgggtctctctgggccctgggtgtcaggctcattcctcatttcccaacctggaagcttcccaagggcagggctcacatgcatcatcttctcgctctggctgtttcaggaagtgatgggagtggggaaggctgttgaactggtgatgtcacaatttggggcttctgggtggttctgcagaggccccagggacctgtaggcaggtggagaggggatgggggaggtctcaggtcctcttgctcacccatcagctgtgtagtgtctgaagtgattaaggagcttggggaggttggtgttgacaagatgttaagccatttctcccagggacagtccctggggcctcaggcactgtggtgggcctaccactgctccggaaccccatggtgggggcaggcccgtcccccagagagggagcatggaggtgggagctgaggggaacttgactgacagcttccccacccccggctgagtgtctccttggcccatgcggatggaggggggagccagaccacactatcaatgaaataattagagcctaatgttagacagtgtttctttaacacctactaggggttcacgggtgtgctgggtgcagaggacaatcatttggcaaggttggctgggcccctgcctgcagagaggttacagtttagaggaggattcagacaagcacacagaggatacgcaccaggaagggaggaagcctgggggctacgggagccctgaggggtgcacttggcctctctagaatggccgtgtgaagttttgtaagggtgagacatagctggccctgtaggctgagccagggacatgcaagcagttgtgtgtttggaaagcagaccagggtgttaagagggtcgtgtggaggtgatggtagggggtgacagtggctggagatgaagccagaaaagtatgcggggctcttgaatgctgacatgaggagtgagctttctgttccaagggaagctgggagctgttgaagagttttaagcaggaagggatgtggtcagatgcaggggctgcagtgctatgggaatggggaggattgcgaggggtctgcctttgggtttcatggagcaagggagtgatggcaggggcatgctcctgcagagggaggaggggatggggtgtgtgggtctagagcaggcagtctgaggtgggcctgcccaggtgagagggtgtggggactccatcaggtcggagtttggagcccagggcagggctgagggagggggaagggtgaggtggagggctggactgcaagaccaggcaggggaaccgcggcttcagctctgccagcacttcccttaggcctcccaggctggtctgctccactggccctcagaaagacttgtcgcctcgccgagcctcagtgttctcatctgaagaatagagtgggcaaggcctttctcctacacactcaggtgtctgattagtgaacagtcacggtgtctccaactgggccctgagttatgggagaggcaagcccatgacccaccaggccccaccaagagccgtgccacagcctgaggtgggctctcggtgttgaccagctcttggagtacttcaggaggaggtggagggactggggagttctaggagtgtgtccatgataaagagccgcaaacaagatcccaggtccaaggctgcctcacctcccctgtgacatggggtgctctctcagacccttccagctcattgggcttttgagccacccctgcgtagtgggaccagggcccccagggctgggaggacagggaatatggggttgtagcttaggcgtaatggggtgaggaccccaggactcacccagctctgaaggttgccagatctttgcatcttactgttcatcttctgcctctgcagagccctgaatgggaagaaatgggttccatgtgcagcaagccaggagagatttaggcaacgagaacctccagttctgtcttagggttcccagctttctccttgtcctgagggagccgctgagcctgtgggagatgaggggtgcccattccccagtgcttctcaccctcccccacctgccctcctggggtacctttgtctgccacttgcatcctattggaagctgtccccaagtgcgtgttaggcaggtggcaggtgctg

SEQ ID NO: 915982 - DNA, 4001 bp, Homo sapiens
agggtgtggggcctacaagaccaggccagggcccaaggctattctacctgtcccttgcctctttcctcccccaaatccattcattccagccacctggctggcccttgagctgccaagccacagactctgctgagggcaaggccgttctaggcccccagccctggggtgagcaacagaacagctgatcggcaggtgaagtgagcaggcaaatgttttcttccttttataccttttcctcaaacatccaacccgaatgccctcaacatgagaacagctgctgacttcctattgcctgagacatggattccattctaattcgaaggagcctagactccagttagctggtccaatgcaaggctgagagacccaaaggccaggggggctgccgcagaagaaaggatagcccaagacaggacgagaaaagaagcgagttggcagggcgagacaccaaagacatctggtgttgcccatagttgcaatgtgaggtcacagctgcagagacactcaggtttaagtcctgagttctaattctaacaccattcctacactccgtgaggccctaggcagaaggttttccttctctggcccccaatttcctctgtgggtaaatgaagtcatctatcgttcttggcagcctcgcgttcctggattcagtgacgctgtttcggggaataatctcaggttgtgggatgagtgcagggagatctagagagcgaccagtctgagctgggttggggagaggggcatctcacctgtccgttcttcatgaggtcggcccacatgctggtgccgtcgccgccgcgcatgagcacgtggtaagcgaagaagtagacgcctggcatggggcaagtaaacttgccgctggctgcctcgtaggcgttgcccacgttggtcaccacgtcgtcgaagcgcagcacctcgtaaccctcgtggggccgccgcaggcccgcgtagaaagcaatgcgaggcacgtagccggcagcgggcgccaccccgcccggacctggaccgggagggcccggggggcctggcctgccgggttctcctgggggccctcttggacctggtggtccagggggcccccgcaggcctgctttcccgcgccggcccacctctcccttggcgcctggcgggaaggggggcacggaagcaggcgcgccgtcgggaccagggccacggggcccatgcgggtcgcacaccatgcggcagcgacccagcatctcgtagtgcgctggcccgcgggagctgtgcaccagcagcgggatggccaccagcagcagcagcaccatggccactccgacggccgcgcccgccaccctcttgcggcggctcagccgcgacgctgccagggccagcaaatcttcctcactcttgggcgcaatggctgccggggccggggctctccgcgggccaggaggcggtgacccgccttgggcctgggtctgcactcccccgacggctgccccccgctccccttaccctgcctctgcgggctccagccgcggcggtgccgctccccaagccgtccgtcaaggggaggcccctcgtgggttacgtcaggggcagctcccgacggtccagagccagtggtcctctagtaccctcccgttcagtcctaacgatcctgggcacctgagatccgcggcttctcggacggctggtttcttagggatctgagatgcctgctctccagactgctgctctctcagggatggcgcggtgcctgggtcccagactgcccagatagaccactccctgatggagaggggactgctccccgcgctccggacgtcccgggctctgagctgcgggtgctgctcaccgggcgcgatctcctagtaggttttgcgctctgcctcttggcaagcaccgactcaccttgctacccctgccgcggccccagtccctgctagagccctggcccgcgcctctctcctgcgggcgcggtccctctccgcctccctaaccttcctcccctccctcccgggcgcgggtggtatgaggcgccgcgcggcgggagccactataagcggccagaggcggagcgacccctggtgcccagagtgggaagtgcgggggcggggcaggcagcggcccccacccacgtcctccccgcctcccctccactcccccactgcccctaggttccttcccggctctgagcgggttcttcagggtttcgcggcccccgctgtatctttacttttaccctttacccggagtttggcattctcagaggccagaggaaacccaaaacagcgatgggataaagaggggtcaagatacaaacacgcagagaagacaggggtagattcccgagctaaaatgagggggagggacctcacaaacaaacagaaaacaaaataagaagggctagaaaagatagaaattcaccaccccacgcacctcagcgcccgtgaccgaataacatggtaaaggattcaactgatactagttggcctgaactggaaaaggcaaatctctagccaaccctacccccacccctcagtattggggcgcggagcggagtgtgtgtgtgtgtgtgtgtgtgtgtgtgtgtgtgtgtgtttgtgtggagagagagagagagagagagagagagagaaaataagagaacagatcagcccgggggagcaagcaagaaaccgacaagaaagcagagaaggagcgacagaaatcaaagagaaggaaagctagatagagatgcagagacagagacaaagcttcgaaaagagacggactgacagccccagagggggagagggagagacagagacagaggaagagagacagagccgggacaggttgacagatcgagagagaaatgtaaatggcgcgctgcagagagacacccaggtccgtgtttggactccaatgtgacatatcaactgtggggaagatgcgggggcagggcggctctgccagcagtgctaggctctgggcctgtgcattgtgacagtgtgctccaaagtgtggaggtggccatgggatcctggccctgtgtgtccctgggtgagtgcgattgtggattgtgtgttgtctttgtgtatgtatatgtgagggctgtttgaagggaggtatttgtatttgtcttcctcctagtccctcaatttggagcccacaaatgccatttttcctaccttgggactgagaatgaaggactctactggacagagaggaagtcagaagacagctgtcttctcatttgccctgcccagctcagcccaatgccacccctgccctggtcccagacttatccagtcccaggagtctctgccccttcctccttcttcaagagtttgttgttagatgaaacccagagaagttggatcccacataatgggtatttgggtgggggttgaagttggccatgcaaattaatgtaagtaaaatgcagattaggtgctaggcaccctcctgtaagaggggactgtatctgtctttccgagcggccaagacattgctagacacaggcattgctagatcagagtccagagaaaaagctactggctgcatcctctcttagggcctgggccttctggggaaaatgtcttgctcacagggaccccagaggctaggaaaacaggttctaggactggtaaaaagtgggggcatttggagaccctggaggtgagcagctgcaaaggcctcttagagaccaggataagccaggactatcatgtatgggagaacattgtgtaagatggagggcacagggcacaccagggcatgattattggatggagagtgatttcctcctctcttgttttctgtactccttccttgcacccccgacccccgcctcataatgatgctgggagagagaggttcctaaggctgggcctgtgttgggggttgggggaggcccctacatgtctgcaaggagtgggagagaaaggattggcagtcagtgggggaggggcctcctcctccaaccataaatacaaattttattcaaggtctttgtcgccatttgtcttcctcggggggctgagggccgt

SEQ ID NO: 915983 - DNA, 4001 bp, Homo sapiens
ctctttgcgtgttgtcctggactgggtacctcaccctttccctgttttctgctcctctggcaggtttcaggtccttctccatccccaccacctcctatggcctgttcccctggggtcctggttgtctgtacccagcctttacctgcccctcattcccagagctcagacagctccgctttattttctgtcttcagattccacctcagcctaatcaaaccattcacacctcgagtgcctcctgatgccctcggcggaacatgagccctgaagcccacccatctcagtgtcagcaggcactgcctcgtccctcttccttcctcctcacagcctcctcaacctctccttgactctgccagcaaacgccctcccccaacactgcacactcgccaagtcttctgagccggtaagacgtgccattgtcatgtaattcacgcataatctccaggggtctcctgggaatggtagttgttggaccttcgcaggctctgcttgagccctgaatctcatttttactggatagagaaagacaggcctgggaaggtacccttggttgccacagaggtgagggttctgagcacactgtccttgctgaaggctattcctgtgctgccagagcccacatttctcctcctcatgtccctgtgttcctgttgaagcaggcagccatgtcaatcatttccttggagacagggaagctgaggcacagtggtttcccaaagactctcagctagacagcagatggggaaggttttcctgactcagtggatgttgaatttcctgagtgggtcctgtccccttccttctctgtgcttctcccctcagtgctcaccgagggcctctacaccagtgagcgcccatccagggcatccccgggctctcagagaggccgttggccatcagctcttgtggggctgggctgtgtctgggggtgtgcatgccatacagatcccagatcccagagggcccagttttgtctcccctctgcccgcccatcctgcccctaccttgacataatcatagaagcagccttcagaaggctccaggtcaaactgctggaagacgagcttcaccctgtatcccgtggggactgtgatcacagtggttgtttcaaagttgttggggtaaggcttggggaacagaggggaagtcacctccccaaataacttctgagggatgggaatggagcctcctgccctgcagaacagggccggcaccaggaggtacaagagccacctgccaaaacaaaagagagtatctggagctggaggggttcagcactcttgccatgtgggcagtggctgtggcaggggatgagacggccataccactgggcattctcctctctgcccaccctgaacctcacagacatgttctcagcaggggtgcgtgggtggggaggatggcctgtgcagctgctgcatcgggtcactctccagggcagtgtccagtccagaggccaccacactcccctcacactccctttccagcctcctcccctgcccggacgcgtccctcccctccccttccaggaataggactggcttgggaccagttaatggagggtgagggtttccacccgtgggtctctgaaagggctcccacaggttcagcaagagcgtctgggagaaaccatctgtggagtgggggacacaggcacagagtgtcccgtcctgggcaaggggtcccctcctctcgctgctccctgccaagagcccagagggaagaaaggaccatggcatgagcatctatgtatgaagtctcctctgatccctaggaggagggatggggcgtgtgttgtgtgtgtccacgcgtgtgcacagtggaactgatgaggtgtgtgaagagagaagggtgttcctgtctccctgaattgcctcccatgccctggcttctcccctggcttctccctcccacctggttgcccatcacccttactcacatttctcaaggcccgtgttgaatcctgggctctcccgacagcgtcttcgtgcactgtgtgcagagggagcccgcgtcatgcacagcagggaggggagggttttctgtggagtggaggggggaccattcccggaggaatgttggagggaatgaactatttgcataaacaaaagatctgagtttccactttaatttagttttggttttgaaatccctgtttgtggtgccacctgctggtcggtgagggaaagggctaaggagacgggagtctggctttttagggcccggggagccttgggttggaggcccagatgtctcagtctctaaatctgatcagcttctcccttcttccaagactttcctgggggctgctgctgtgtttacaaggttcctaccaaagcagtgggagaccacaggtggtggtgaattctcttttctgggctgtcctttcccattgaccctgttcttcctgccctcattcagcccacagccctggtccaagaatggcccgggtttcaatgcccaggacgtaatgataggaacactggggcagaggagggtgtgtgggagcgggcagaggagagaggagcttggttgccttggggccctggcctgctttagccatgaatgacacttggacatagaatagggttggccatgtcagggcaaccctaaatcagccctgggtttgagaccctctggggcggctgcggagggggtaaaatgtccccatctccttagcatctgctcaacacaactgccagggctgaagctaaggatgcgggtgtggagcaagagggactcggtttttctgagatgaagccaggcccctgggagggaggagggaccctagtctctcctgtccatcaggccatagtgtcctgctttaaaacttttgctcttggccacgtgtggtggctcatgcctgtgatgccagcacttttcgaggccagggtgggaagatctcttgagcccaggagttcgaaaccagcctgggcaacatagtgagatctcgtctctaaaagttaaaataaattaaaaaacaatttcattgtttttggaaggctttcttcatcaactctccatggcaccaaatatctgatggcacttcatcccacggaggggcttgggctgcagagcaggactctgcgttcttaagcctttgtaggctgttctgcttgtttcccttattagatgaatccctccaacctccacccttctgcccccacccccgttcatccatttatgggctacctgtttaatgtgcaagacactttcccaggcaatagattgcaagaattcacagagctgatgcagttccccatcaggcagtgaccacatcatcagtagttagacagcaggcacacagaaggtgcaagatccaccaacgcttggagggtttctccagcaggcctgtgtgtcagagctgaggactgaacctaacggagggctggtctgtgatgggatcagcatatgatccacagccttgttagatcaggaaagacaaaagatgggggagaaggaaaagcaccagatcagaggacgagaaggaaggggaatctcgtctaacaaactgcacattaatatcctagcagcagtttgtgtgtgtgtgtgtgtgtgcacgcgcgcatgtgccgtatgttcataatggaggcagagggaacaggtaaggaggtaagtcttagctgaagctcttccgtccatcctagggattctcagttctgcgttggcattgtgcaacacgcttggagagcggcaaacctggatgtcattagctcagtcccagccctgtctccactctgcccaaccattcaaaataacctttactcacacatttttgttatgtccttgactttgttttgtccttgactcataccaagaaggaaaaaaatgccatatgaaatgctgctgcgtttgttttaaaacaattattgaggatatagtcggttacagtgtttgttcctttaaggatttgattcttgggaaaaagatttctctcttaaagtagtggtaggttttcctctgtggatatgtctctatcgctagctcatctatctccatca

SEQ ID NO: 915984 - DNA, 4001 bp, Homo sapiens
tcacttcagcgtcccttgtagctgggaccacaggtgcgtgccaccacacttggctaatttttaaatttttttgtagagatggggtcttgctatgttgcccaggctggtctcaaattcctgggctcaagtgcttctttcgcctcagcctcccaaagtgctgggactacagacatgagctactgcgcccagccttagaaaactttaattaaaaaacaaaaagtcttacaactattatgtatccataataattaaaaattttaaaattaaaaaataaagttcaaaaatttatgtcattttgatataaataaaatttaaatcaaaagataatgtgctctttttatttttatttattatttacttatttttgagatggggtcttgctatgttgcttaggctggccttgaaccctgggctccagccctctgatcctccagcctcagtctcctgactatactgctgggactgcaagcttgcatcactccatcaagtactgtttttaaaatgtccttattctgaataaggctttggcgttagaagttttgtaatagctcttccaaggtaagtgtgaacggtgacttaatcttttgttattatttgtgtccagcttcctcacctgatagagcaggcactcaacaaatacatgatgacatatttttaacaaccaatatgtgcgtccctgcccctggctccatagatttgcaagatttgtgtgtccattcataagccttccaaacgcagggcctgcttgctgccctctttgctctgtggggcccagatggcagccccggaggcgctggtgggaggctgtgtcctggggtccaccactgctccccggtaagccaagcccgactgcccctacatggaaaattcatccctcctccagatgggggattcagggcaccgccacttcccacaaccccgggaatctccctggccacagtcctggcgggaccccccccatccccagctcactgtgacagagtcccctgcacagtcctgggacggctccaggtcgaagtcctggaagacgagcctcacagcaaagccctctggagccttgatgtccgtgctgctctcttggcctttgccatacggctctgggtacccgggggatgtcagctgctggggtagctcttgggccaagaggacggagccccgggttgggcaagcctggaggactccccagagaagcagccaccacctgtgagttggggggagggcaaggtggggccgcgcagctatggccggaagcctgtgggtgtgggaggagcgggggagccgcgctaggactcagaggcctcgcgaggcagggctagaagctgtggcctcacccttgaggcccgggcacttcccgtctcctcccttgctccccttcctcaccccaatccctacagcctcccgcgcagcctgagctctaggattgtgggttttccatcctccgaagacatcacctttgctcatctcccaggagagtctcgtccaaaggaggggggtgctttctgcttcagcagatcccaccccaccctgggatccgagggagcaatggtggggcgagtgagggtctgccgtaaatatcccccgaccaccctctgggaaggtgctagaggccacaggcaaatttcagtctccccatggaatatctgctgtgctgctgctgctgctgctgctggtgtgtgtatgtgggggaggtgtgtgtgtgtgtgtgtgtgtgggggggggggggatgtgtgtgtggggggggtagggtggggggagggagggtttgcggccacccaccctttctcttcccctcccgtcctcttccctcctcctctgccggggccacactcacattgcgcctggacagcctttggagtgagggcttctccagagatatttcccccacactctgggtccaggcatctggaactggacatctgggacctgcgagagaactggcccaggatagggaacaaaaggtgaaggccggtgggggaggaggaagttcctggaaatgttaagcaactccacagttccccttctccaattctccgggctgagcgccacctgccgtctgactcaggaacagcgggcccgccgcagcttaggggagaaacgtccaaaaacctcgctggccctcagaggtcagggtggcagggcactgactcgacccttttgtactatttaacattaatttttgccatgtgtgtaggatggctccttgtgagttatggctgctgccttcaatcagccatgtctcttcctccccgacctttccgttcacgacatacccggggagcctccctcttgtagaattgaagtttgtgatccttgaacttgagctttctcttcctttccctcctccccaagcaggggtgggggacatgcgcttaggtggtcttttgaatcctattcacaacctctggaggctgcttgtccagcatggtcagggctggggtcgagcccaggtgtccctcagtccctagtcccagtcatcactcaagccgtcactcaagcttctttaggcagatactagagcccctgcctgctctcaccgctccccgaggaaggacactcacccacagcttggtaggaggccagaaggctcttatggagatgggtggtcccatcctcagagaaggcaggtgtgtggaaggccttacgttgtatgcacacacaaatgcatgtgcgcgcgcacacacacctctcagagaagaatctattgcttcccccattttgcatatagtaatatggaggcaagttacagacccaaacagggtgtgctctgcatctttggtttttctaggctagagagatttaggagagccacagtctatggctacaaggagatgataagagagtgatggccaggacagatgcaatgtctcaggtacagtcttgagatcaagcctacctgtctgccacaccccaaccccaaacacaactggggatgatctcccatacccatcttcgaggagtgggcctctctgactaggacttctttcctcccctgagaccactgaaacctgctctctcatagaactcttagggtcacctggagcaccttgggagccagagatgcagccaaagagtgaacaatggtaccaatcccaagacccatgtgttaagaagaaaccagccaagactcagatcaggattggggagtccacccctcgtttcccttcagagcattatttccttgtttgctaagaggggcaggaactggaaaactcaggctagcccatctgagaagactttcctggagatgagctggaggagggaggagtaaggccttggaaggaaactccaggacaggtagggtgaccgactgttctgatttgcgtgggaccgacgggtttcccaggacatgaggctttccgttttaaaatgagggaagttctgggcaagccaggactggtggtcaccctaaatggataggggttaaagtgctggagtgaggctgggtgagaaagaggacagggagccaagagggtggggaggcagtgatgcaccggcagccccaggtgactgggcagtccagggtctggatgtggtccctgtttggggtaatccagcactctgaagatgagggcccaccttggtctcacctaggtggcgtgtgcggctgcagcatgagttagggtcaagggcaaggggaggaatggctggtgatgtgagactggagaaggagctgatggctctgtgcatagctggtcactgcaggcccctgtgggctagggctgagctgtgccccgctgtgttttcagcaccacctcccctacactgggacctcgtctctaactggcagagtggtcaatgaaaaaaagggcatgccttggcacatcatggtcaaactgctaaaagccaaagacaagagaaaatcttttcttttttttaatcccatcctaaagactagacagaacaatattttcaatgtcactcttttctcatcaaaaccaatatagaccagaagacagtggaatatctctaaaatgctgaaggaaaaaaaaagtcaactcaga

SEQ ID NO: 915985 - DNA, 4001 bp, Homo sapiens
tgagtcatacgcacagttctctgacagctcaatgtccagatgggtgaagtagaggtgaatcccatacccttcaggaacttctatgtcccaagatttctctacctcactgggatatgcctgaggatagttaggggacaggatctccccatacatggtaggctcagcataaacccatgccaaaagtgaaaacaggacaatgcacctgaaaaaacagaggcatagattggcgggtgaccaggcaccagtagcctaggacagaacgcgctatttgccagaggcagaagaaagggggaagaagagaggcagtcaatcggccatgggggagaatcttaggtcggaataaagaaaaggcccaggtcaaaccaaaacccaggcttcagacaagagcccttttttttttttttttgagacaggttctcactctgtcacccaggctggagtgcagtggtgcgatctcaggtcactgcagccttgacctcccgcgctcaagtgattctaccacctcagccttttgagtagcagggaccacaggtgacacgcatgacgctgggctaattttttttttttttaatagagacagggtctccttatgttgcccaggctggtctcaaagtcctgggctcaagcaatcctcccgcctcagcctcccaaagtgctggggttacaggtgtgagccatcatgcctggcccttgagcgcttttcttgagaagatgaagggaatggagtctgtgtcatctcagggacccttgatcacttaccacatctctggcgatttgtccaccctggtgagctgcctgtctcttggtcctggctttctgcacctccggactttggagcctaaggggtggcaggcctggctgtatttgtctgacaaacacaagcaccttctttggtggtgcggcgtcacctggggctcagtgtcaccttcaaaggtataacacacagggccatatcaccaacatccccacatggcaccgtgcccctcacaccctccctagttaacttcgactaactttctagactatagctaaattgtatccttccctcattgcttctctagactttctcctaatttttctccaaaggaatcgagtactttctcccagttttcttcttcctctattgtcctccaccagccccacccccgcggtatcagtctctctcctgccctcaagaacgatgctcccatttccactcaggttttcaacagtcttggcgcatcatgatcatccatgtaggacagcccctcttctttaaccgtgatcacctcatctcctcaagcagccctgtctgctgtttatcattgcgtgcatctccgctgatgctcccaacgcccaccgatggaggcaggagcttctttcactaggggaaggcagggaccctgggacaagcggtctgagaaggaagtgctgccccactgatacagggttgtgcgaggaaggagaaaagggacagccaaatgacaaggaacataaaaacttcctacattcgttttccagagtttgtttggagtttgtccctgccccccaccgccaacttactgaaaatacaagctatctccccacagttcctagtaaagggttgctaaaattgctttaaccctgaaaacagtggtaggtaagggggtgaagtaggggtggatggggtgagcctaagagaaataggttgtctatattctgcctttttttatgctgcctttgtcagccctctatcattgccccaagccctcctacgtgaagttttctgcctttcctttttcctccatcaaagctctgctcctcgtttgtaaggattttaccttcagaagctggtaggagcaagtgggtcagttccctctctcctgccagtgggcatgctgggcaacccctctggcccccagggacagcagcacagggccttgacgctccctctgcaggaacctccggccagcctccctgtcctggttctgttcataagattccctacccgagtgtgcatgtctgaaattccctgatctaaacagagggggctgggagaccatgacttagggaaactcagccttgatcttggagctccctctgcttttgaaacaaggacagcgtcctcctcccaggccagagagccctctatccagggctccagcggggaaaggaggaatggggaatttcaccgattgcttaatgctatttttcagccaaagggtgtgtttctgagttttcgggaaagtcaagtgatttctgggaaaaggcggggattggtaccaggggaaataaccaaacccagaaagtccagccctccaaatgtgtgtgaatcatgaattaagggaaagtagttatcagaaatgtaagtcatctctgctttaaagcaaatgtaatggttgataatgacttaacaccaagacccaaggtggtatggcgtgaggcttcctcttcataacatccctccacatcccttccaaacatcgaaattctaccccacaaccaagccccctttcagatccaacccagactcccttatccataacccttgaagccaggtgtgttttgaaattttatagatttttttaggctatgtagtccatggacccaatattaggtaacacctcctcctctccctccctttatggaccaggataaccccctattaacaaacattaagatttctgcagctaaacacattgatcttacggtaaatggataactaaagattacaaatcacatcagttcgggtcaggttttgctgccaaattgagttttagtcccaaacttgaaaacaaacaaacaaaaaacaatagccaggtattgtgacacacgcctgtagtcccagctactcaggaggctgaggcaagaggatcacttgtgccagggaggtcgaggctgcagagggcaccactgcactccagcctgggcaacagaatgagatcccattacaaaaaaaagacagagactttgttttcagagtcctttggattttagaattgcagacaagggactgaggggcagtgccactccacagagccttccctgatctcagctcccctttatgcccctttagttggcttagcactgggcctggagtcagaagataggctcatgtcccagctctgctcctcaccagtggtgatgtcttaggctcatcacctaacttcctagtttctttttttttttaaacctggctcactattgacagacctagtttcttcaaatataaaacagaaatcctatcagttctgcctaccctacatgactatcagatggacctaatgaaataattcgagtgaacaagctttgcacactatggtacctaataaatgtgcatgttaaaaggaagagaatcatgagcccgtaaggtctcggaagacaggtgctgggtctgatccgtcttggtattgtccgccatgtctagcagtgtcatgcagaacacagatgtgtatgcaaccatctgtgactcccctggctgcccagcattcaaactgctttgccacattagaggagttccccatgatatcagtcttgggaacagagccgacctcccaagaaagaagacacaggcacaagaagtgtgtcacccccacctccagcagctctggagcaggctaatttgtaatcacccgaagggttcttcctgcctgctgcgtagacaaaaccaattcactgagaccatggtattgcagtagagaaagagtttaacaacacagagctagccaagtgaaaggatgggagtttatttctcaaatcagtccccacaagaactcagaggctagggttcttaaggagaatttggtgggcggtaagagcagagaatgggtgctactgattcgttggggataaaatcataggagtgtagaaaacagaccttgtgcactaagtccacctctgggtgggggtcacaggaccagttgagtcatgaatcatttcagaatgcaaaagtctgaaaaatatctcagaagaccaatatttggttttacaatagtgatgttatctataggagcaattggggaagtcacagatcttgtgacctc

SEQ ID NO: 915986 - DNA, 4001 bp, Homo sapiens
ttgatgttccctttgcctggtaaaatcctgggtgtccttcaaggcccacttcaaatgtcactttcacaagaagcctttctcaaccttcagagacagaattctttccatattctaatacaatactcatcactttggtgaggccgtattagcagagtggttaagagaacaaactgtcaggctgtggaggtttgcaagctatgtaaccttaagcaaattatttacccttcctgggcctcagttacatccactgtaacatgggacaataacaatactcctatagcaggactgttgtgaaaactaagaatttaaaagtacttagtacagatctggcaattattaaattcaacacgttacctattagttattaaataggctgtgtgggtcaatgtctgaactaccggaaagcaaacactatgttttagttatttgtggattcctatcacctaacatctggcacaagagcactcaagaactttctcaaatgaagtgattaagaatcaccatgacaatgggcaggggaggcagtgaactgtaattattcggttagagaacatttaggaaacatcaggaatattgagatgaaatcgagctatatattatgatatatctatccatcaattctaagcactaatagcccaaatgattgctgctctaatgctctggctcatcacgccaatttttattacaatctttacttggcttctttcagactctgggttattaccttccggccgtaggcctttactaatttgcatgacttttaaactaatcattagacttaaaaagcaattttgcaatttaagtccatggcaattaaatgacttcctacctcaaggcgctaaattaccctgaaacacctcatcagacctaccagcctatacaagagcaggaagtgttgcagttgtgttttagaacgtgcatggcagattcacaaaatgttaggcatgagagtggatttcctcgcactgtgggactccaagtgcccataaagggcttcatgcaccttcttaaacatgatgtccagcactctggccaccccttccaagggtgtgtgtgtgcctgtgtgtgtgtgtgtttcagtggctgcggggccacaccttgggatctcctgagtggcaggtggcctgttaatgagtcctgacatcagagtcattccggcatttgtgtgtgtgtgtgtgtatgtgtgtgagtgtgtcggtggctgcgcggccacgccttgggatctcctgagtggcaggtggcctgttaatgagtcctgacatcagggtcacccccgcatgcacaacagtacaagcctccccgcgcagcggactgtgccgcggacgcctgcaagccgtgcacccatcgcacacactgaggtctcggcggtcatccctcgtgggagagctggacaaccacggccgaagggagggcagtcgaggggggaataggctgaggggctgggggcgaggtgggtagatccttcacagggcttggcgctccctgtgttttgaggggcaggaccctgcaccaacctccacgaaggcatcagtcaggtcactagcacggtccatcactggcaaatggcgcccggccacgattttcaccttcagcttccctggcatggtctcggtttcggcctcttcttgggctcctgcagaaacaaacaaacgagtctgcgccgagcgcggggccggcgggagaggggcggaggcgcgcggggtaactgacagcgaaggagcgcgcgggggcgcgcgcgggcgcccggcagtcgcgccacgggtcgccactcactgtcgcaggaggaagggtgctgtcccgcgcgggtgctgagacctcattccggagaggcggcgggaggaagggctttgatgggttcttccgtcccggccccacaaggctgggacgaaaagcaaaacccagtcagcatcccgttgagcctctgccgcccctgcttgtctctcctcccccgctctcaaaaatggcggctctcggggcgcggaagaaagcatcgatcgttcggcgctctgcccacttggcggggcgaaactaaactcgccgaggaaagataagggggcggggctgacgttgagaaagctggagggcagggaaatgggccgagtcctgcatcatccaccgagtgggggctgtggataggtgcggcgctgcttccctggagggaaacgctccatcttgcgggccgaagcgcgagtgctgctctgtgacagcctccggccgcggccttcccagctgctaccgccgcttttcggatgggctgtgatagatggagtagcagcgaagactgctagaagagcgttttcagtcggcctttagtgattcgtaaaaccaaattagctggtttctacttggaaggggtacaggtgcgtgtggtggttccagttttctgtgaaatagagttagatggccaggcacagtggctcacgtctgtaatcccagcactttgggtggccgaggcgggcggatcacctgaggtcaggagttcaagaccagcctggacaacatggcgaaaccccgtctctactaaaaatacaaaaattagctgggcgtcgtggcgagcgcctctaattccagctactcaggaggctgaggcaggaaaatcgcttgaacctgcgaggcggaggttgcagtgagccgagatcactcctctgtctccaaaaaaagaaaaaaaagaaagaaagaaatagagataccaggcacatctcgaatagtgaaataaatatttagtgaaatattttattcagtcataggcacttgtgttgtgcactgggtcacagatattactgtgggcggggtgggggaggtcaccttgaaatccaaagtctcctcttgaaaaaaagtttctgctggtaggtgtggtggctcagatttgtaatcccagcactgtgggaggctgaggtgggaggatcgattgagtccaggagttcgagaccagcctcatggagacgaggcaacacagtaagaccccttctttacaagaaatgcaaaaattagctgggccggtggctcgtctgtggtctcagctacctaggaagctgaggtgggagaatctgggagaattgcttgagcccaggagtttgaggctgcagtgagctgccatctcaccactgcaccccaacctgggcaacagagcaaaactctgtctcttaaaaaaaatttttttttaattaaatgtcctgcactcttagatcatctcagtgttcttattaagcatccacaagcctaaagataagacctacagtagtagcagaagttcaggacttcctaccatggaaagtatagtcaaccacaagaaataaacatggagagcgttaaacatcttgaagaattgacccaactataaataaagtaaggtgttatctacaggctcagaccatattagggaaattgaggcacacacaagatgtaaataaatcagtccttaccaaatatcaaaatcagcattgacagtatacccagtatcaacaaaatcagagttcatgccggctcaaagattgtaacatttcattcctaagtgaagatatccgtatgatctttttaacttcgaaaatactcaatagagtaaatactccaaacagtagtgatcccgaattatcttttcatgacaaaaattccttctatggcaggaatattgttcacataagtgagaaattgaactcctacagagaaaacgacttcctcaaaataaaaatctaaaaaaatcgcttgctttttggactagagaaacttttatcaattcaaactatgtcaaaggaataggggtcatagatcccatgcgaatttccttaggtccacctgcagctttttctggagtctgactctgcccttaaaatacccttgccagaattctgaaggttggctacactatgtgatcaacgttttttatttatttatttatttagagacagggactcactctgtgtcccacactggagtgcagtgacatgatcatagctcactacagcctcaatcttctgggccaagcgatcctcccacctcagccc

SEQ ID NO: 915987 - DNA, 4001 bp, Homo sapiens
ttagcagaagttaaaatagcaagtcaacaaaataataaaaaagaagacatgggctgggcacagtggctcacacctgttatcccagcactttgggaagccaaggcaggcagatcacctgaggtcagtttgagaccagcctatccaacatggagaaactctgtctctactaaaaatacaaaattaggtgggcatggtggcacatgcctgtaatcccagctactcaggaggctgaggcaggagaatcgcttgaacctgggaggcagaggttgtggtgagccgaggttgcgccactacactccagcctgggcaacaaaagcaaaactccatctcaaaaaaaaaaaaagaagaagaaattattctcattcccctttccatggccttgtctactcagatatttaaatactatcacggtacccccctaaaatattgagagaagaatagagtcatgggatgctagggctgaaagaaaacttggtaatcatctctcctctcctcattttgttgttgttgttgttgtttgtttgtttgtttgtttgtagagatagggtcttgctatgttgcccaagctgctctcaaactcctggactcaagcaatcctcccatgttggcctcacagtgtgctggggttacagacatgagccactgtgcccagcctacgttttctctgcttttatttctcaagtttgacagtgaaactcagcaaattagattacaagcatataatcattactagggaggttcttggatttcaggtccgaggactgttaggcaaatgctgtttttactaccaaaaaaaaaaaaaaatcacattaaaaaaaaaaagatatatggtattgctaataaaggggaagctgccgagaactgcatgaactgaagtagcagggactgcaaacagcaaaattttaataaaaatagagttatctgtcatgagctatatgttaaatattgttattatctgttttgaaatgaaagtatgtaggagtcagggattaaaagtcctttagaacaaggctgggtgtggtggctcacgcctgtaatcccagcactttgggaggcagaggcgggtagatcacctgaggtcaggagtttgagaccaacctggccaacatggtggaaccctgtctctactaaaaatacaaaaaaatttaactgggtgtggtagcacgtgcctgcaatcccacctactcaggaggctgaggcaggagaatcgcttgaacctgggaggcggaggttgcagtgagctgagatcatgctactgtactccagcctgggcaacagagtgagactctgtctcaaaaaaaaaaaaaaaaaaaaaaagtcctgcagagcaagattactttttacatttcttcaagttaatttggctaaaaataccatacctttatgtgtttaagattagtagaggattaaaaaaaattattactaagttgaccagccgtaatttaaaggtaattaatatcctgaaactaaaattccactgtgatagagaaagaaaagtggaccccagaatcaaattgtagtaataggataacagagtcagtagcaataaggaatgggcaaaagaataaaaaaaagaaagaggaaatggaaagggaaaaaaagtgcaatcaattatttgaaaaacaaattaatggggacagctggaatcaaagttcagggtgaaatacatagccaattcaaagaaaggaaagaaatgatgtaaaaattcactattaattccactatgaaaatattaaaagcaaagacaaatgcaatgtggaatatttagaaaaaggaagttagacatagagataagataaaagaattcaaagtcagagaaggaataggggaaatagaagatagtgacactcaaactcattacctataatgagcaaaacaggctaagcacaagtcatcaggtaggtctaggttttcttaccaaaaaactgagacagtagctgaaggcttcagcacctggatgtctccacgagtcctgtctggtccccacacttagccacagtgaagtcatgaagtatggcaagaaaatttgctgagctttctcttcttctgttctctctctgtttccggcaataagttaagtcttatgctctagaccactatctgacctcacaggaagagtttcaaagtgagtcatttctaaatggcttagaaaggcaaagcaggaaaacagaagtaggagtttataatcctgagacattttctgcagcacacagagaatggttagagagagggtacctctgtacatagggttcaactttataggttttgtttagaaatgaaaaaaaaaagactctatgagatgtgagggttggagtggggagtggttggggaggaatgacctgaataaactcatttaattaatctcaaataacatatctgaaatgcttgatatatgtgaaaaacggtgccatgtcaaaatcaggatgaattaagctatattctaatctccagagattcacaatcgagtgggaatatgtacccatacatatacacacaaagctgtaatacaaactaggctataataatagaagtaacaatagaagtaaaataatagaacactctagccaggggtatatataacccagggcaatctaggagagtcttaagatagaaataagatgtgggcaagtacttaattaagtacctgtaggaattctagagacagaaaaaggtgaaaagctgcttaggctataagtggagcctagtcaaaggcaggtaggtggtagagggcaggtaggtggggaggtaggtgggagagcttagtggtcactggagaacaggctggagtctaggtgctgtttcatcaggaaggagtacagaagactgaaggtaattcctgcttaatgaatactatgctgtaaataattcttatattattcttttagatatatgcatatactcttttagatatatgcatataaaataaagtttatttgggtcaaatgtatttgaacactgttgtctgtgatataggcttcagtctatattaatcaacttgtccaaaccataatatctgctcctctgcttgtttgcagtcaagtcaccacggaatatttttgaggcagaaagatcaaaagaaaaatgccaagagttgagtagtatttattagtttatttccattgtcatcatctaattacaaaaatagaacatactttgttctagaagagataaattgaaataatacagaattataatgggtaaaaaaaatgaaagattttcttttcaattccactgctcgaagtaactatttttaataggttagtgttcattcttcctgatttttttttttctgaatatagcacacattttgtttgttggagacagggcctcagtctgtcgcccaggctggagtgcagtgccaccatcttggctcactgcaacctctgcctcctaggttcaagcaattctcccacctcatcctccttagtagctgggactacaggcatgtgccaccacaaccggctaatttttatattttttcggtagagatggggttttgccatgttgggcaggctggtcttgaactcctgagctcaggtgatccacctgcctcagcctcccaaagtgctgtgattaccggtgtgagccaccccacccggcctaacacacatttttctaaaaggtagttttgaacataaatgggatggtaatttatgtgtgattttatgtcttgcttttttacttaacaatatatcaaaacatacttccatgttagtacatataatcctattgattattttgggttttctttcctccaatatttggaaatattgaataatataggtatccagaaagcatataaaatgtaggattatcatatatgtacatatatatctaattaaaatatattttataaaaacaattaattccccatggtaaaaattaaatatgagaagattaaagtaaaaaccaaaatttcctaaacacctagctatcctctttccactttccagatgtagtctctctcttaaatacgcatattctactacgcatattgtttt

SEQ ID NO: 915988 - DNA, 4001 bp, Homo sapiens
ctctgcatccacatctctactccagagaactgtttccagctaactcggctaacgagggctccctgcaggaacaaagccacacaccactgccctatggccccaccacagcagcaccacgcaacccaaatccatgtgcggctgccttcatgtcagacctccaccagcatcagccactgccgagtagtattttgaaaagaaatgtgcagatctgaagcaaaacacacagggcctccttggaattctgatccggcgtggcaagccaggagcttgaaacagcttctttatgctagatctcagcacagaaaggcacagccccccctgtttccctacaaaccacgcaaacgctctaatcagacctctgcatgacacctctcggaggctgccacagaactgtctcaaagctgtgccaatgagtttgacttgattacagactccgaactaggggaaaccctggcttttttgctcaggagttcagaggtttccttctactgagcctgtttccccagcagcacagcctcaaactgtagacctatattgtgactacggagctgcttttaaagggcaggctcccaggtgcctgggactcttgagggaaaggcctgagggaaccactgatgacctctttgtggcctttctcacccttccaatggcatccctagagtgacagcctccttaaaccaccccaaagttccagtttgagccacagctctgcatgcccctccatgcctacccagacacctcttctctttcctcatatttttggatctcctaacttttctcaggccttcagggacatgataggcagtggccagtgtccctcgccctcaagtaattctgtgttctctgaggtcccctctcttgacccccagactccaaaccgcttgctctcctgagtccctccctggcggtactggccagaggccagaggagtgggtttggcgccacctgctcggagcgcccctccttgacccccgcaaatctccaggacggtcgtagaggtcgctctcttccaggactggcgggttctggcgggtatgagggaggctagcggggagggccttgccccaagaggcccggagcgtggacagcgcacggggtgctgaatcaggcacggggaggaggagtgccggcaagggcgccggcccggggaggacgaggtgagccgaggcgtgatccgtgggggaccacgggccgcgggaggaggctgtggacgcgcaaccgcggccggcagggtcccgagcgcctttcccgggagcgctgacgggaggcgcggcccttacctggccaaaggcggagctgagcatggggcgcagccggtggaggaacgggtccgcctcggacgcggcggctggaacggagtccccgcggccccgggctcgcagagagccccggaggccgagcgccggggacagtccccgttcctccccatcccgcccgcgggccggcggcagcggcgacgacggcgaaggtcgggacgccgcggccggcagcgcctcccggggcctgcagtgcgcctgggggagcacacgctggctcccccgcgcgccctcctctcgcggcgccggccggcacaggggcctccgcgaactggggtccccggacgactgcggcgtcgccgggcaggagccgggtagccggcggctaggcagccccgggtcccgggcagggccgtggcggggagcccggctgcccccgctcgccgccgccgccgccgccttcagcagcgacgtcttggactcgcttttggcgatgtgcgagctcatcgcggcggggcccgcgctcgcatggcccggcgggggcggcgcggtgcggcgcggcgcggggcccccggcgggcagagaacggggctcccggcgggagccaagcccgaggacgcgctggaggcgggcgccgtcccccggccgcttaaatgcggccccgtcgccgccgcccatgtgacagcgcagcctctacgcccggagcccggagctcccggcggctggcggtgcagatctgggggcgctgccggctgtccccggagagcccacccccggctccctggcggcccaggtaccgccgcgccccgccccttgccccgccccgccctgggggagccccgcttccgggcggcccctggcggcgaaggggacgctgcaacgcggagcgggagcacgaggagggaaggggcttggcaatgggccccaaagaggccgagaccccgggagtgccggcagcgctctttatcacgcctggaggctcctgcagagccccggaaccgcccgaacctccagaaatgcaggcagggtgcactccccagggggtacaactttggcaatgaggactacagaggtccggggagaaccggagacccgaggagcatgaaggcactctgtgacatcactgcctacaaacgcaggggccggaatgcagtgacaggacactgctgggaggaaagtctcccagcgcctccgtgtggggctgcctccactcccaataccgtgcggggggactaggacgaccctggtaagtcagccacaggatatcagttctcagaatagaagagaagccaggtctggcagcacctgatgatggtaagtctcaggtaggacccatttgctccccctccagctcttgtcccctctttcaccttcctgcctttctagatgctacagaaattcctgctctcggtgggcagccagggagcgtcccaggccttatctgaatctcaaatcccagctctgccacctaccatctgggtaacttgggcaggtgtcatcaacctctctgagccttgttctcctcttctgtaaaatgcagatgataagcataactaatttcttggtaacagcagacgatactatgcacacaaaaggcctagcccagtgctcggacaggggaccatccagttaagccagttcccttccccctgcacatcgtgaggccccatctaccattcttctttagtatccggtgcttgagctttgcggggggctggaggggttcctcccaggctctccctgttctggtccctggccccaatgccatccacagtcttgtcaccgctcggcctcattaaaaggatacacgaggccgggcacagtggctcgcacctgtaatcccagcactttgggaggccaagaccggcggatcacttgaggtcaggagttcgagaccagcctggccaacatggtgaaaccctgtctctactaaaaatacaaaaattagccaggcgtggtggtgggcgcctgtaatcccagccacttgtaggcatgagaataacttgaacccgggaagtgaaagttgcagtgagccgagattgggtcactacactccagcctgggcaacagagtgagaccctgtctcaaaaaaaaaaaaaaaaaaaaaaaaaaagaagggtacacaaacagattgccgatattacacttcactcatgccaagagttcatccttctctgcactgtctgcttctttacagagtgttgctctgtcaccaggctggagtgcagtggcacgatctcggctcactgcaacctctgccccccaggttcaagcgattctcctgcctcagcctcccgagtagctgggattacaggcacccgccaccacacccagctaattttttgtatttttagtagagatggggtctcaccatgttagccaggatggtctcgatctcctgacctcatgatctgcccgccttggcctcccaaaatgctgggattacaggcgtgagccaccgcgctgggccctgtgtgcctcttttacttatccataggcaaggaattaaggaaaatggatgggctgggaaagcaactgcccagaggctaaagtaaactaggaaagtgtggcaaattgttccccagatcagctacccttaagggactgaattgccatatcaaagccactcaggttcctaaagcccaaatcctgaagcagcctggggcgttgcagccctgaaggctcattgcagggtcctctgggatatgcagggtgtaatgagtccaccctttgagttcgaggtca

SEQ ID NO: 915989 - DNA, 4001 bp, Homo sapiens
ctatcgactgtgtaaccttaggaaggctctatctctgagtccagcttctttctctataaaacagccaaaagaactatgtagcggaaaagagaaaatgagataacagacattaggtatgttgcagatatttagaaaaaaaaaaaagcaattattaatactatgatagaaacacgaaattgactgcagtaagtttttttatcttttactctgtggactgaaaatctctcctatttcctgtttctcctccatcccgcttctctaaaacccagagtggaacaattatggttatgatgacaagaatactaacatttattgactactataggccaggcactgtgcacagcactttatttcattcccagaatcaccttaagaggtggatattagtatgcccaattgatggatggacaagggaatcgaggaacagagaggttaagtaatctgtctaaggtcacatggccagaaagaggaggcctgtgtaatctgactcttaagcatgctgttgtgtaagggaagatgggtgggacagaaggataatccttgttcttaagttcacttcctcaagctctggatggaacctattacaagggctaattcagatcactttctgcttctctgggacagcgcggagggcacttccgatgcagaagactcccctaagaagataccagattatgggggaggcgtgcatggaagaaacaacaagcccttggaaggatctaaggaacagcaaagattagaaggaatttgatgtgagcagcttagccaaatgaggaagacgacaggcagaaaagcccaaagtgtcctaaattgagaggctggtaaactgaccaagataggatggggttggggatacagacgccaatagctcacccgaggccataggtaagtcacttaacccctccctctgaatgtcaatcaagttccttgtctggaaaatggaagaattggaggaaaacaacgccatcattccctcttcctttaaataatacctgagtctcttctatggcctggcaacagagggctagaaaaatacgcagagcccacctaacccaaaaccctataggtgcaaacccagccttgcatgaaagatgctttagagatgatcatgttctttctaaaaggaatttttgcaaaaacaaaaacaaatccaagtgtatggcgataaagccaccacagaaagtgacttacatgcaacccctgctcaacacatcacccgggcagcctacttcttaatggaaaaactcctgggccctaaaaccactcgggtcctatttgagatactctgacttaactcaagaattattggggaagaattattgttgtttggttcctttcagtagcaatgggatctacttcaaaatccacaattctgaaggcttagaggccatcagagaggctcacagaccctcaaaggatatgaacgagtccctgcccttgctgctgggaagggtcttcagattctgccggttttaagggacttggccagtcccttgaatgactgaggtgccagtcaagttcactgacatcttaaggatccacccttttcattttacatcctagaaaccccaaagctacacagtttctttcctaagccttgtgcaaattcccaaacacagtttcaccccgaccgccatgcccaaagcctgggacacagaaaacggcaataggagggtgtttggggtagaagcagggaggcagccctggacagaacccctgggaaggatagcaagctccagccaccctttctgtgcccaacctctgagacagatggtgagatacccccaatccccagccccagatcttggaaactccaaaaacataccttccttgagagatttctcagtggatacttgacacagttgcccatcctaagttgaggcagcccctcttgggatccccgggtccatgaaggaggctcctgggggactgagggacttccgtcccagtctctgccaaccccagcctccctccgtctgtgccgttcttcctccaggacggatgtgagccctctcttgcgcgcgtgctctcttactcgtctgcctgctcctgctctccgattttttttttttttgggtggattgtgtgtgtgtttgtgtgtgggtttaactttctgggcactttcttaaggagatgaaagcagaaggggagagtgcagggcacagggaaagtcacctggagagctgatggcagaggggaaccaagctggagaaggctgccggatcatctacatcagattagcgctcagtcctgtctctggttctctccccttctctcggcccctcctttccccgctgccaaatctgcagggagatggcctcagggaggggggcccagaatggcagctgcggctgggaattaggccagcaggcccagaaagggaagctggctagtttgggttcccgaagccagggtgcctgccgcacagctcccagccttgtgtgtgtgcgcgcgcgcacacacacacacacaaacgtgcatgcacacacacacgcgcgcacaaacacacacacacatgcatgcacacacaagcgctcagggagatgaatgccccttccaaagagcagtgagctggacaagcactcactgcccctggcaattccagctgcattgagagctgcggctccagtcgagagcctgggaggtctggtgacgcctccatcatgctccatttttcacacttgccttgtcactgaaatgggacgaggctcgggggccggcagtgcagatgagccaacagtcagatcagatccttctgctctgtgtgcaatttctctgacccgaaggaaaccaggagatggccccgaggggagcatgacggaggcagcgcaggcagagagggcatgagcaaaaggtctctgaacctcctcctcctcgccccctgcctcatccacagcaaagacctctccccagcttccttggggtgccgggcagagaagaagccctttacgaagcgctcttcgaggtcccacagctggagctttttagatgactggctcttcctcgtccctccagggtcggctttgatatgaattcatctcacgcctcagatgtccggtttgagacctacagccccagccagattccccgcgtgcaagtgtccctgtttcctgcacccagctttttccagcagggggcaccagagatagactggaagcagaactcctcccaagcccattcttgcacgctagctcagttttcagcccggagagcctcctttcccaggaacttttctcccgtgtgggggggctgctcagaactcctgttaggaagatgggtgggggcgctgcccagagggtgctcactcctagggagctgggaaggaggtccctggataactcctggacctccccggtgctgctgctgacaaccacgcaatggtttaatcaggggagttactcagcagccttgtttgggccaaacctctggagggggagatggaggaggaggagcctggggggcgggtattgatgactaaagaacagaaaagagggtgatgatgcgtgtctcctggaaacagcatgaaggaagcaggcccaggcaggggtcagtggactccaatgaatgggaaggacggggaggtctggggttgagtctagctctgccagcttcttttttttttttttttagacagtgtcttgctctgttgcccaggctggagtgcagtgccgcaatctcagctcactgcaacctctgcctcctgggttgaagcgattctcctggctcagcctcccgagtagctaggattacagacgcacaacttcatgcctggctaatttttgtatttttagtagagatggggtttcaccatgttgaacaggctactcttgaactcctgacctcaggtgatccacctgccttggcctcccgaagtgctgggattacagacatgagacaccatgcccagcgctgccagcttctgactgggtggctgcctcccattcctgaacttcagtttccgccactggaaaaatggggcttttcctagcttgcttatatag

SEQ ID NO: 915990 - DNA, 4001 bp, Homo sapiens
tctcactccttccctcctaaaccattcactagcccatcagctacagaagggagaggggatcaggtgagggatggggtcaacagtagagaaatccaaacatggatactgcccttgtgaccccaaagctctggctcaccctagaacccatgacccttgacaagattctttcttccaaaggaggccacaatccccaagctgccacccatgctggaaagcagagaagactggccccaaaatcggtttcaggatagatggagaccaggcaggctggatggcagcttctggctctaaagagtgaaggccctgtccccaaaaggtggagctgggagcaaacagagggaaaaagctggacaaaaagacctggagacaactccttccaccaggctggtcttcagaggatcactgggaagaacccagggaaggaacagagaccagcagtgacagataggctttcaggggaagagaagaggaagagtgcaaacagggaggctctgggaactgggagagaaaagggagagactacacccaaagagacagagcagtggcgagaagaaagagatgtcatgcctggaggttgccagaaagccccgctggaccaccctgtctgcaccccccgtccccaaaaccttaaatgctaagcaacgtccaagaaaacaacttgttaatatggggggagagcggtgagggagaaagtttccaggaagtagggagttacctgactgcctttcaccatcacagggggagctggtgacactcgcggccaaggatggagatgctcggaaaacactgggcaatagtatggagccgcgtgagccaggcacaccctttcatgatctccttcaaacacgaaacagcaaagcccacacaccgcccggctcctcgccgcttccatcctcaggtgctagcccacatgtgggtgcgaatgagaacacacgcggcgtgggcgcgctcggggtcaacagcagtggagaggtgggtgggtgtaggtgagcggcggaggagggagggagagaggaagaaggggacctacagagggggaaccagaggggcgcgctgggcttcacatctgcaccgccgcccccacccgccacctggagcgcgccgcccagggcaggggcgcctggacgagagtggacgccgggcagcgcgagggcgccccaggggcggccgtgggcgccgggctctgccggcgcagggtgcgcgcgcgcgcgctcccagccgcgccccgagccgggcgagggaccccgggcctctgggctccgcggcgccggcgccctctgccccccgcgcggctggccaggcagccgggctctccaggcggacgcgagaaagcgaggcggcggcagccacttggggaacttttcccccctcgcctggaatttcacaggaaacacatgctctggagaagctggggcccggagggggaggggcgggaattttccgctccgtctcgcgcggcggttcgggccccggtcccgccgggctcccgggcgctccgacgaggcggaggcgcccctcgcggacgcggccccgggccactccgcagggaccggccccggggccgcggggagcgcgggtagggcaggaacccggtggaaaaggcagggagccccggcgaggcggcggggtccagccttaccttggtggttttcctctggaatgtacatcctcgtattctcattgaccatggaccaaaaatggttttaataggaggagcagccacgaagaggaagaaatgtgaaaacaccccccggcgggtctggattaatccctcctccgaggccggcggctttcgcgcaagattcgaggaagccgtggtctgcagcgtttcttcttccccgccgacgattacctgattcccattatggcatcaaaccccaaaaactgctcctttccactactgcctcctcgagtgaaactgtaacgcatcctcagtacatccgggccccttccaagaactgagcaccgcacctccggcggctacaccatttgaaaaaataaatcgggagaggcagggcgagaagaggcggagaggaggggcggggggcgcgcggggcccgcctgggccggcaggggccgaggcgcctctgcccactcccagcgagtcctcctgaggcccctgcccggctctctgctgtcaaagggagccggcaactcctgggcgcggaggcaggaagagccgccgccgccgctccgggcccgccgcgccgcgccgagcgccgctctggcaggagctgtttctgcagaggcagcgagagggagacaccgggcgcgcgagagcgccgcgctcactccccccggcccagccccgccgcgcccgcgcccgcccctgcccgcgccgcccgcccgcccgcccggcgcgccggaggcagacgcgctgaacgcttccagatgtggctgcggcggcgcgcagggagccgggcgcacggcgcggggcgcacggcggcggactggagcccgaagtcgggccccctcccggcgcccgcggcagcgccgcccgagcgagccctccgcccgcatgacgtcaaagggagcgggccccggccgccggcgggcgaggggcggcgtgaggagcccccggggaggccggggcgcgcggcgcacccgggcgccagccgcggtggccgcggtggccgcggcgcggacacaccccctcgcgccccgccggcggcgtcgcgccccccgcgccggcctgcagccccccgcccgcgttctctcctccgctgcggcggcgcgtccctgctgggccggccacgccgggaaggcctctgtgagcggaattccaaggaggaggaatacaatttgcccgactaccagagtctcgtttcggatcgggccactgaacaaaacggcaagatgagccgtgattccgtgattctgtttgatcaattataatcagagcggttgtagaagtgacagatagaggaggggaggggaagcgggaggggcagcgaggcggagcctggtaggcgaggcagcggtgcccagatgtctgaacagattcctagacccaggtttaataattccttggaggcagccgagcacgtgttctactaggatatccttacctacttctcttaattatttctgcaactccggcaggaatctatccagcacctctccttcccggagaagcaaacacttccctccatcactccctgcaaccacagcaagttccacggcaccccctgcaggaccgggctcccctccagtggggcttcgtgatccctttcaggggggcctacaactccctcttggggaaaacctctacctgcctccacataagacctcctcgcctccacatccaccctcattccctgggtgaccctaaccattcccgtggctttcagcagctgtctatatcaaatgtctatctccagcccagacctctctcctgaattccagactacagctgactccgtctgatagacatttcaagcctaatacatccaaacactggattcctgatctcttcaaagcctgctcctcctcacacagccttccccatcgcagtcgatgaccatcccatacttctagttgctcagttcaaaatcctggagtcactcttgactcctttctctcatcattccacgtctagtccatcaggagatcctgttgaccctaccttcaggtgaattcagaacctgaccacttctcatttcctgcactgccaccacctggggctgaaccagcatccttcacccaggtttctcctgtggctgatccccctggtctaccttccctctcccctctggtattttctcaatacagcagtcggagtaacccatttaaaacatcacatcccagcactcctctgctcaaaaccatccatggttacccatttcacttagtaaaagccatggtccttgtggtgacctacaggaatggctgagtacaaatccccttacatcatctcctactgctgtccccctcactcgggatacactagcctcctggctgggccccagacactccaggaatgacccctcaacacacacgca

SEQ ID NO: 915991 - DNA, 4001 bp, Homo sapiens
atccccactcttcacaaataccaccctcttttgtgtctcactccttccctcctaaaccattcactagcccatcagctacagaagggagaggggatcaggtgagggatggggtcaacagtagagaaatccaaacatggatactgcccttgtgaccccaaagctctggctcaccctagaacccatgacccttgacaagattctttcttccaaaggaggccacaatccccaagctgccacccatgctggaaagcagagaagactggccccaaaatcggtttcaggatagatggagaccaggcaggctggatggcagcttctggctctaaagagtgaaggccctgtccccaaaaggtggagctgggagcaaacagagggaaaaagctggacaaaaagacctggagacaactccttccaccaggctggtcttcagaggatcactgggaagaacccagggaaggaacagagaccagcagtgacagataggctttcaggggaagagaagaggaagagtgcaaacagggaggctctgggaactgggagagaaaagggagagactacacccaaagagacagagcagtggcgagaagaaagagatgtcatgcctggaggttgccagaaagccccgctggaccaccctgtctgcaccccccgtccccaaaaccttaaatgctaagcaacgtccaagaaaacaacttgttaatatggggggagagcggtgagggagaaagtttccaggaagtagggagttacctgactgcctttcaccatcacagggggagctggtgacactcgcggccaaggatggagatgctcggaaaacactgggcaatagtatggagccgcgtgagccaggcacaccctttcatgatctccttcaaacacgaaacagcaaagcccacacaccgcccggctcctcgccgcttccatcctcaggtgctagcccacatgtgggtgcgaatgagaacacacgcggcgtgggcgcgctcggggtcaacagcagtggagaggtgggtgggtgtaggtgagcggcggaggagggagggagagaggaagaaggggacctacagagggggaaccagaggggcgcgctgggcttcacatctgcaccgccgcccccacccgccacctggagcgcgccgcccagggcaggggcgcctggacgagagtggacgccgggcagcgcgagggcgccccaggggcggccgtgggcgccgggctctgccggcgcagggtgcgcgcgcgcgcgctcccagccgcgccccgagccgggcgagggaccccgggcctctgggctccgcggcgccggcgccctctgccccccgcgcggctggccaggcagccgggctctccaggcggacgcgagaaagcgaggcggcggcagccacttggggaacttttcccccctcgcctggaatttcacaggaaacacatgctctggagaagctggggcccggagggggaggggcgggaattttccgctccgtctcgcgcggcggttcgggccccggtcccgccgggctcccgggcgctccgacgaggcggaggcgcccctcgcggacgcggccccgggccactccgcagggaccggccccggggccgcggggagcgcgggtagggcaggaacccggtggaaaaggcagggagccccggcgaggcggcggggtccagccttaccttggtggttttcctctggaatgtacatcctcgtattctcattgaccatggaccaaaaatggttttaataggaggagcagccacgaagaggaagaaatgtgaaaacaccccccggcgggtctggattaatccctcctccgaggccggcggctttcgcgcaagattcgaggaagccgtggtctgcagcgtttcttcttccccgccgacgattacctgattcccattatggcatcaaaccccaaaaactgctcctttccactactgcctcctcgagtgaaactgtaacgcatcctcagtacatccgggccccttccaagaactgagcaccgcacctccggcggctacaccatttgaaaaaataaatcgggagaggcagggcgagaagaggcggagaggaggggcggggggcgcgcggggcccgcctgggccggcaggggccgaggcgcctctgcccactcccagcgagtcctcctgaggcccctgcccggctctctgctgtcaaagggagccggcaactcctgggcgcggaggcaggaagagccgccgccgccgctccgggcccgccgcgccgcgccgagcgccgctctggcaggagctgtttctgcagaggcagcgagagggagacaccgggcgcgcgagagcgccgcgctcactccccccggcccagccccgccgcgcccgcgcccgcccctgcccgcgccgcccgcccgcccgcccggcgcgccggaggcagacgcgctgaacgcttccagatgtggctgcggcggcgcgcagggagccgggcgcacggcgcggggcgcacggcggcggactggagcccgaagtcgggccccctcccggcgcccgcggcagcgccgcccgagcgagccctccgcccgcatgacgtcaaagggagcgggccccggccgccggcgggcgaggggcggcgtgaggagcccccggggaggccggggcgcgcggcgcacccgggcgccagccgcggtggccgcggtggccgcggcgcggacacaccccctcgcgccccgccggcggcgtcgcgccccccgcgccggcctgcagccccccgcccgcgttctctcctccgctgcggcggcgcgtccctgctgggccggccacgccgggaaggcctctgtgagcggaattccaaggaggaggaatacaatttgcccgactaccagagtctcgtttcggatcgggccactgaacaaaacggcaagatgagccgtgattccgtgattctgtttgatcaattataatcagagcggttgtagaagtgacagatagaggaggggaggggaagcgggaggggcagcgaggcggagcctggtaggcgaggcagcggtgcccagatgtctgaacagattcctagacccaggtttaataattccttggaggcagccgagcacgtgttctactaggatatccttacctacttctcttaattatttctgcaactccggcaggaatctatccagcacctctccttcccggagaagcaaacacttccctccatcactccctgcaaccacagcaagttccacggcaccccctgcaggaccgggctcccctccagtggggcttcgtgatccctttcaggggggcctacaactccctcttggggaaaacctctacctgcctccacataagacctcctcgcctccacatccaccctcattccctgggtgaccctaaccattcccgtggctttcagcagctgtctatatcaaatgtctatctccagcccagacctctctcctgaattccagactacagctgactccgtctgatagacatttcaagcctaatacatccaaacactggattcctgatctcttcaaagcctgctcctcctcacacagccttccccatcgcagtcgatgaccatcccatacttctagttgctcagttcaaaatcctggagtcactcttgactcctttctctcatcattccacgtctagtccatcaggagatcctgttgaccctaccttcaggtgaattcagaacctgaccacttctcatttcctgcactgccaccacctggggctgaaccagcatccttcacccaggtttctcctgtggctgatccccctggtctaccttccctctcccctctggtattttctcaatacagcagtcggagtaacccatttaaaacatcacatcccagcactcctctgctcaaaaccatccatggttacccatttcacttagtaaaagccatggtccttgtggtgacctacaggaatggctgagtacaaatccccttacatcatctcctactgctgtccccctcactcgggatacactagcctcctggctgggcccc

SEQ ID NO: 915992 - DNA, 4001 bp, Homo sapiens
ggggtgacaaggccaggaatgtctcctggattgggcatgaggagggctttgggaaccctgtggaaacagacttgggaggaggtggaagcccggctggagggaaagactgagaagagaggttcggcgggagtgaggacaggtggggccaagtcctgggcaggcagatgaggctgtgtgcaggctgttgtctctggcagcacccagggcttctgcatagatggccgctggggcccccctccctgaaggcctggattccagccaccccgacttggccctcagcccactcctggagttggccctctcctatcagctggtgtgtgttctggggatgaaaattgttctgaacatctcctgcagcaacagatagcgttacgggctggcggcgggtgtaatggtgaaagtgcagtccaggctgacaggagttcaaatcccagcaccttcacttcctggccttgtgaacttggggaagtcacctgacctctcggggcctctgtttcctcagctgcaaaatagggataaaaataagcccccactgaatggctctgcaaactaacggtgtcatttgtgaagcgcccagctccgtgccaggcagggaacaaggagagctatgcggctcgatgggaaacgatgctgcctaatccactggtcagcaaaggctaagcacaggcacggtgtgtcatttaggctccctgtccccactcctgctaagacatgcagttggcaggtggctctgttggtggcctggctatggtgctgggctcaagcggctggagtaaacaggatggggtctgtagcacctacagtctagaaggctctgctacccacatgtattggaaatttccttcctaggaccacctgagctagggcctaaaacacagacaccccagagaggttgcacagtaatttacatgtacaccaaggtgcacatgactgataccgggttctttcctggagccggtcttaatggccggctagagaatcaaggttggaaggaggcagaaaggtgtagaaagggaagactgcggccaccaaaatccatttttttccccagttcctggacaagccacctcctgtgcgcatgagacgttctgtgggttcagaactgcttcccctttttggaatgtcaaaatacgcatttcctgccaaatgcttcggggagctgcgatgctgagataacccggctcctccaggctgcctcatctcagcgattatcctgaaggagcacccgcccttcaggtgtcccagaagctgcttgtcaggccaggaagacagcagccctgatgatcagttcttcctaaagccatccggctcctggggagaggcaggtgggactccagaactcacagagcttttgggaggagaaagaggaggccggagaagcaaagggctttacagcaagagagtggtcagtcgcagccactggggaaaagcccagagggagggcaggggcgggaggagtgggcagaggatggaggcccagcccgggaagaaagtgggaaagggtgaccgggtttttggggtggggttgaacgtgatgcttacgtttccagaggaatcttggcctgtccccacgcaggggacagggaggtgcctagaagcagcagccacaggagggccgaggtcttctgcacaaaggcccaggccacgggcattggctggaggggaatccagcggctgctggagctggggtttgcgaggaagttgggagttgcaggcatggtgggcctggggttggggaggggaaggagggcagagcagccacagaccatgagctctgtctgccttcctcccagaccccaggacgccccaggcctttgtcttccgtgccttggcgagcctggggtctccagcctctcagtcctgggtggggagggcttctctctgccccacagctgcagctcacagaagagtcgccccacctagcaagcaggcctcggagacagggactgggggagaggctgtggcaacatgaaaccctttaatccgctggcctctcctctaatcctctcctgacagcagggagggggtggcagggggtggggagctgcctcccaagattaccacaactgcagctggttccctcagggctatagtgcacccctctgctttaaagaggcagccccgttcctgtggaaccaccttctggacccaggaagggcttgctgtgactatggccagaggacagcagctgagtttgcacagtactctgattgacccacaaatctcttgttgaccctgaggtgggggtgtgtcctcatccctgcttggcagaggctcttgaggcccggggagtcccaggggcagagctgggactctggctggtgtttccaggcctggtgcctttgggacaggtcataggtcataggtgaagtcagtggacccacgcctccacatctcagctgctcgtgggcggggctggggacgcatttgctgtgcaactgatgaagcttcaggacccctgaatccacagactcccccctttcccggagaggccctagcaatgtgttcctgtggccaaatgtttttgtaaaatatgcaaaagttgagatagtttaaccataaccggttgagactgtctgtctctttccatcccaacttctcttccgtctgagggactcttagttggatgatgtttgggtggctgagggcacttgggggatccagttaagaggaaagtgagctggggaaacacttaatctgggcttagtgggatatgctgacatggttcacagtgacttctttgtacagagaagttacctccagctgagtgtaggcagggcttccaggaacactcatcccacaggacatcccaccagcagatgcagcaagagaggctgggccgtgatgtgagcgcacgctgtcacacccaccctggccatgtgtggtggggagggcaaagtaacagtcaggagctcatctgcagaaaatctacaaaaagccacacaggtaacatcgttggtggaggatttggttctcaccaaggcctggccaggacagaagttctctcctgttaggaaaatagtggatattgaaagaatataattacaccgtacattgctttgtgttctgatgagagttacacaaattagaattgatcaaaattcttgtgttgtgagcccaaaccagtagtagtaccacatgggttctccgggggtgaagtcatagattttatgcagtccccgtatcagattattttcttagtgtaactggtgcactgtgtcttcacaaaatctggtggttccagcaaaatggtaagcaaaattgccaccaacgcagagaaatgcttgcagaagcaagtgttctgatgacaaaactcctacacagattcatcaataagtcagtgctgtagtatcagagtaatctggtggcacagttttgtggctgaatacaatgtattttttaaaggcatctaaatgattcctatgaatgccttaatttcacataaattttgtacatgttttgaggattacaaatcaaacacatttagaaaaaatactacagaggcacactgggcagtcaatacataaaaagaatgtaacttctctaggttttgtgaatttggtggaattcaccagcttcttaaaatttgtaatttggaatgatttttaaaactgaataaatattcaccttttttcaacttttttattgtggcccaatatttattgtggcataaaatgtgccatcttaatcatctttttaagtgtacggtttagtgtaattaaatacattaatcatgttgctccaccttcgccgccatctatctctataattcgttcatcttgtaaaactgaaactctgaacccattaaacactagctcccgttccctcctcccccagccgctggcggccaccactctcctttctgtatctctgatgttgacggttctagggacctcacagaagggaagtcatcacatagttgtccttccatgactggctcatttcacttagcacaatgtcggtaaggttcacccacggtgccgcgtgtgtcagaatttcct

SEQ ID NO: 915993 - DNA, 4001 bp, Homo sapiens
agggagagcaaggagccaggcaagagaaagggaagtgggggagggtgatcagagccagagagagatgggagggagcaatgggtcagcaggctgccctccaacaccatccacatgtcagtctgctccttgcaatagcccttgccttctcaccagggatgggaagaacctcctagggccatccagccccacagagaggtttgttttcaagctcaccttggcaccctgggctataccagctgtcccttcaactgtcagaaagaggtgtccaccagagccttgaaaatgatctgatctagcggcaatgtaattagccccagaggccccatggagaattgggcccagaaggagaccagtcccagaaaaggacagttgcctattctgaacatcagcattcatctatcctgggcctggcagtaagtgatgggagaagacttgaacatgaactcctctttccgacccaggggtgctccaacctattggggccccttccaagccatctagtggtccactcctaaggaggccttcttacaggacatttgagggaaagttgtcagctccaaggggctgagaagctgctccgcattcttgccccatctttccaggcactctccctgctgtctgagctccgggaatcactgcttaatgagctgatttgtctcagtgggtcaggagataaaagcaaagaggagaattaaatatttatcggttgcctgtttctctgagcaaagcgcttcctctccatccccaggccctcagctcctctggcctcacctccaggccctccatgctgggcaagagctcaggatgcccgctgcagaggaagcctcagcagggggctgtggaatagatggggctcagtcacctggcctacccatgtgctgggcgcccaggtttcagcctgggagagaaactgggctagagaaagggtgaggagatgaggcaatgcgcagagatggagggggtggaagggaataatggagctcctcaagttttaggatccgtctgtctgaagaggttggcccctggctccctgatgtcctctcagctccctgatgtgtcgtttgcttgaggcacaagaggtctagaatgtctgcctccccaaccacctcggcggctctcctagctgttgtgttcagaccccagaaatccagaatttggaactccagacatggcgtgttccctctccagagcctctgtgccctcggcctccagccctgccttctcccacccctctttcctgggccgtggagccacctgcttgagcccttcccctatactgccccctctctgcacacacccgatgccccagggtctgagtctgggtcgctggggaacgcttggcatgaaaatccatctccccacgttcttagagcgcccccctacaaaccctgccctgccactgaggcgtttttcaaagtcctgaaccggggaaagggttgaagggagaggaggtgtcaccccaacttccccgcccccaccctcatcgtgggcactcaccgcctccgagtcctcaaacccgggcacgtaggagtcgtcatacatgggggagtccgggtcgggggagcgagcggcgccgggggcgggagcggcccggaggcaggggcaaggactgcgggccgcgcccgggagatgccaccgagccccgcagccctgcgggcggcggcagggagcgagagagcgcgaaggagggagcgagccgcgaagaccagctgctcggagctcagatcaccgctccccccaccccacccccccaaacccagccggtcccaccccgagcgcggctgaggaatctggcgccggctcctacaacaatagtgcccgcccacctgaccccctccccgggagaaggcgggggcggcgagggggcggcggccaccggggagcccgggccaggccgggagaggggaacgaacccgtgctaggtggaaggtgggtccccgagcacctacggggccgtggcggcggggaggaaggggaggagaggctgcgggcagggcggatccaggcagggaggaggcggggcgaggagagatgcggagacagagacgctcggcaacccaggaactactccgccgggaaacaaagggctgcggcgggggagggagggggcgctgagaccgcgagggagacgcgacccgggcggagactggagagggcgcaggtgtcgaggaaaccggagagagagaggcagagggaggacggagaggacaggaaaatggggagaccgtgggagacagaagaggcgcgggaacgagcggcagacgggggaggggtcccaggcgacagcagggcgggtctgggcccgtgcgtcccggaggctccgaaagcaaaccccgcagtggtcccggggaggaatgggcttggtgcccccaggctaatgacaggacggcagctcctgccccaacaggtgcccggccccctcagtacggggacgctgcggcaaaggcggtgttgcccaacccttgagaaggggggaactttccgtgagctgggtaggcctccccacacctgttgcacggatagattttgtcttagtcctgccaggatgggggttcccttccccacttccctgccaaggattgtgccagacagtgccaaggcatccgtgggaactggggcagaaaggggctgttttaggtgagcctaaagggaaggggaaagaagccagagggtggaggtagggggatagttgtgggtgggatcctggctacactcgggttgggagaggaaagggccagtctcctcggagtcactagggtaaggccagattctccccttagcagaagggcttgtaccactctgcaccactcagtctcctttacaggagcattgagatttggggtaagagagccgcagcccttatcttgaggaaactttccccaaagatccacccatttgagctctttccttttttcatctcctgagcaaaattccttctttgatttttgactgcctacctttgtgccccacgaggaggatgtgcgtagacaggggttacacttggaggcctcctggtgcccatgctcttggccctgagctcagtccttttccttcccaatttctcacacccgggagttcagcaatctgctcatccctccttggcttgaggagaatcagaaatccaaaactctgacatggcttagtaagatctatggtagaaagcactgtgcatgggagagagaaagcccacccaaaccaagtggcttcccacctgggtcacttatcggtgttatcttggcaagacaaagaagagctgcatcttcagactgacatctttagtctgtctactgtgggtggcccagagcagccctgcccagcaccttcctcatgctgggtttgacaaacaactttgttgcagcccctgtggctgaagggactgtctcctctcctgagtccagcaccaactggggtttggtcatatactggattcttctgtattggaagttcccagacactgcccacttttgtgccctcacccagttacgcagtattccttgtatccccctctttcatcctttctcttcaattccttctttcaggggcctggagaggtgtcaaagagtaagaccctcaaggtgctcttctcctgggagatggctctagtgaagaaagcagtggtggaggcagctgtttctcttcccatccctgcatccactctcctggcctctccttttgggactctctccacccacagaaggtcctggggctgtaggtaacagcggatctgccatcggcagcactccttcctcacactccttgtaatctcctgcgacaaggttgtctaagtctgctcctgaggcatgtgttgccatgccaaccatccccaggagatgggttcaagctcctcatacctgggcccatcccctgggtcctgcagtagcttcagagcttccctccttcttctcatatctctgggttgctacccaatgttcctttcatttctcacccacacctgcctactctagttctaataccaacttggtgacttcttgtcctgtgac

SEQ ID NO: 915994 - DNA, 4001 bp, Homo sapiens
gagctctttccttttttcatctcctgagcaaaattccttctttgatttttgactgcctacctttgtgccccacgaggaggatgtgcgtagacaggggttacacttggaggcctcctggtgcccatgctcttggccctgagctcagtccttttccttcccaatttctcacacccgggagttcagcaatctgctcatccctccttggcttgaggagaatcagaaatccaaaactctgacatggcttagtaagatctatggtagaaagcactgtgcatgggagagagaaagcccacccaaaccaagtggcttcccacctgggtcacttatcggtgttatcttggcaagacaaagaagagctgcatcttcagactgacatctttagtctgtctactgtgggtggcccagagcagccctgcccagcaccttcctcatgctgggtttgacaaacaactttgttgcagcccctgtggctgaagggactgtctcctctcctgagtccagcaccaactggggtttggtcatatactggattcttctgtattggaagttcccagacactgcccacttttgtgccctcacccagttacgcagtattccttgtatccccctctttcatcctttctcttcaattccttctttcaggggcctggagaggtgtcaaagagtaagaccctcaaggtgctcttctcctgggagatggctctagtgaagaaagcagtggtggaggcagctgtttctcttcccatccctgcatccactctcctggcctctccttttgggactctctccacccacagaaggtcctggggctgtaggtaacagcggatctgccatcggcagcactccttcctcacactccttgtaatctcctgcgacaaggttgtctaagtctgctcctgaggcatgtgttgccatgccaaccatccccaggagatgggttcaagctcctcatacctgggcccatcccctgggtcctgcagtagcttcagagcttccctccttcttctcatatctctgggttgctacccaatgttcctttcatttctcacccacacctgcctactctagttctaataccaacttggtgacttcttgtcctgtgacaggacatgtgcctgtcagtgtccatgtagccctaacctcttttctttttcatggctgggcataaagggagagagctgagggcaataaaggatcaggggagaggctcctcctgctgattctttctaggagagagttgttagactggcagctggcaggtacccaagtcatagaagcaagacataagaggaaaagcctgaataatcaggtttgggagctggaatatattgaaaccttcttgggaggtttcagaatatattctagcttctcctctaagtgtaccaggaagctgggcagatcccagtccctgggcactgaatggggaaactgagacagaagctaggccttctgggaagacttaaagactcctccccagcagtttttaagatctggaccaggtggaggcccctaccattctggctgctaggctgccagggaactcagggacaggcgctaggggagcttggcagagcccttcttgtaatctagcccctttttttctggctcctcagtcagtcctctcctctcatccaatcccagtactaggaagctgccagctctggccgctccctcctctctaacccggtgcctcttccacccctggcctcacttcctccggtttccctgcctccccatcggtgcagtctcccccaaacgcgtgcccccttcctagcttggagcggagctctcctcccacccagtggggaacccccttcccacgaccccacaccccccccacggttacctcgttcagcaggaaggttgcactggagtcagaaaaagacatagaccaggctagcggcctctccccctcccccgggccaggggctccgaggcgggagcaaaacccggccgctgctctgcacgctgctcccgcctgcacgcctggcctcgccccacgcccgccgggctccgccgcctgctcccttccctctcccctggttccctccctctttctcctccctcctccctccctccctctcccttcctttctcgccgcctctgtcagtctctggctctccctgcctttcagcccagcctctctccacttccgtctctcctgtctaaggtcctcgttctgtttttccgtgtgcctcccactgtccttccatccccacgtcgcaccctcgctcctcggcttcccctgccgctctgcttcttccctaaagtcctcccgagaaagagtagggactctggagtttccgccgccgcgggcagaagggcaggaagagctccagggctgccccagctcctgagctcttggcggaagcttctgctccctcccggccctgctccgtgcgccggccgcccatcctccggcggcggctgcgaccccgacctcggcgggggaaaggaccgaaaagcaagagtgctggtgctctgctcgcccgcccaagcgtcaaggcgcccatccacccgtccccggctcggctctgtgtctccagagggatcggcatccctgtggagagagcccagctgggatcgccccgcgcccgcggagtctctgccgtctcccccctctcctgggttctggtgcagcgggtctcagctccgcgaaggggaagggcgaggcgaagcgacgcggctccttctcgacccgctgcagcgccccttgggctcgctggcccggcggctacacgcgccctccaggtggcggcaccgcctggtgtccggtcccggggccgcagggtccggccctgccagcaggcggcgctgcccaggccagagcaggggggacgcaccccggatccagacaccgcccaagcccaggacgaacccctctccccctcctttctccaggaactgcagtcccagctcgagacccccagtaggagaccccaggctgcgctctacttattcccaccccgtggggctccttcgagacacccgcgcccttccgggaccctagcccgtccctacctccatcctggtctcgaggggcgccccagctaagccgggcagcgtcctggccgggactgggcagcagggagtacagagtcgcgggaccgctcctcgggtcagtacccctcccgcccctttctgcgggtgcgtcaaacaggacaagcccaagttctggcgggggaagggggagcgggggtgtagttccagttggctctctctctggacccttctgagcggacagaccgctcattggtcccttcacacccccaacgaccccaggctggacccttctccagaccaaagacggcgcctggggcggggagagacggaccccccttcatggagacagacacacgctgactccgattgacccaggtccccaacttcccctcagcattaactagaacgctctcccctttccagtggagggcgtcccacccttcttcccggcccttcttttaacccacttcccctgggagtttccgggacccctcccctcaatcctcccatccccgggatctcgggagactgttcctccctctctgctcagctgaccctccacttgcccccatttctgagggaggtaagttgggggagagtaaattctctctccactccctcctcccgaggctggatttaacctggaaagtgctttgagaaggcacctcctcccccactccctctgtagtctagtctagtgggtcacggagcccctaccacccacccacctccaagttgctcagcttcgaccattcagaggaaagaagttatgttatttgtgtgtgttaaaaatgcgtgtggaggtttttatggttttgttttgttttgactctagtagagggagcaaacgctttgcctttcatttggcaagaagacctggagggagagagggccctccccacctacactcccctgctgaccacagctaatggactagctccgctgggccctgcggcagcttaagtttccataggagaagggaggtggggagagagggg

SEQ ID NO: 915995 - DNA, 4001 bp, Homo sapiens
cttttctttttcatggctgggcataaagggagagagctgagggcaataaaggatcaggggagaggctcctcctgctgattctttctaggagagagttgttagactggcagctggcaggtacccaagtcatagaagcaagacataagaggaaaagcctgaataatcaggtttgggagctggaatatattgaaaccttcttgggaggtttcagaatatattctagcttctcctctaagtgtaccaggaagctgggcagatcccagtccctgggcactgaatggggaaactgagacagaagctaggccttctgggaagacttaaagactcctccccagcagtttttaagatctggaccaggtggaggcccctaccattctggctgctaggctgccagggaactcagggacaggcgctaggggagcttggcagagcccttcttgtaatctagcccctttttttctggctcctcagtcagtcctctcctctcatccaatcccagtactaggaagctgccagctctggccgctccctcctctctaacccggtgcctcttccacccctggcctcacttcctccggtttccctgcctccccatcggtgcagtctcccccaaacgcgtgcccccttcctagcttggagcggagctctcctcccacccagtggggaacccccttcccacgaccccacaccccccccacggttacctcgttcagcaggaaggttgcactggagtcagaaaaagacatagaccaggctagcggcctctccccctcccccgggccaggggctccgaggcgggagcaaaacccggccgctgctctgcacgctgctcccgcctgcacgcctggcctcgccccacgcccgccgggctccgccgcctgctcccttccctctcccctggttccctccctctttctcctccctcctccctccctccctctcccttcctttctcgccgcctctgtcagtctctggctctccctgcctttcagcccagcctctctccacttccgtctctcctgtctaaggtcctcgttctgtttttccgtgtgcctcccactgtccttccatccccacgtcgcaccctcgctcctcggcttcccctgccgctctgcttcttccctaaagtcctcccgagaaagagtagggactctggagtttccgccgccgcgggcagaagggcaggaagagctccagggctgccccagctcctgagctcttggcggaagcttctgctccctcccggccctgctccgtgcgccggccgcccatcctccggcggcggctgcgaccccgacctcggcgggggaaaggaccgaaaagcaagagtgctggtgctctgctcgcccgcccaagcgtcaaggcgcccatccacccgtccccggctcggctctgtgtctccagagggatcggcatccctgtggagagagcccagctgggatcgccccgcgcccgcggagtctctgccgtctcccccctctcctgggttctggtgcagcgggtctcagctccgcgaaggggaagggcgaggcgaagcgacgcggctccttctcgacccgctgcagcgccccttgggctcgctggcccggcggctacacgcgccctccaggtggcggcaccgcctggtgtccggtcccggggccgcagggtccggccctgccagcaggcggcgctgcccaggccagagcaggggggacgcaccccggatccagacaccgcccaagcccaggacgaacccctctccccctcctttctccaggaactgcagtcccagctcgagacccccagtaggagaccccaggctgcgctctacttattcccaccccgtggggctccttcgagacacccgcgcccttccgggaccctagcccgtccctacctccatcctggtctcgaggggcgccccagctaagccgggcagcgtcctggccgggactgggcagcagggagtacagagtcgcgggaccgctcctcgggtcagtacccctcccgcccctttctgcgggtgcgtcaaacaggacaagcccaagttctggcgggggaagggggagcgggggtgtagttccagttggctctctctctggacccttctgagcggacagaccgctcattggtcccttcacacccccaacgaccccaggctggacccttctccagaccaaagacggcgcctggggcggggagagacggaccccccttcatggagacagacacacgctgactccgattgacccaggtccccaacttcccctcagcattaactagaacgctctcccctttccagtggagggcgtcccacccttcttcccggcccttcttttaacccacttcccctgggagtttccgggacccctcccctcaatcctcccatccccgggatctcgggagactgttcctccctctctgctcagctgaccctccacttgcccccatttctgagggaggtaagttgggggagagtaaattctctctccactccctcctcccgaggctggatttaacctggaaagtgctttgagaaggcacctcctcccccactccctctgtagtctagtctagtgggtcacggagcccctaccacccacccacctccaagttgctcagcttcgaccattcagaggaaagaagttatgttatttgtgtgtgttaaaaatgcgtgtggaggtttttatggttttgttttgttttgactctagtagagggagcaaacgctttgcctttcatttggcaagaagacctggagggagagagggccctccccacctacactcccctgctgaccacagctaatggactagctccgctgggccctgcggcagcttaagtttccataggagaagggaggtggggagagaggggatgttggcccaggcaagcagttgtccctggcttcccgcaaccttctctccttccctccctccacattctctgcctgaaactatagcatagaaaccatctctccaccttccactttatttttatttatttatttatttatttttgagacggagtctcactctgtcgcctaggtcgcagtgcggtggcgatctcggcccacagcaacctccgcctcccgggttcaagagattctcctcctcccgagtagctggggctacaggcacgccaccacaccaggctaatttttgtatttttagtaaagacgaggtttcaccatgttggccaggctggtctccaactcctgatctcaagcgatctgcccgcctcggcctcccaaagtgttgggattacaggcgtgagccacggtgcccggcccaccttccactttaaaatagaaatatcagttacttctccctgaggttggcgccgaggctcacgcctataatcccagcactttggcaggccgaggcgggcagatcacttgaggctaggagttcaagaccagcttggccaacgtggtgaaatcccatctctgcaaacaatataaaaattagccgggcatggcagtgcacacctgtggtcccagctacttgggaggctgaggcagagaattgcttgaactcaggagacaggccgagatcgccctactgcgctccagactctgggggacagagtctctgtctcaaaaaaaaaaaattactcctccatgagcctatcacaggaaatctgaggtgcacaggggcagttccccaccccttacttttctcatttccaccccagctgctggaccacaggccccttctccatcttgctctgcagagaaggtaggaacttcagagctagagccagcagcccatcctccaggtccccagaactgccctctcccaggcccttctctgtgacgtgactggcaggattatccttctccagggcctgcccaagacgcatatcctcttcctccccactcaagctccctcagggccttcatctctggctcaaacctcatagtatctgggcagggcaccctgctgagaggggcctctaccctggatccattcctggaagctatgccctctaacttggcccatataggctctgagctc

SEQ ID NO: 915996 - DNA, 4001 bp, Homo sapiens
cttctctaattttgctcccaaaaggacactgacggggacagagcctgggatactgcgacttggtcgacagcctccatttctccatcccatctcccacacatcctggctcttgaatacaaaatccaactgaggtgtggggccctctcattgagagaggtgtccttacctactcctaagcttgttgacccagctgtatccaggaatgagttatgacatcagaaagcagcaactaatctctgaaaggaatggttgagttttcagagctagaatatggctgggggtcgaggggaactgagcccaaatccttaggctcctgagctctcagctcttttcatctctctgagctgcctacccccatgaattctagggaagcagaaagcttctgctggcatccaagagacaaagggaaggggaggatataaggaaagacaggttctgtcccttgacttattattccaggaagtcaagaattctggaggcggcaacttcaagggtggagtgaggcgcttagcaggaacgtggtgggggtggggagatggaatgtgggggcctggagccaggaaagccccaccccagggcagggaacagactagaaagtgggaagtaaggggccccaagaagtggaaatgtatatttaacgttgaggaaaggggagatagttcaaaaagaacctaacattcttctctccagactgtgcctgcagcaggactagaaacctactggtttcactttagtatttctctcctcattttctctctgctcccctcagcctccatccttccatctgtttgtattggtagctggagacacactacaggatggggttgagaggaaggggtgttccaagttagctggggagagttaattggaaaatatgagggtggggtgaggacagataacaataataacgatcaaaagaactcctcagtccagggctgtgagatggccctcttattcatcactcctttccagcccactaatctatttcctgtgtcactcacagctgacatgtccaaccagccattgtcactagtcatatgcacgcccccaaacatcacaaacccacaccaggctgaagtccaggggacaggaactttaaaagaaaacagaaactcagtggataaaggtgagccagcaacacaaaaaggagcaacttctgtcccccaaataggtagaacaaaaagttttttttaatgttcatctccctgaaaaattcctggttgaaactaatccatgttttctccaaatgcaattcttccagctttctaagggtgggggtaaattgtccccaaagatatacctggagaaccctaaaatacaccccacaaagaaaatccgtaacagctgtaaacgttcttcatgtccgaaagaaagttttgggcacctaagatgtaggtgtgtagcctgattcagatgttcacatgatggggcggagagcgggtgtcccatcccctactctgtagggctctagagttccttgacattctacaccttggaaggtcccccttcctccccagggattcagcgtcgtaaaggcctttggatttgcgtaggggagagagggaagacgtgtaggggacacgtcttgcctgggagcgaataagcagatttcagctcccttgaagggatcagctttatagagacgcattgagaagaaggagaggacgacgagggggcgccccccacccccaatcagagtccccttgaaaccaagaactccccaaacagcgggggtggcttctccagtacggaaagggttacaacccaaacgctcctgtattccccttcgacagttcccttacgttatccttccccaaactggaaagtggggtgaccctcccctcccataagatcgcccccaattaggccaagtttcttacccaacagacggatcagctgttcccctcacctttcaccaacaacaaaaacagcactccgacttctggaggggagggagaagagtgggcgcgagggcttctggggtttgtggttcttctgcgcccttttgccgctgcgtgctcggatctaggactatacatcccagaaggctgcgcgcaaggagggcggggaagagggcgtccgtgacggcggcctcaccgcggcatcctgggaggcgtagttctcactcctatgacagaaaacgagggtgtggccagcaaaggacttcaaggcccatgatcccttaggagggggccggctgcattaggggtggctgctggtttgtaacgtgcgttgttgggggctggggaggatttacggctctaaagccttccatataacgctttaacggtgggcagagcggtttctgttgcgtcccgtcctgtacttttcgcacccacctgtgagataggcgttaagcgttatgcacgctttatagatgtagaaagtgaagtacggttaaggaggcggtgtgaagtgtcaaagctatgaaatgtagaactgcattagccttggctaattccacgtcatatattcttgccactacaccacagctacccaccattttggggatgggaaactgatagctggggtatagcagtttcttctttacttcaatctcagggacagaccttgtaagaatgatgtcttctgcacagctgaccatttttttccaacttgaggatttcagtgctaaggggcctgaccatatccacatctggactgggctcccccagagtggcttctgggtctaggaagaggatacaattgactgaggtggtggtaggagcggtggaatgagaagaatgaaattgaaaagggagcttggcataattcaggacctgtcacaattcacaaacaagccacttatggggcctgtttgcccaagccttttaagtggcttaaattaattaggataacaatacatgttgacgttccggtttttatttaggagaggtgaaagattgacacgtctcccacaccccaagtcacgttatagacttgggcatcctgtcccccctctcgctattctccatccctgtagtcggaggcattcagaattacctctttctctggctctgcattaaaggattacagtcttaaggattgatttcctcttcctaggtgcctgctttaattctctactgcactaagttatggagcttctgccttttccaagttttttggtagtgttttgcttttatgactgaatgcggtgtctgccctcagtgtctttcatctgaagatctccaggcacttaaaaattagttactgggctgcacaaacattaaggtgatgtgtctgtgtcattagtcaggatttatgagttagggaaccagtttctggatgaggaggtagctcaaggtctggagtgggttaagagtgaggtctgttcaaggacccaagtctcaagagttcttggctcttgtcttccgcccaaaataaaggtctacgagaaaacagtctcggagctaaaaatggtaacaacttccatttcttgggtgcttatgatctgttcaaactatgctaagaattttcccatttaatacaacaggcttatgtaatacgccttgttattatccccattttacacatgatgagattgaggcacaattaatgacttgcctggagtcatccagctagtgagtggcagaatcaagatttaagcacaagcagtcaccatactcccagtccagaaactctggcatgtgatactaactcccattgttctaaggaacagtgctggttcattaacaggagacaaatgttcactgagcatttatgtgctcagtgcaaggcacaaagtaatgtgaaacagattcattcaacaaatatgtggcaggtactatgctaggtattcagttacttttattgaaagaatgaatagtaaatattcattattttaaaataatatatgtaattcattattttaaaataataaatgtaattcattattttaattatagtcattactttcaaatattcaagtatttgaaggatagattaaatttggatagtttggcaagatggggactggggagggtaagcttcttctaggccaa

SEQ ID NO: 915997 - DNA, 4001 bp, Homo sapiens
ggttaaaattccctacgttgtaggatttggtaggcattaaatgagataatgcatgtaacacatagcacagaatctggcaggcagcaagaactcaatagatgttagtttttaatactgttattattattattgtccagggccaggtggcagctcatgcctgtaatcctagcacttgggagactgacgtaggcggatcacttgaggtaaggagttcaagaccagcctgaccaacatggtgaaaccccttctctactaaaaatacagaaattagccaggcatggtggtgggcgcctgtaatcccagctactggagaggctgaggcatgagaatcgcttgaacccgggaggcggaggttgcagtgagccaagattgtgccactgcactccaccctgggcaacagagactccgtctcaaaataaataaataagtattcttattattatccaagttaggggctcatcaaatgatggctattactcttcattacaaaaatatgttttgcgtcctcatcaccaatgcctgcttcctccataggaagggtgtgtgtcaccaatgcctgcttcctccataggaagggtgtatgagcagcagtctggaaggggtatgtggggcttgccctaaagctgcatttgcatggcatgcacactatttattctgaaactgcatgtttttgtggggtgattagggaagagggtggctaactcccccaaagccctccccttgttgcagcccccgcctcctccaaggaacaaaggagcttatggggacataaagccatcctcttctctctcctctgggggcagagctaggggagggggagtggtaaatggcagcacagctctagggcacctgaagtttctatcccctgcgtggagactccaaacaccaggctggggaaggtaaaagtagcctgtagggagatggacgctgcaggtcccatccggaggccaggtatccctctcttgctgatagcactgagacgccctccccaaagctcagccttctcggggagatcggaggggctgagctgcatcctgtccagcactaagtgagagtggccaggagggcaggctggcagagctgtgaaagcacccacttccccagctaggcagtgcaggggctgggggaaagccaggaaaagctcaaggctgggtcgggtggcaccccaggcacagagccccaatgctgagaggggctgggtccagtgtccctgagagtcaggcggacgcctctccgcattcacagcatactgcaaccccgaggtgaatttaggtcagaaggaccaagcctgtgaggctccggctgagagaagaggtgcggtgggggtggtcaaagggcagaccgaagacagccaaaggtcccctaggtccccacaactgctggcctagggtcctgccacctggtgtccaagccaccagggcctgggtttgccccgagacaggcaggctgcggggtgggggtgctccaagtccgctggtcctctcttccccggaacgctccagatttccccacctgtcaaacgcgaggggctgggcctaggccgcctccacgaaccctgacggacccggcccccggtgaccccggttccaaactccaggaccgcccctgccacccggacagggcgcggcccagccgaggaggccatcccgaggcccagggcgcccagaggacgcgggggaagggctgtcggggaccgtgtccctccacgtggcggggcgtggggaggcgcacgtggggtccctccgtgttgggagccccaggccagcctccgggctttgtgtgccatgccggcggcggtcccccgcctcgagagggaaacggagcgggcgcccggggccgcggcggctgcgtcccttgccccgggcccggctaccgccagctcacctgggctccgcgccgccgccgcctcccgcgctctgcgcccccagctcggctcggctcggctcagcttgctctgcgcggccgcgcgctcctctcctccgcccgggcggcgggcgcgcggggggcgggggcgggaggagccgcccggctcggcttgggcgcgtcgccgccccgggcagcgcggggattggccacggcggcgggaaacccgaaagcggaaccgcccgcgcccgccgcgcaccgccccctgcgcgcccccgccggctcggccctgcgccggggaggggtggggaggcgggagcctgcaaagacgaaagtagcgaagaggcgaagggcaaggagcagaaagggaggaggcgaagaacgggggaagagaggcccggccgggaggatcggaggcggctgggaggagagcctggaggggcgcggagcgcaggaggtggcgccgcaactttgtacccgctcgcccgcggcgcgcacctgcccaggttcttcccgcggcgccctcgggcgggccgcgccggcagcgcttgctttgtttagccaaatgccggggctgcagggcgcctccgggctgaccctgggaaagttcccccaagccggcaagaacacccggggcccctcctgtggcgacccggctgctgcccctgcgctaggcgccgggcggtggatgcggcctggactttgggccaccaccgactcgggggagcccccttccgcagctgcctgccgactgaccacttgctcagggccggccctaaaggctgggggaaggcgttcctctcccatccccagcccacctggatgcaccattgaagttcattctggcttttccagatggctacttagatgctttttgtgaaatacagcatattcttcccattctcccctttttggcacttactttgctggagccttaagtgtgcgttggatcccccagctggataacagcactgtgcggggaagaggagaaacgaagacctggagggctccctgaaccgtcctacggggtcgagcgacccaggggatgtctcactgaccctgccaaacagccaaaagggaatcgagttgacaggagagtcaacctccaagttaataaaaggttcaaagccctctagttaactgggtggatttccagcccgttccgatgtgcttctcttgtatttctaggccgtagggacactcacatgcaacgagccaatgagagctccaccccgactcccttttttttttttttttttttcttttctgaaacggagtctcgctctgtcgcccacgctggagtgcagtgacgcgatctcggatcactgcaacctctgcctcccaggttcaagcagttctctgcctcagtctcccgagtagctgggattacaggcgccggccaccatacttggctaatttttgtatttttcgtagagatggggtttcaccatgttgtccaggctaatcttgaattcctgacctcgtgatccacccgccttggcctccgaaagtgctgggattacaggtgtgagtcaccgcgcccggcccactcccatttttttttctttgttttttttgtttgtttgtttgtttgtttgtttgtttgttttgagacagggtctctctgtgttgcccaggctggagtgcagtagcacgatcacggctcgctgcaccctcgacctccccaggctcaggtgatcctccagcctcagcctcctgagtagctgggactacaggcacacaccaccacacctggctaattttttctattttttgtagagacagagttctccctatgttgcccaggctggtctcaaactcctgggctcaagtgatcctcctgcctctgcctcccaaagtgctgggattataggcatgagccaacatgctcggccatccacctcttctgatgttactcaacgtgcatgcatttgctggaaatggcaaaaacctgaggccgggcatggtggctcacgcctatgatcccagcactttgggaggcccgggcggagagatcacttgaggccagaagttcgagactagcctggccagcatggtgaaaccccatctctatcaaaaatacaaaaattagcccggtgtggtggcggtgcccgtaatcccagctactcaggaggctg

SEQ ID NO: 915998 - DNA, 4001 bp, Homo sapiens
tgcacagtggctcatgcctgtaatcccagcactttgggaggctgaggcaggtggatcacctgaggtcaggagttcgagaccagcctggccaacatggcattaccccatctctacttaaaaaaaaaaaaaaaaaaaaaaattaactgggcatggtggtgcacacctgtagtcccagctactcatgagctgagggaggagaatagcttgaacctgggaggtggaggttgcagtgagccaaaatcacgcaactgcactccagcctgggcaacacagcaaccctctgtctcaacaacaacaacaaaaaaaagcccctttagaaaggcatcctgatgttgggtcttcttccaattaaattcattcgttccttcaacaaatatttttgcgctcctactatgcaccaggtactgtgctaggctctggggatgggatagggtgtggaggtggatgaaatgatcctatggagcttacgttctggctgggtggagacaggcaataaacaactaaaccaacgcacagataatcagatgctgattaacgttatgaaggaaagcaaatagggccatggggcagagagaggctggagggtgctttagggatggtggcccgggaagccttttggaggaggtgatactggagttgagacttggacattatcggaataggccttacaaagttggcatggggtggtgggggaggtggttccaagcagaaggaacagcgagagtacagacccaaggcaagagcttggattccgaggaatgtgaaggcaggaacagagggagcttagggagctggcagcagaatggcaggagggatgggaaagggtcagaccacacagggccctgtgaaccctggtgaggatctgagttctctgtatccccgcagggtttacggtaagggtcctgtgagaaatgcacagcaagtgctgaacccagtgcctggtgccaacacacgctcggccaggcgggtcgtcgccaggctctcagtgacccgcctcattccatcacaccttcgcccacacctcagtctctttgctggaggctccctccggccctgcaactgctctgtccacacccacagggggtcacacacacctgccccagcagccctcacccatgagtataaataccccagctcccttgcccctggtgggatgactgaggctgctgctctgtgctgttccccagggtcccacggaaggaaaaagccccagcggcccacactccacactggtaatcggctccatgacccaccctttgctgactgccttcccttccccatgctgattcacgacccccctagggcccctttttggccccagccgcccccaaggttccctggagtcaactcctaggtcaaccgtggcactcagatccttctgggggagcccaaccttccacagaggccctgctgggggcagggaagggcaccagggacccctaggacctggctcaccaccggctcacgcacctgcatacccgtgatggagacgtggtgagactccactgtcggccgccggggcagccgaggcgaggactgcggggagctgacgggtgagtagggcagggacgggcagatgcagcgtccgttcatgtccaggctgccaccggctgccagcccaccctgggaccgctcttgcagagacagcttgcgaccggagaggtggggccgggcctgggacccggaggtgtcaagggggacctcttggccatcggcctccaggggccggtcccgcgccaagccgaggtccacagcacagcccggctcacactcggtgaccacaatgaaggactccatgcccaggtggatgctcaaggatgagaggccccgcagggcctcacagggcttctggctttcgctgctgctgctgcccctgccccccagctcatcctggggggcggcccggttgctgctgggctggctagagacacatgatgacatggtgcatgcgccagcttcatccagcacactggggcactcccatccggcagcggagccacctgcagaaagagaaagggtcagctggcccagctcctacgggcagggacaggaaaggatcccctctcctcctggcccaggctgctgtctaattcctgcctccagttgacatcctaaaaaaatcttgcaaaacatggtgtgatctgatctctgagtctatacagaaaagcagagtctgcatcttcttatattttttcttttattattttttctttttttttcttttttttttttttgagacaaggtctctccctctctctgttgcccaggctggagtacagtggtgcgatcatagctcactgtacccttgaactcctaggctcaagtgatcctcccatctcagcctcccaagtagctggaaccacttctcacataccatgacaataattcctaactcaattcctataggaacaagtataagaaaacccccaaatagagcacacatatcccctacagaattgacagctgcttccagctcaagccaattgttgctcggcaggaatctgggcctactattgctggtcttccctttgtttttcccaagagaagccctaaggaggttaataagtttgcctgactttttatttttaaatgctgggcattaacaatgcaggtcagggctggacacggtggctcacacctgtaatcctagcattttgggaggccaaggcaggcagattacttgaagccaggaattccagatcagcctggccaacatggtgaaacctcatctctactaaaaatacaaaaattagccgggcatggtggcgtgtgcctgtaatcccagctactcaggaggctgaggcaggagaatcgctggaatccaggaggcggaggttgcagtgagccgagatcatgccactgcactccagcctcagcaactcagcaatagaccaagactgtctcaaaaaaaaaaaaaaaaaaaaggtcggggggaatcaagtatatgccacaatatggatgaacctctaaaatattatgctaactgaaggaagccagtcacaaaaggtcacatatatatgattctatttatatgaaatttttaaaatatgcaactccacagagacagaaagtagactaatggttgcctaggactatgggggtggtgacattagtgggtgtggggaatggctgcttaatgggcacaggttttccttttggggtgatcaaaacgttttgaaactagatagaggtaatggttgcacagcattgtgaacgtactaaatgccactgaactatacacttcaaaatggccaacttatgttacatgaacttatatctcaattttttaaaaaaggccaggcacggcagctcacgcctgtaatctcagcactttgggaggacagggcgggtggatcatgaggtcaggagttcaaggccagcctgaccaacatggtgaaaccccatctctactaaaaatacaaaaattagccaagtgtggtgatgtacacctgtagtcccagctactcaggaggctgaggcaggagaatcacttgaacccgggaggcggaggttgcaatgagccgagatcacgccactgcacttcagcctggatgacagagtgagactccatctcaaaaaaaaaaaaaaagagagagaagtcggacacagtggttcatacctgtaatcctcccagcactttgggaggccaaggcaggtggatcacctgaggtcaggagttcaagaccagcctggccaacctggtgaaaccccatctctactaaaaatacaaaaattacctgggcatggtggtgggcacctgtaatcccagctactcgggaggctgaggcaggagaatcacttgaatccgggaggtgaaggttgcaatgactgagccgagatcgcaccactgcactgcagcctgggtgactgaacaagactcatctcaaaaaataaaaataaaaaagattaacacatccccttaggctgtcaattcttaccgtctctgggacagaacattaacctttgcttaacgtgtttgacaaattctgctggacaaatgt

SEQ ID NO: 915999 - DNA, 4001 bp, Homo sapiens
ctgacggacccggcccccggtgaccccggttccaaactccaggaccgcccctgccacccggacagggcgcggcccagccgaggaggccatcccgaggcccagggcgcccagaggacgcgggggaagggctgtcggggaccgtgtccctccacgtggcggggcgtggggaggcgcacgtggggtccctccgtgttgggagccccaggccagcctccgggctttgtgtgccatgccggcggcggtcccccgcctcgagagggaaacggagcgggcgcccggggccgcggcggctgcgtcccttgccccgggcccggctaccgccagctcacctgggctccgcgccgccgccgcctcccgcgctctgcgcccccagctcggctcggctcggctcagcttgctctgcgcggccgcgcgctcctctcctccgcccgggcggcgggcgcgcggggggcgggggcgggaggagccgcccggctcggcttgggcgcgtcgccgccccgggcagcgcggggattggccacggcggcgggaaacccgaaagcggaaccgcccgcgcccgccgcgcaccgccccctgcgcgcccccgccggctcggccctgcgccggggaggggtggggaggcgggagcctgcaaagacgaaagtagcgaagaggcgaagggcaaggagcagaaagggaggaggcgaagaacgggggaagagaggcccggccgggaggatcggaggcggctgggaggagagcctggaggggcgcggagcgcaggaggtggcgccgcaactttgtacccgctcgcccgcggcgcgcacctgcccaggttcttcccgcggcgccctcgggcgggccgcgccggcagcgcttgctttgtttagccaaatgccggggctgcagggcgcctccgggctgaccctgggaaagttcccccaagccggcaagaacacccggggcccctcctgtggcgacccggctgctgcccctgcgctaggcgccgggcggtggatgcggcctggactttgggccaccaccgactcgggggagcccccttccgcagctgcctgccgactgaccacttgctcagggccggccctaaaggctgggggaaggcgttcctctcccatccccagcccacctggatgcaccattgaagttcattctggcttttccagatggctacttagatgctttttgtgaaatacagcatattcttcccattctcccctttttggcacttactttgctggagccttaagtgtgcgttggatcccccagctggataacagcactgtgcggggaagaggagaaacgaagacctggagggctccctgaaccgtcctacggggtcgagcgacccaggggatgtctcactgaccctgccaaacagccaaaagggaatcgagttgacaggagagtcaacctccaagttaataaaaggttcaaagccctctagttaactgggtggatttccagcccgttccgatgtgcttctcttgtatttctaggccgtagggacactcacatgcaacgagccaatgagagctccaccccgactcccttttttttttttttttttttcttttctgaaacggagtctcgctctgtcgcccacgctggagtgcagtgacgcgatctcggatcactgcaacctctgcctcccaggttcaagcagttctctgcctcagtctcccgagtagctgggattacaggcgccggccaccatacttggctaatttttgtatttttcgtagagatggggtttcaccatgttgtccaggctaatcttgaattcctgacctcgtgatccacccgccttggcctccgaaagtgctgggattacaggtgtgagtcaccgcgcccggcccactcccatttttttttctttgttttttttgtttgtttgtttgtttgtttgtttgtttgttttgagacagggtctctctgtgttgcccaggctggagtgcagtagcacgatcacggctcgctgcaccctcgacctccccaggctcaggtgatcctccagcctcagcctcctgagtagctgggactacaggcacacaccaccacacctggctaattttttctattttttgtagagacagagttctccctatgttgcccaggctggtctcaaactcctgggctcaagtgatcctcctgcctctgcctcccaaagtgctgggattataggcatgagccaacatgctcggccatccacctcttctgatgttactcaacgtgcatgcatttgctggaaatggcaaaaacctgaggccgggcatggtggctcacgcctatgatcccagcactttgggaggcccgggcggagagatcacttgaggccagaagttcgagactagcctggccagcatggtgaaaccccatctctatcaaaaatacaaaaattagcccggtgtggtggcggtgcccgtaatcccagctactcaggaggctgaagcacgagaaccacttgaaccgggaggcagagagatcgcaccactaccctccagcctggacgacagaccaagactgtttcaaaaaaaaaaaaaaaagtctgggcacagtggctcacgcctgtaatcccagcactttgggaggccaaggtgggcagatcacgaagtcaggagttcaagtccagcctgaccagcatggtgaaaccccgtctctacttaaaaaaaaaatgcaaaaattagccaggcatggtggcgcgcgcctgtaatcccaactactcaggaggctgaggcaggagaatcgcttgaaacccgggaggcagaggttgcagtgagccgagatcatgccactgcactccagcctgggtgacagagcaagactccatctcaaaaacaaaacaaaacaaaacaaaaacacaaaaaaaaaaccacctgggaacaacttcctatatgttcatcaaaggaatggataaatgaaactcattatagttgtttgatggaataccatctaatagataaaaggggtgcactggatctgtactgacataaggaaatcccaaaaacataatgttgagtaaaacagcaagttgcagaatacaacatgatgtacaatttgtgtgtaccttaaaatcccatgcagtagatactgttcatggacacatgcttacatacaagatttttaaagtcaaagagaagaatatacattaaattcatgacagtgtgccacaaagaaggaaaaaagcacagaacgggacagggagcataaggaatgttgtaaagttttattccttttagtacttataaatggctgtgaggcaaatggcaaactgttagcaatagtcaattctgaatgggggatgcatagtcccgtatttttctatattctcatatttccccccccccccccaaaaaaaatatgtatcaggcctggtggagattatctggggcactttaaggcagggtcagcaaactttgtaaagggccagatagtaaatattttaggctttgcaagccataggctctgtaatgcagctactcaaccctgccatcctagcagccacaggaaatagtaaatgaatgcatgcggcagtgttccaataaaactttatttacagacactgaaaactgaatttcatatgattttcataagtcacaaaatattactgttttggtttttatttaaccattgaaaaatgtgaaaggccaggtgtggtggcttacacctacacgcgtgattacaatcttagcactctgggaggccgagggggcaggatcacttgagcctagaagtttgagaccagcctggacaacatggcaagacccatcttgacaaaaagaaaaaagaaaaacgtaaaaaccattcttagcaggccataaaaaacaggtggcatgacagatttagcttatgggcaataaatagtttggcaaccctgctttactaaggtaaccaaaatagatttgggtgtcctttcctgttactggatgtcttttcctggtacttgttaaacaattctgtatgtttacatcatgttactaaattgcctgtgttttattagaaca

SEQ ID NO: 916000 - DNA, 4001 bp, Homo sapiens
caatccgtaaaacaacacaaaacctttatttcccccaagaatcttaattttggccctagaactacacaaatctaaaacacacaaaacaaacatgtcacctccaaaaagttacaatactaaaatttttaccattagcgaaatgatttttaagttttaaatacatttaagagctgcctaggtagaaatattttttaaagtaatacgtggttttgtggtcattgattattttaataagccagtatatcaatttaatcaggaacacaattactactttttcatggttctcctttcacaaatccgaaaagttcttcccagtccacacggtttggacacattttcaagtgttaaaacatattgttcatacaaaacaaacaagctctttagtcacaattttagttgaagactatttgttatttcctttaaaatgcacccaaattacaaccactaagcattagagaacaaaacaggtataaggaaataagcgatttttttttctttttttttttttttttagattgagaacttatttgtgaagagatgggaggcgggaaagaatgcaacaatcaccgaagcgtgcaaggaaaaataaaaacaaagataacctgtaaaaatataacaaatcttcactatgcatattacaacactttggaaccaacagtaccgatctcctgaacagaactgctgtaataaagcttcatattcaccaggtccgtattaaacatctcttccttttgaagatccgtctgctatgattaagatccagcaatccacccctttggcagtgattttggatatgaggacatgagactgaaaccccgagttcctaagttggttttacctgacaagaggaactgacagtgatgctggcgggaaaaccctatgagcgaagtttcctccatcctggctcccctcccccttcttcccaccttcacgaaaattaataatccacaaaagaactatgtatcagccaagagcgcaaaagttcatcattccacctgaatgcagcaaggcccacgcgcacctgcgggcagagaggaggctgccgggtccccgagtgggcagcagcttgggccccagcgagcaaggcggcctagcgccgcaggatggcaagcgaataggcccggcgcccggtctcccggcctagagcaactcccttctccacaatggtgggtggtttagccccttcgcgctacctgagacgcaagaatcgcctcctggtggggcagggaaggatgtgggggcgctgagacaagcaaacggggcctagagaccgcggcgggcaactgcctaggagaaagaatggggggagggggttgcaagaggggagaggaaaggggctccgcagggatcgggaggccagcggaccggtgggctggagacttcggggcagagaagctaccggctacggccgaaggggtggggcaaggcctgcgtgacggccagggccgcggctgcgagaaccccgaggtggggtgagggtcggatctcggcctcacctaaagtccttgtcgctggatgtcattttttccagcaaattggaaatgtggtacgaggcgctcgccatgttgacggcctcgatcccgcctgctggcgctgctggagctgctgcccgctgccgctgccgccgccgccgccgccactggagctcctcctctcgctcgcggcggctcccgcttccagggtcgcagcgcgacgccgacgctgactagggaggcgcctcgacgggctgccccctccctggcgaggcgtgggcctgtcccggggtaagccgaggctacagagccagcctaacgacggcgctgttcgcgtgagaacgagctcatgggcggcggggcgtacagaagggcctctacggggagccagacacttccactcagggccgtctcgctcccactcgctccgcactcgctccctagggcaaaaggccaaagcccgcctccttcgctccgggggcgggggcggcagacgcgggcgctacggaaagctaaggtcagagttcacggaggcctccccacgcacgctgtggagaagagagttaaaaaacaattcggttggctgaagcctgtgtcagttttcatgtgacccgccttttggaggcatgacaacacaaaaaaaaggggctgttctcgcgagactctaaagcgacggttaagggacaggggacgagtggagcaagtgggccttaatctgaaaataacttgattgtttaatgacattaagagaaaaagattacgagctttgagaaggaggaagcctgggagtaacgacagttaaggagttagcttgcggaaccaacataagaatttataacagggaggtgtcgtttgggatcagacgcgtggcctgcattgccgtagccaccgtggtgtaatgttgccacgtaaaaaccacaaatcccagaattcagtcgggtgatacactggctcagaatgtgattggctgcgggaactagtagcttcctcattggctcccgtggaaggagtgaatgctgggatttgcagtctgatgggggagccgtgctgggtaaaaaccttagaatcgtcgcgcactccgtttctgccgcggattcttatattctccaatacaggctttttctgttatgcagtatttgcagagcaggctgctgcagtttggccaggcgcattgcggatcagttggtgttcttgccagaggcctagcagcagcttcctagcgctactacttgcacctcccaaggcagctgagcctccccacttctctggccagacacactcctaccgtgcatcgtagaaccacctctctgacgccagcaggaccttagtaagagtaatgggtatgcgacagatggctgtagtcaggccctactgatttcaaaatagctaaaagactatctctgtagttagcttttgtggccttgatggacctgcagctgtgtattgctccctcagacgtacaaattcgtggagatgagttatgaaagtatttagtatccaagtttttcatctgcttaatatttgggattttaaacacaagttttgccagctaggggtcaacatccctgaaagtgttagggatggagctagctgacaggcctttctaaaagaacagagagcctggtgaagagatgaaaaatcaatctcacttgatactcctgttaaaaacaacaacaaacctttaaatagctctctactaacacataactcaaatccgatcaaatctacctgacctttaccattgttttctgtattcatcaactattactgagtacttcaaagtcaggcaataggagttaataaaacagatgaaacttggtttagcctcataatatgtgtttaaatttcacacatacctctgatctgctctcatgtatccttctacttgaatgtatgtaatataaaggccgggtgcggtggctcatgcctgtaaccccaccactttgggaggccgaggcgggcagatcagggcatcaggagttcgagaccagcctggccaatatggtgaaaccccatctctactaaaaatacaaaaattagctgggcatggtggcgcgcctgtagtcacagctactcgggaggctgacgtagaaaaattgcttgaacccaggaggcggaggttgcagtgagccgagatcgtgccactgcactccagcctgggcgacagagtgagacaacgtcttaaaatgataataataatatatacgtaatatatgatattttttctccccagtaatgccatatttcattttaccaatctgccatgattaatatatctttcatcaaactgtccttagtgcttcagccacaattaattgccttttgctctgaatagcctttccaccatatttaatgtaaaacacacacacacacacacacacacaaagaagcaggtctttttttgtatgtgtggacctcaaggcctcagtcatttggtattatcaataatactttcttttagcctgtgtccactcagaaagcaaatcatggtttgtctttttctgtgtgtaaattctttcacttttgaat

SEQ ID NO: 916001 - DNA, 4001 bp, Homo sapiens
aatggtgagagctacagagaagctactagcaacttgcccttctttactttcttaggttaaaaaaaaaaaaaaaaaagagtcaaccagactctaaagagtctcttcacactcctccattaaaagcaactttaaggtctaactaggtcttggcacaaaagtacttaacaacacataggtccagatagtcactcaacctcacctgtccaaaagcagaagagaaacgtaatacagcaaagcaacgtgcagtctgtttcacaggctacatgactcaggaaatgaagaaggatttagatctttacaacagcattttctgtagctaggcttaactcctgggtctctttacaaggctgactaccacgctttcacctagcaatcttaaatcttcacctaacaccacaaaagtaagtggtaaaacattttctagttctactacggttaaaccttccaacgactgcagcagttatactgcaatatcaactgctgcagaaagtcacaaggaaaacaagctaaaaaatcagctattaacacatctatgaaaagaaacattaatactacataaggaattaatctcacctaaaatagctagctcttaaagtatttcaacagcagcatgcataatgtaactatgaagaatatttttattccgttgttttgacaaatgaaacagaaaatgtttaatatttccaacacgtaacctgcttgtttaaagcagctaaacctaaggttagttaaatttttagtagagaacacctatgagctctgaaagaaaaatgtcagctccttaatctttaagatcatgcatctacaggactggaagaaaaaaagttaccttctttttctcgatgtttctaattttgtgtttaaggcatatgagtccattttcaatataggtctcatacgcttgggaaggagatgcagcagaactcagagtagactgcagggggctcaaggcccgctggctttccccatgctgactgtggttcacttggggcttggctgacttcatattcccctctctttcctcctctgaatggcctgaaggtgactggtaaccaaaaggggatgaaaagagttgcaccattgaaacagatgaggctgaaggaggtgggggaaagttaagtataaaattaggactagagggacacagccaggcaataacttccctggaaagtctagaccactcccttaaactcttttccacagaagtgagctcgaaacccaatgatgcttgagatacttgtacttccatcctacttttaaagtaattagtgccgctagccaataaggatagcctttacataggcaaaatctcccaatacggaggatgtttccagaaattcgattttccacatagggaggaagaactgcaacggcttcagagctcctttcttctcatgagggcagatcacattctaaataattcccatggccacgtgatgacaccaaaagaataagctttccacaccgggacctaaggctgagccactcaaacctctttacatgatccctcaccaccagccctaacctcaatcctgaacgtttggaagaaaatccaaactcacaacattcttttatagctctaagtgaaccagcagcttcttgaacaagaatgctaacttccccgattgctctggggcctacaaggcaatccatcactactggacatttgcagacaggtactctctcaacctgcaggaaccccgcgtttattctcagttgtttggtttagactagcccaaaaccgcttacacccaaccagtttaagagctcattctagcgagcccttcccgtgccctaatcagtggcccttgcgcacttacgtatccgtctctcgacctccaagcacccgaggtatccctttctccccccttaggagcatccccaaaccaaggacagaacaggccccatgcacgccagcgcgcaccccctcaagtctccgggggagcctgagcgaagagcacctctcccgagcggccacggagagccctgcaggcaccgacccccacccttcccacagccgccccgggtacgcagaagccgcttctgcaaggccccgggggaggctgacctgcggaaaacgcaccgaccgcggccctcgggagccccgccccgccccggggatgccaagccgcccctccacctcgcagcggcgccggccgcccagacctgcccaccctcgccgggtcagccgcctccctccgccgcgccgaccgaggccgccgcagcccgacttcacctccccaggcagccgaggccgccgctgccgcagcccgggcccgccttccaaagcctgggggaggcaggagcgctgcggaggtggaccggcgccaccccgcactcgcgtctcctcctcctgtctcctccctctcccctcccggtcctcgcccgcggcctctgcggcgccagagacccagccgactcagccgctcgcgcccaggcccgcccaccgcgccgcgcgtggcttttgtaggccgcgccccgccccggcccgctccgccctcggccgccccgccaccgcctccttccggtgctccttcccggctgcagctggccgccagcgcttgtcgggtgttagttccgggcccagcttgggctggtggtaggtcgggagagggcgcggtctcccagcctttgcgcagattgcggggcaccaggtggggccgaggcgacgccgaacgccggcaggccggaaaccgcgcagccccgctggacctcgctgattgccggcggcaccggtggtttcgcgaccttgaacaggtgactccaatagctccaggagggcagcgagcccttcgcggaactaccagataagccatgcttgaggctgtcgtagcctagtgggtagtcgtgaaatgcagatgcgcctttgcccctcagatagcatctttcatagtaggatggggaaaaaacaccgtttccttaccggggaatcagcctgtaagagcagaatgccccaaatcagcatcgccataaaaacggagtaggtgacttcgcaacctgcaataataggattgagtttattcaagccgtattatttgttcatgtgacacacattaattgactggcacgcagagaaagctgtaaaaaatctttgtaaggttacataaaattaagagaaaagtctggaaatatgtaaaagtttattgaggaaaggaaggtgtttctgataccaaataagaaacacacacacacactcagcaatactttgccccaacatgtgtttacttattacaccaagtggagttttttaggtcctgattgtccctgacgctctgataaaaaatattgagactagcaaaagaacagaaaattcagaagaagaatcaaggaaacaaaggtctagttttaaaagccttggtcaacttcacacaaattaattttaacattacttaatacatttttttggcatctattatccgtgttcttttcggtccctggtgacataatgtaccctaatgttgcattttaactttgaatctctgaatcccatatgtgttcttcagggtcagagaaatactagattttccctttttctcattgtttataaacagagaaacgcagaagatgctgaacatgaggagaggaaggctatgccttcacctttggtaacacaaaaaacagtggccataagaaaaaatgtgaaggacacactgttggatcaatgagttgacacaaagttacagcacagcctgagttgtagtccgagctaatgatgaacctaaaaatggtatttcagtcagattaatcatgaaatgtttgccccctgccggcgcagtggctcaagcctgtgatcccagcactttgggaggccgaggcggggtggatcacctgaggtcgggagttcgaggccaggctggccagcgtggtgaatatccatctctactaaaaatacaaaaattagccgagcatggcggcatgtgcctgtaatcatggctactcagaggctaaggcaggagaatcgcttgaaacccggagacggacgctgcagtgagccgagattg

SEQ ID NO: 916002 - DNA, 4001 bp, Homo sapiens
aaaaaaatacaaatcattagattcaaaaattctcctatagcactacagatggctttctttccagagctatttttcacaaagaagcaacttttaaaagttgctgttgttttgttttggaggccagggttgggttggttgtttaatcacacaaattattgtattcgcgatgatgatttctggctaacaaacccaagttgagataaggacgctgaacaatcagcaaagtgattttctccacacatcagtctctcaattatttatatcctagtaacatttatagctatttcaaatcactataggtcatttcaaatcagtataatttatttgcaaatttaaaaagcggcaacatgtaaatcctcaaatgtccaggtcctcccagttcctgtacttccccagtcaggacagtcttcactcttcactgtcattagattttctttcccctaataaacagtcaagaccaagaaggttggcgtctcccacccttaacaaagcatgggtagtaaatattttgttaataagtaaattaatgtatagcaaaatacatgtatacattttacacatattcttagattcctttctctgcatctaactgtaacataatcacaatgccaacatacaaattctgtcttcaattagataagatgtttaaagcattgcattatagctattagtctttaatgctagactgtaagcctcatatttgctcaccctatgtctcaggatttagaaagcccacaatgtagtaggaacttaacaaatgtttgttaaataagtgaagtcagtcaattcggaatgacaaaacacaaaagtggttaacttagatatagtaagagtattcaaagggcaatgccgtcatacatggaacactttcggatctatggaattagagcagtcaggcaactgacaccctatgtagataattttaagattttgacagggcttcaaagacaaaaacagctcaaccttctgatcttcaaaccgagccagctgagatccagaaaagtgaactgtacttcgctaaatgtttgccagttattgcagacccgaattcacacgtgggtttcagatctcttttcagtactacatcctcactggtaaaggtaatagaagaattcgaggggaatgagctgtagggactaaaaaattagaaacctaaacttggtggcacaagaatcagcaaacaactggctgtgagtgaatctttgaaacctatgccaagggttgtctttgtcattaagcactgaatatccagctgggctatgttggagatagggagtagcaaaaggaagggaaagcacttctaaatggcttctgtccccacttaaatggctgcatgtcatgagatgatattgctagcatataataaatactgttggctaatgtctttagtgctaccaaaaataactgaacacacttcccatttccctcatttttttttaaggatgactatttccacttccaattattatcacttctctcggtagtaatattactggctattatgttacttatatcaaatcagaaaaaaatgaaaagcaaaaaataaactgatttaattcagcccataaataagaaaaaaagaaagagatgtaaatacaatttagtatttaagctacatgaaggtagggaccaagtctatgttgatcccagacgactacagacccagatatctgaattgaaacttaggtcattcctaatttcaagcaaaacagggtaatatctcctttcaccccatcactccccctgctcccaaattatattataattcagagcacctgcagtgtagcagaaggaattccccatcccctacctaactgggattcctggacaggacaggcgaggggcacaagagacagtcagcctgatttcacctaacaagctcggtaagaagaggtccagagttagaagagttggaaaaggtataaactagcgcgattcctccaaaaaccgcattcagaaagctttagacaggacagtctagacagtccaggcccgcgtctgcaggttgcccggcaacaggcgccgcagcgcagggcttctgattacactctgacctccagggacgaaaaggtcgtcggcccaagtcccttgttcgttctacgccacctcccgcccccgccaatctgcctcctcagttccgctgcctggctgaccggaactgagcttgtggccggagaccccgccacgctctcagaagtacttgctggctggaaaacccaaaggggtgaaacctcagctacagccgccgcagcctcccagggaaccggctccgcggcgcccctaaaccccggcgaggagccggagcggactcactcacccgcgcttctcctgagcagggaaagggccaaagcccggcccggatccacggcggttgttgtgtaattctttgtctaattgaattctgtttaacatatttcataaggcacctgtctgtgcacagagcccagaatgacgttttgaggagaagaaatttaagcatatgctacaatatctgctctcaaggagcttgcacttattttttttaaagactgtaatatattatatagagatacatagatattagacatggatattactttaaatttgtgtgactatgtacatatagatgattacatgaataattgcatatatatgtatgtgtatttgtgtgtgtatatataattaaaatttaaaatgatgtgtggaaagggcaaaggcctagaaatcaagaaacctgcattttattctttgcctttttttttttttgagacggagtttccttcttgttgcccaggctggagtgcaatggcacaatctcgactcactgcaacctctgcctcccaggttcaagcgattctcctgccccagcctcccaagtagttgggattacatgcgcccaccaccacgcccggttaatattttgtatctttatatagagggggtttcaccatgttgggcaggctggtctcgaactcctgacctcaggtgataccctgcctcagactcccagagtgctgtgatttacaggcatgagccaccatgcccggcctaaatatttttatgtatgctctgtacacaatatcttggcatcaactcctcatctataaagggaaaaagctggtttgagataattccaaggatccactccactctaatatgcactaactttcctaaattacacagccaagagtcagatattcaaattagaagtaagagtttatgaaagttaatccagttctttcataatcatgtttttctaatctgcagtaacttttcaaaattagctcccctcagaatgtatgtatcaaaacgtgaatatttccagtatttcctggtgcaaatttgggagtaaaaatacaaataaatttttaaagtataaaaatagtgaaggaaatgaggtataatgtaatcactctgtatttttctgctgcactccataaaattcatctatccattacccccacatagaaagaaaagcaaaaataaatagcagaaaacacacataaaaataaaacagaaagctaaatttaacttttttttttttttgagacggagtctcgctctgtcgcccaggctggagtgcagtggcgggatctcggctcactgcaagctccgcctcccgggttcacgccattctcctgcctcagcctcccaagtagctgggactacaggcgcccgccactacgcccggctaattttttgtatttttagtagagacagggtttcaccgttttagccgggatggtctcgatctcctgacctcgtgatccgcccccctcggcctcccaaagtgctgggattacaggcgtgagccaccgcgcccggcctaaatttaacttttaaaaagttataaaagaacttaaaaattctggtgcaccaactaaccttggccattccagaaatagatgttcaagaaaataacattaggacatgcacttgttgattcctggcaattagactttttacacctaaattgttttagtatttctgaatatagctgtctaagccattgggaacatgat

SEQ ID NO: 916003 - DNA, 4001 bp, Homo sapiens
agttttgttgtgaacctaaaactgctattaaaaaagagtctatttttagaaaaggaattggtaaaaaaaacaaaacaaaacaaaaaaaacacagaagtagctctaccactccctggctgggtggcctcaggcaatttgatttctctttttctcagttgtttttccatctgttaaagggataataactatttcttaagatttgtgtgacttgagtgagttgatattgtccaagcattttaaatagtgcctgacacattaaatatttgtgaaatagattaaaaatagtattcaccactctgtattgtaactgtttgatgattcatctgtgtcacctttaattaaaagctccctgtggatagactccatgtctagcttgttcagcatttgagcctttagctgggctgtgacacacaggaagtaccaaggaaatatttattgaatgagatgtctagcagtggaatgggcttccctgttggtctaattatttaagaaaaggatgtgatgatcacctgtcagtgatgttccggagagtatacctaacacaggaggctagcaatagtggctaaaatttcttccaaatctaagattgcattattctatttatactttttctttagcattttttgcagtctaacaacagtaccaccataataaaagaattgcatctttcagcacttgccaccttcacccttaaataggttctagccatactaaaatacttctagcgtttaggatcttcctctccttaggcacattacatgcttttccctttgtttagaatgctatcttagacttgtctgtttcactttctgtatacaatttccagaaaggcttccctgctcctccacaagagtaccaagcaatagaattttggctttgtatttatcacgttttaaatactgcctgattgctaattcactaaattgtaagctgcttgaaagctggatctgtgtcttgtctactgatctttctcaatcacttaaaacttactactatgcagtcatagtagtaagtattcaagggcataaatgaaaccatcttacataggtctattgtttttcaattgtgtgcatcacagacaatttttaaaagcacttttctttttataaatgtttggctaacctgttacaatgttttgtagtaaaattctctcccaatgtcaattttccatatctgcttaatgctattaagcacaatatgtaatatgcaaacgtgtattccaaaactaatacttgctttttttccatgcttagaatttaaagtcttcaaagcaagttggttttgttttgttttgtttttgaggaaaatgtttggaggtaaacagatcagaccaaaatcagctagatattagccaattttgtctggaacaaaaaaagaaaacaaaagagttcgttcttactgtgaatgccacaattagtgaaaaagatgaatcttgatattccgggctgtctgaattgtgctgatgagagaagaagtagaaatgttttaacctttgaagagtttggtgatccctactctcccttcactcccatttattttgtggtttcccacaaaggttcatttaaaaactgaaaaaaatctcatcaattaagttggccttaagaacttctttggccttaagaactagcaatatttctgtattccattctgtccctgaggaaaataaaaggcaggccctgcaccaaatttccaactcaacaggtaatggggaaaaaaaatttaattgaatttgtatctgtatcgcagaaaaatcatttcacctggcacaattagaaggttcctcagacctgttactcagcaattggcatttaccatacaaactgatgactcattaataacgacatatcattcagtgtcagaaatcaattcgggataacatttcactacattagtttagtgaaaagggcttactcacgtaacacaagtctttctttagtttgtcagacatctattaccagctttcttcactctgcaggtctagctttcccctcctctccccctcccctacccactctcccctccctcttctctcctccctcctccttaccccctcctccctcctttgtttttccctcctccctcctccctttctccttccgggaggcgggacaaggcttgcttgcgtcctccgtagattggcaggtcactgggacggccagcgcgtgcgcactggcctgtcagcggccggtggaccatggaggccgcaaggcccttcgcccgggagtggagggcccagtccctacccctggcagtagggggcgttttgaagctgcggctctgtgagctgtggctactgctactgggttctagtttgaacgccagatttttgccagacgaggaggacgtagactttatcaacgagtacgtgaacctccacaatgagctgcggggcgacgtcattccccgagggtctaacttgcgcttcatggtgaggccggaaggcggtttgccgacccttccactaccgttgccacaacgcctccctggatctcgggtagttggggccactgctctgaggctgaaggatcgcggagaaccgcacttttagcttggtttttaaagtacacgtgaagtttacacagagaaaaactgcggacactctaacacatgcttattaccatgatattacacagggccaggactaaggtgatggaggcactggcctgaagtgcagattttaagggggcgccaattcaagaaaatgatattttaatgcaacgggtttttaaaaattaaaaatcagtgcaaaaatatcaatatcaagggtaaagaaaatgttaaaaaatttaacaaagacaggttccttgggtctggattagggaaaaacaagtgcgacactctcagggtggtgcaaatcaagatgagattctgtttgtatttgaaatttttatttttagctttttccatcatcgatgtcacattagctttgccttttaaaaatgtttgttatcttgattttttttttttgtgcccattccaaatttggctcctaaggaagtgtctcagtttcctcaccctagtcttgaccctgattttgccttaccttacaatgcggttcttgctttccccctcttttacaccctatagtcatttaacaactcaactattccctggttgctattgagttttcctgactgtcattaaaatgactgaaaatccggcaaataaataactgtcctcttagggaattagaagcttcaaacttataaattatattgcaaggactactttcctagacatgtcttttcttccttcagcattagttcttagcacaaatttcagaaatgggataaataaattaagggtatgatattttttattaatttaacacatagcaattgctatgctaaagggtagtgccaaatttagcaaataccagctgttctgttttcaccacatcctcactgatttggacatgttcaattacttgctaaatgaataaattacaaaaatggtcatttgttttaatgttgattttaaaatactattttgataggacatacttgagttctttcttcgtcatttcctttaccttttatattgtcagcatttccatgtcagattatatgctgtcttatagaactatgctagcatttggttctatctgctgaagatacttttttctaagccaattctttttcttttgaattcaattatagagtttggggatatttgggagtttcaactaatttcccattttttgtgactaattctgtttcttcccaatttgaagattatccttactcctgaaaattaataaacacataatactttctaatacaacttttcataggttttctatctcatctctaaaaattatatagtatttcaaacataaggtatataaaataatatacctgtatacccacaatcgatatttttaaatatagacatttttaaaggaatagtatttgatatataggttaaagtcccaccctaaatttttacctttttcttctttcttgaagttaatgtatatttttcccatgtattttattagg

SEQ ID NO: 916004 - DNA, 4001 bp, Homo sapiens
aactgcgaccaataaattcctgttatttgtgagttactcaatatatggtattttgttatagcagcacaagtgaactgtgacactatgtgtctggaagatgtgaacaacttgagaacttaggtttttcttaggtacaacggagataatactagtaccagattagtgatgaaaaatgttatgcaaaatatttagcacaagccatgttatgtaataagtacttctaagtgtttacagtgacgacttcacaaaagcctggctgtaaaagtttgggaagtcaggcttctctggttggcttggaagaccatgttagttatcagacaagccagggattttgagtaaccccaattcttgaggggaagaaagtagagtggaagaggagccaaaattactaatagtccttcatctgagctagatttttgatatctgttggttttgtggaaaatccaaacctaatgtcttttattgaaattccccatctcgtggatggtctaggactgaattgagttatgtaaaatatcatttgtggagtgatattcatttgtataccttttcagttcgaaacagtcaaaagtctctctctctctctctctctctctctcacacacacacacacacacacacacacacacgtacacacccacacacagccttaaccctggccacctctatactatttctggaatcccagattctataaaactattttagtttctaacaaatgtcttggtctttatgatggtcaccaccatgaaacacagttactttacactttcttgccttgttcataaatattccccaagtaaaattacttgctacacttttcccatttaaatttgcattggctaagtgagagacatctctacagattgctcaattttaggaaaataaccattcccaagaaacacaaacaagtcaaatcaagatagttaccaggagcaattctttatattatccagttgcacaacacacttcttgaataaatgacatatcctaatttaggatacatcaccagattcaagtcagagagtatcctgtgccagtcaataagagtgcgggtcactggaagatcccttcgtagaatttttctcagggcttcattggataactcctgtaattcttccaagactgcagcttgaaatttgttctcttgctcttccacaagccttgcaaaacttagagccagttgagcttggttaactatttccaagctttctttcaggtccttggatatttcaatatgaaggttgacacacctgaagaagtgagcttgcacaaatattcttcccgttacttgggttagaaatgggttaacttggaaaatccatttagatttccaaagtccgttccagcactctcctgtttcatagttgtgatcttcaatgcaagctatcaagtactccttacttttgacagtttttctcagcatgttgcaatttccttttggatagtggtcattcacatacagttttaaggcgcacagaagaacaactctcaggtattctgcctcattctgaatgataccatgactttggatgtctttcagctgattttgaagcaggtcatatttgaaagaaagtttgctttgatggtcaaaaaatcggtagtcgcccattacattgtggtgagacaagagtactggatttccatcgatgcagagtggtacagaatatttttggcagtgttggtggcctgcacactcaccttggtggtgcataagtttttcatcacggataagcagacagagatcatcaaaggcatttacaaattcccctggaggggcctgtaataacagtctgcgaattactctttccttgtccttcctgctcagcacgctaagtgtcatgtttggttgcaacagaagcaaagcttctgaaatgaggagtgttcaaaggataagaaaacattccatgagccacctttcccatcaaggtgttaacattcaagctgaaggtttttatgtctatccatgaaagcaggcagtctggcaaggtctgagcctcctgatgaggtcataagaagctttccttgtgaagtgtggaacctctgatgatatcacaatgggaattcagaccaaaaggaaaaaatgacagtcacctgacagtgtggtgcccagccaaccagctatacctcttttgaagattttaagaacttagcctcctgaacagtcttcttcgaaagtggtgtgtctctgtgtgcattatatgttgtcaacgatctagagaagcagcccaaagtttcaagagtgacagcactttgcaacttcaggaatcacaatggtgttgatttatactcaggctctcagagtagctgcccaaacccactggaagcatattatgatgaaaggtttgaggggtttaaacaaagtagtaaaaaataaaaggagatacaatggcagttcatggaaaaatgccagacatcagggaaagctgtgttttcaaatattgtgggtttggaggtggtcagaacgtaagaagccaaacagtttcaagggcagggtagtgcaggtaccacatcttgcatactgtttctatggttaagtgtgagctagcttcaaagaacgaaggcaaaaaaaaccactgtgtgttctctgctttctccctagaaaagtggtaacagctgatgagtatcaagaaattattttctgcaaaggggcagagttaattgtatttggaacccatgacagcacctactggggaaagacttctaagtgaggagaaacggctctacaggtcatgaaactatggaaatgagatatccattgagagcttctttctgctcctcttcttctttctcctacttatcctctttacttgatgctgttattcttttcgaggagttctgaatttaagtcctcttcatttaagttgaactgcttttccctgtttgttctgagcttttctaactttccctgcattctggtatctttttcttacaagaacatgagctttgctggattaagtcataactattaaatttaaggagatctcattaattcgttctaacaatctgaaacttagtagttttgcacaatttttacctataccttttataattttagtgataattgtcattatctcatttcgatcttagtttttcaaatggaagtgtcctagtttttgtagtttatctatgataagtaagcttttaaaaatttttttcgtttttcataccaaatatacactcaccatggtatttctgatgctttttgatggtactgtcttgagtgtgtgtgtagctgggcattggactaatgtagtaataataactttatcagtcatggttactatttattgaacactaagtagcagaaactgtgttcggtggcatattaggaattcatctaatgcttccactttccttaagattcagggttaatttgctcacctttctggaagagagaactaaaacagagaggtcaggtgagaggcgatcttgaagtctagctgccttccaacttcatgccttcaggcaatagattgttataatgttttaatgtatgttctaagtaatgacttcaattctcaaattttaactttaattcttttttttgtatttttactgtgctatgccctttcatacctttaccatagcatagtaactacttaattttgttttttaaaaaatatttatcatacaattatactataatttactttaaacatattctttaaaaataaaaataatacagtaaatcaaatgtttctttaggaattttaaatattcaatgactttctgtgagaatttccttaacttttttgtgcttctacatggtttttgtcaaagattcaggatgacttcagaggtggaaaaattaacctagaaaaaactcagaggttacttgaaaaattagatattcggtgcagttatattcatgtgaaacagatttttaaggtaagatgacatccaccccctgcctatcctatcctaggtggaacttaatccaatgtcagtaattgtcatataaaggttagtctcttaagaagaaaagcaattaattatac

SEQ ID NO: 916005 - DNA, 4001 bp, Homo sapiens
agaaaaaaaattcatacgttgaaattctgatccccagtacttcagaatttgatctaattggagacagggtcactgctgattttattagttaaattaagatgaagccatactgaatagggtgggcccctaatccaatatgatttgtgtccttatataataataattttaatatactcagatggagaatgccatgtgaagaatgaagttttgttgccacaaaccaagaaactactagaagccaggaaaggtctgaacagatctctccctaaggccctcagaggtatcacagacctgctgacactttgatcttggacttctagtctccagaactacgagacaataaatttcttttctttaaccactcagtttgtggcaattccttacttggcagacttaggaaactaatacagtagatttggagttgagtgggttcctggaatctgcatttttaacaagtactccgggtgcattagaaataaatgttccatgggccacactttgagaaacattgggagaaggatctaagaagaagaagaaactcaggtaacaaattggaaggtaacaagtaagtgcttactgttcccccaatttattagcaattataaattgacttaaggtccatttgcattccgccaggaatgctctccactccctatttctttttttctcttttttttttgagacggagtctcgctctgtcacccaggctggagtgcagtggcacaatctcggctcactgcaacctccgcctcccaggttcaagcgattctcttgcttcagccccctgagtagctggaattacaggtgcgcgccaacacgcccggctaatttttgtatttttagtagagactgggtttcaccatgttgaccaggctggtctcgaactcctgacatcgtgatctgcccgcctcggcctcccaaagtgctgggattacaggggtgagccaccgcgccaggcctccactccctatttcttcccaccatatgtggaaaactcgtatttatactttaaaacaggttgaaaagcaccactctccttcccttgtttcccctcactgaaatttcatcatttccaactgtgtgttaccccattttagatgcttcaattgttacagttgtaaagctgtattgtaattaatttgtttaatctgtatcctataagcagagttgtcgtcatgttcttcttggtattcttggcttctagcccagtgccaagtacaaagaatgcactccacatttttcccttaattaatgaattaaataagtaattacattctccacttcctctggttttaattatagaaaatgtcttgatggaaaccacatttaagaaaatcagagatactctcatagctacatgttggcctgtctccttgctgaaaacatggcagttgaggagtgcagaaaaacaaaatgagaagccttatcatatttaactaatgcaggatgagaaccttgaatcacaaaacaattcatattcccacaaaagacgacataaaatattttttcaaagcagagtaaattgcattagcttttaattaactgctggagaagtactaaaacatttccgccaagttgcaataagaaaatttagtgggaacgtctatcactactgaaagttactaggttgggaccaattttcaagcttagcaacattcgagatcaggataccgtgtgacagctttgaccatctcccgtttgcagaaactggtttgggactcctacctgtccgcctggtccaggtaaggaaagccattgctgagaagagggccgacccaccccaaggtatgagttatttcccaaaccgacccgcttcgctgtaaaatatgactggctcttgattacattatttaacactggtgaagcagaatcagtggtcgcccctccacctgtctgcctcatttgccttgctcaccattaagagtcaagctccactgcagtagtccgcagagtcggagcagaaattgtgtggacaaacgctcccgggttgcccggacgacaggccccgcccacttgagctccaggaaaagagcgcagccgcgcggaggctcttccggccggcgccccgccccctttactgacaggttgcccacctcccccaacgccaccccgcttcgcagtagacggacagaggagtcgtagcggtcgaggcttttgcggctccggcgtgccggaaagtgcgtgagtgccgccgccggggagttttgttccatttcccggatcctggggtctggaggcgaaatatgctctgggcgaggaccaccgggtgtgggaagagggttctgagcgtctcctgacgttgacggtttatttcctagagtgtgttgggtctttctgtgagggtttcgagaaggaaacaggcatgcgactggttcatgcagcggacacccggtgggaggcctgggcctctgcggtttaatccagcagggggatggggctcattccgcaatttaaagagagaaataagttggctccagagggttggttattttaagattaatgaccttcggattcttctttctgctctattgtttactttctgtgcagcgtacgcgtcctttttcctaagagcgccctaaacaagaattgaaaatgaagcaattcctggctaaaatattccttaacatgaagatcgctgaggccccaaagactcattagtttcccgaggtcacagactaattttactaaccacacaacctttagaatttcagtctcctcccacatgaagaaacgccggcaccttacaccgacaggaaaactacaattaagtgaggctgttctcctcaagcccgactgagttctctgtaattgtagggcatacctacaccctgttttagcattatgagacctgaaatacttttaaattactggcaccatttctcatctctgaattataagtttataatgctctatcccttccagtgttattgactacatgcattattcatagataagtagtaggactaagctagtctttgtgggttaaagtgttattatccctattgtaacctgtaactattataggttgtgtaatagttattagcattttacatccatatcctggtagcaagataaaaacattttaatagcgacttcgtacagagttcttactcagtttaccatagctgtttgatatgaaagttaaggcttccttttaaattagtttcagtaaaactaatgtttaatgataaaacacctcagtcaactcaagttaggattcatcggggtaaggagatagttcagtaatcccaagttaccttaaaatagtgggcttttagaggaaaggctttactgaagctctcactgtatctaccccatggggaacaatgattaacaactttggccaccacataacccccagtaaaatgacaattttccattagcctggaactggaactggttaagtcctaactccttagcctagaatgacagggggaaaaaactatcaatggggactgcaaccgctgtctcatccagcgcacacatccaagttttcagaataatagggggcttctcttagtccttaactcttggctctttacttaaaacagtaacctccatgacttcatgcagagttcaggagcagcctcagggccctgctgaactcaaaattgtttattcactacattgtgaacccaaggagacctatttctcttagtggctaaagtaaacctaaatgcttcaaggtcaactgcataaagataaactgcattgcctggtgtggtggctcacgcctgtaatcccagcattttgagaggccaaagtgggtggatcacgaggtctggagatggagaccatcctggataacacagtgaaaccccgtctctactaaaataatacaaaaaattagccgggcgtggtgatcagcacctgtaatcccagctgctctggaggctgagacgggaatcgcttgaacccgggagagggaggttgcagtgagccaagatcgcaccactacactccagccgggtcaacagagcaagactccgtctcaaaaaaaa

SEQ ID NO: 916006 - DNA, 4001 bp, Homo sapiens
caacatactcctcctcatcctctgaagaagaactgtcagctgtccgcttggttttctttcccatgtcgcacaccgttccacctgaaagactaaggccaccaggtccctgcaaaggcaaaggacaaaatggttagaatccatgtgaggagttaaaaactttgtcttttcttgatgggatgaaaaggggataacactgagttgccatgtgccctgctcttgagtctcaaatcattctacagatgagtcctaagagtttaatttaaaaatgaatcagtcttcacttcctcaactacaacctcctcttcggctaaagagaccaaaattattagaaggcacaactgtttaactcttctatttcagattccaaaagacaagtagtgtggtatgttattcctggctatgtttgtaactgtttacaagccaggaactcaaacagaaatgtgcaaaatctttagttaaatgaaccaagataaaattaaaacctttttctccaaggtgaataagcgtctttataaaaatgaaaaaagaaaagccactaaaatatgagttttctgtgctctgagcatcttgcccagtctcttagcagcacacaaaaaaggcttgcttaggcacctttcaccacattttcagtgacttggtacatttcccttaaacaaattgagcttgtcccttcagagcatccatcagctcacaaaagcaaggctgacatctcaaacacactaatcttcctttttagaaagctaatttggggatgggagggaggcagaaaggagaaaaaatttttcagtcctaaaattcaaaattagtcactagattattcagtaattcccaagatgcaactaacccaaatagttaagaaggtacctctccctcttaactgaagttgactcagggccaaaggaagaggaggaggaaaaagaagtctggccccagactcagcatcaacatgaagcctcctcaaaatacagaggaaccattcataggcccaaggaaagctgaagcaaggaaacacaaatggaaattgagttaagctcagaaatatgcacaccagggggtactcaacagagaatctagttttaaaaattcccatgttgttgttccataatcatttttaagaattcttccttaaccatgctaaatggtgcctacagtctggattacagagtagcagaaattgttttcttagctgaactccattattattttcctgtaatctttaaagatgtttatcagcaccctctaaatatttccaccctgaccagaaaaccactgggtcagggagggcccactactaacctcagaatgatgttcaagtcacataaaaagtggcaattatcaattcacttcaaattagcaaaattttaaaaattattacaagaatatatagttggagaccatatctccagaacttattagctataggtctgcccacctaaaaaactgcctatacccattactgccctataagactaagtttttattaaaatactctatttggaagaggaagtagtagcaaaatgtaggtgcgggggggttaaaataatttttccatgaatttagaagagtcctaagcttcaagaaaatatcttatgtgctttatttaaaataaaacagcctccaacctcaccagagacaggaaatgtcatattccagggagagtaccccacccccaccaccactcaccttggaatttccgggagctgagcagtttaggtcagagcgctggggttaaaaccagccccatgttagatgcatgcagttaagcattgtggctatggcctcccctgcctcaccaggaaaaacaaggatttacatgtgttcttcattttgagggagagacaaggaaaatctccctttataccttcatgcagaagaggagccccaaaggtagaaaatgaatgggggttccctcctttacctaccggatcgccccagttctttctttccctctgggctaacaggaggggcctcccctcccaggtctgggtcttggcgggctggcagctcccctgcccccacccagctgcctgggcgccactgcgcagctgtcccagtccgttgccatagcaactggcagcagtactacactaagggggagaagcaaatggaaaagttaaaaggcttaactttccttttcagtgaagactgggtggagaaattggaaggtacctctcttggcctcaaggctaaggcattcagagcttaagggaattacttcttaggttttaaatccagtatttatgcttattcctctaacagcactgtgaattaatcaataacattttaagatcatctaacaagattacagctcaactgaagggggaggggaaaggctcgatccttctacaacacgatcagtacaaaccacccatcacttaatccagcccaccagagcactttgggcaatcccattttaccgtctgtcacagaacagttaattaaaattgcttgaggggaaaaataacaggaaacaggggaggggaagtattttaaagacactatataactttccttctttggggggattactagagacaaaatccaaagacatgaagcactaccaaaacaacaaccaaaaaaaaaaaaaaaaaaaaccccttttaactaaaattagaggtggagggccaggtgcagtggctcatgcctgtaatcccagaactttgggaggccgggacggggcaatcatttgaggtcacgtgctcaagactagcctgaccaacgtggtgaaaccccgtctctactaaaaatacaaaaaaattagccaggtgtggtggcaggcgcatatagtcccagctcctcagggggctgagggaggagaaatcgcttgaacccaggaggcagaggttgcagtgagcctagatcgcaccactgcactccagcctgggcgacaagagtgagactgtctcgaaaaaataaaacaaaatgaatttaggtggaaaaaaattcctaagaagcttaaaaaaaaaaaagaggagagcagttctgccacaacctaatggttgataaatttaaaccacttataggttgctctataatgttataaaacagatttttaaataattattcatcacctgatacattattaatatacaactctctgtatcagtatgtctcaatacttgagaaaaggagtactaggataaataaaaaagatatatagagacttgaaatactgtaagttttccattcttctggctctaaagaacattttagagagctccaaaactctactctgctttatagatgtgggaactttaaagccagaagtggctgccataggagagtaagaaaaagggacaatcaaaagcaaagaactcagttgagccaggaacagtggctcacacctgtaatcccagcactttgggaagccgaggcaggtggattacctgaggtcaggagttcgagaccagcctgaccaacatggtgacgccccatctctactaaaaatgcaaaaattagccagacatagtagcacttgcctgtaatcccagctacttgggaggctaaggcaggagaatcgcttgaacctgggaggcagaggttgcagtgagccgagactgcgccactgcactccagcctgagcaacaagagcgaaaccgtctcaaaaaaaaaaaaaaaagaactcagttgagaagaagcacaatggtgactattacgactgtcaaacagaagaaaccatagggtgtaagaccaaagtagaaatttttttcttttttcttttttttttttgagacggagtctcgctctgtcaccaggctagagtgctgtggcgccatctcggcttactgcaacctccaactccctggttcaagggattctcctgcctcagcctcccaagtagctgggattacaggcatgtgccaccacgcccagctaatttttgtatttttagcagagatggggtttcatcatgttggccaggatggtctcgatttcctcatcttgtgatccgcccacctgggcctcccaaagtgctgggattacaggcatgagacactgca

SEQ ID NO: 916007 - DNA, 4001 bp, Homo sapiens
cacttgtcccttaaccacgcgcctgtctagcaccttctccacaacatactcctcctcatcctctgaagaagaactgtcagctgtccgcttggttttctttcccatgtcgcacaccgttccacctgaaagactaaggccaccaggtccctgcaaaggcaaaggacaaaatggttagaatccatgtgaggagttaaaaactttgtcttttcttgatgggatgaaaaggggataacactgagttgccatgtgccctgctcttgagtctcaaatcattctacagatgagtcctaagagtttaatttaaaaatgaatcagtcttcacttcctcaactacaacctcctcttcggctaaagagaccaaaattattagaaggcacaactgtttaactcttctatttcagattccaaaagacaagtagtgtggtatgttattcctggctatgtttgtaactgtttacaagccaggaactcaaacagaaatgtgcaaaatctttagttaaatgaaccaagataaaattaaaacctttttctccaaggtgaataagcgtctttataaaaatgaaaaaagaaaagccactaaaatatgagttttctgtgctctgagcatcttgcccagtctcttagcagcacacaaaaaaggcttgcttaggcacctttcaccacattttcagtgacttggtacatttcccttaaacaaattgagcttgtcccttcagagcatccatcagctcacaaaagcaaggctgacatctcaaacacactaatcttcctttttagaaagctaatttggggatgggagggaggcagaaaggagaaaaaatttttcagtcctaaaattcaaaattagtcactagattattcagtaattcccaagatgcaactaacccaaatagttaagaaggtacctctccctcttaactgaagttgactcagggccaaaggaagaggaggaggaaaaagaagtctggccccagactcagcatcaacatgaagcctcctcaaaatacagaggaaccattcataggcccaaggaaagctgaagcaaggaaacacaaatggaaattgagttaagctcagaaatatgcacaccagggggtactcaacagagaatctagttttaaaaattcccatgttgttgttccataatcatttttaagaattcttccttaaccatgctaaatggtgcctacagtctggattacagagtagcagaaattgttttcttagctgaactccattattattttcctgtaatctttaaagatgtttatcagcaccctctaaatatttccaccctgaccagaaaaccactgggtcagggagggcccactactaacctcagaatgatgttcaagtcacataaaaagtggcaattatcaattcacttcaaattagcaaaattttaaaaattattacaagaatatatagttggagaccatatctccagaacttattagctataggtctgcccacctaaaaaactgcctatacccattactgccctataagactaagtttttattaaaatactctatttggaagaggaagtagtagcaaaatgtaggtgcgggggggttaaaataatttttccatgaatttagaagagtcctaagcttcaagaaaatatcttatgtgctttatttaaaataaaacagcctccaacctcaccagagacaggaaatgtcatattccagggagagtaccccacccccaccaccactcaccttggaatttccgggagctgagcagtttaggtcagagcgctggggttaaaaccagccccatgttagatgcatgcagttaagcattgtggctatggcctcccctgcctcaccaggaaaaacaaggatttacatgtgttcttcattttgagggagagacaaggaaaatctccctttataccttcatgcagaagaggagccccaaaggtagaaaatgaatgggggttccctcctttacctaccggatcgccccagttctttctttccctctgggctaacaggaggggcctcccctcccaggtctgggtcttggcgggctggcagctcccctgcccccacccagctgcctgggcgccactgcgcagctgtcccagtccgttgccatagcaactggcagcagtactacactaagggggagaagcaaatggaaaagttaaaaggcttaactttccttttcagtgaagactgggtggagaaattggaaggtacctctcttggcctcaaggctaaggcattcagagcttaagggaattacttcttaggttttaaatccagtatttatgcttattcctctaacagcactgtgaattaatcaataacattttaagatcatctaacaagattacagctcaactgaagggggaggggaaaggctcgatccttctacaacacgatcagtacaaaccacccatcacttaatccagcccaccagagcactttgggcaatcccattttaccgtctgtcacagaacagttaattaaaattgcttgaggggaaaaataacaggaaacaggggaggggaagtattttaaagacactatataactttccttctttggggggattactagagacaaaatccaaagacatgaagcactaccaaaacaacaaccaaaaaaaaaaaaaaaaaaaaccccttttaactaaaattagaggtggagggccaggtgcagtggctcatgcctgtaatcccagaactttgggaggccgggacggggcaatcatttgaggtcacgtgctcaagactagcctgaccaacgtggtgaaaccccgtctctactaaaaatacaaaaaaattagccaggtgtggtggcaggcgcatatagtcccagctcctcagggggctgagggaggagaaatcgcttgaacccaggaggcagaggttgcagtgagcctagatcgcaccactgcactccagcctgggcgacaagagtgagactgtctcgaaaaaataaaacaaaatgaatttaggtggaaaaaaattcctaagaagcttaaaaaaaaaaaagaggagagcagttctgccacaacctaatggttgataaatttaaaccacttataggttgctctataatgttataaaacagatttttaaataattattcatcacctgatacattattaatatacaactctctgtatcagtatgtctcaatacttgagaaaaggagtactaggataaataaaaaagatatatagagacttgaaatactgtaagttttccattcttctggctctaaagaacattttagagagctccaaaactctactctgctttatagatgtgggaactttaaagccagaagtggctgccataggagagtaagaaaaagggacaatcaaaagcaaagaactcagttgagccaggaacagtggctcacacctgtaatcccagcactttgggaagccgaggcaggtggattacctgaggtcaggagttcgagaccagcctgaccaacatggtgacgccccatctctactaaaaatgcaaaaattagccagacatagtagcacttgcctgtaatcccagctacttgggaggctaaggcaggagaatcgcttgaacctgggaggcagaggttgcagtgagccgagactgcgccactgcactccagcctgagcaacaagagcgaaaccgtctcaaaaaaaaaaaaaaaagaactcagttgagaagaagcacaatggtgactattacgactgtcaaacagaagaaaccatagggtgtaagaccaaagtagaaatttttttcttttttcttttttttttttgagacggagtctcgctctgtcaccaggctagagtgctgtggcgccatctcggcttactgcaacctccaactccctggttcaagggattctcctgcctcagcctcccaagtagctgggattacaggcatgtgccaccacgcccagctaatttttgtatttttagcagagatggggtttcatcatgttggccaggatggtctcgatttcctcatcttgtgatccgcccacctg

SEQ ID NO: 916008 - DNA, 4001 bp, Homo sapiens
tgatgcgatgttactggcatacagtgggtagaggccaggaatgttgctaaatattttactatgcacaggacactccgagcaccctcaacaaagaattatctgcctcaaaataccaacagtgctaatgctgagaaaccttgctgtaggtcaagactgtattccttccaaacctaaataaatccaggacagatacccttaaccagtatcactttagttctcagaagctcagcaactccattactagcatacctacaaataggtttacagccaggtataaattataggtttgtccttttgctagtgccagagaacatggaaatctctcctctgttcataaactgctattaaaatcgtctgtctttggtataaagtcggaaaggtctctaattataagtgtatttcataggtagttgattttcagtatttaaatattttcccttgatcctgaataaattattgaataaagcagtaagactctgatacagccaatgttatcaaaatttatttatttctccaaaagatcctggaataagcagagtgggcattaccaaaaggagatagactgcatgtaaaacacacttcgaaggaaatctaattaaaaggcaaggaataatccaggtgatggatgaatcttctgtccccagaaccctaaatattaccctctttgtttcttttttattccaaagtcagatatcctcaaaggaacagcaaaaagagggactttaggatatcttcaatggtgtaaagaaaagaaatatatgaaagttcccgggagaaagagactaaaataaaagcactgggcacatggattacataaaacagaaaaggggttgtaagtatgtgattatgactagaaacacaaaacaatcgacttcattttttatttaattttaatcacaaattattaaccttgcaaagttttaaacattaaagatctaatctgcctcgatcctactgtgtccctaggattgacactttggtgtgtagctttccaaaacttttctgtggacctacaaacatatttgtcagtagaaatatgcactatcaggaaggagatatttcttgaacgcctttccatgacagtacatagagatttctcccattcgttctaacattttaacagtcttcctaaagaagcgacttctgaaagtattatttaaaaacaaacaaacaaaaaaaaacaactcctgttccccaaacctcaagtggtgagggggcgggggaaaaatgctcaagtcgaggaatacaggagcaaacttacgctttcaaggaggtgtatgggactgaggcctaaaggcttcgttagagaagtcatcgtggataaaacatccaccctcacacgccattacaggcaccgactccccttcctcacaaccccaaatcgaagacctccctcttttggagagccgattggacgactggtcccagcgctttccttaggctgtccgtctactggttccagattcgttccatccgtttaaccgcccgatcccgcattccccattggagtcaaaccgctgcctcctggagaagcccaacctaccgcgcgcttcctgctcactggctcagtgagacgctgctcagaaggggaaaacccgtctcccacattccgatggcccaagggccgatcagtcggcagctcaaggcagacccaattggcctatacacaagccagtcaaagtcttcggctgcacagctccaaagaacctacggggattaaaacatcccgccccctgttcttctattggttggcccgacccaccgctgccccttcactatccccccaccccgccgtccattcatttcacacaataacgggcccaaatggagtcagttcaagacctactatgggtagataagactgtctgccacttacccgggattgagagtgatcactcacgctaacgtctgccctgttcctgtatggtgaggccgcaccacaagccaccaccgccgccgccttctgcgcaacgccaaccgcccgccaaaacggatccttccctgcgcctgcgcaaccaatcctgggaccggaccttttttctccgcccactacgcatgcgcaaagctaggacaaactcccgccaacacgcaggcgccgtaggttcactgcctactcctgcccgccatttcacgtgttctcagaggcaggtggaacttcttaatgcgcctgcgcaaaactcgccattttactacacgtgcggtcaacaagagttcattgcaaaaaaattgttacctcctggctgcttgtctaatacatagtgttaatcatgctttgccaagcgacttgactgtaatatttgcgcgtggaagattaaaaagatgttaaacacccaaggtagattcaaatgtgaatgattggtcggttggccaatcagactggttaacaataacattactcgggaaccaatggactccaaggggtggagacggcgtagaacgaccgaaggaatgacgttacacagcaatgtggcaccacaggccaatagcagggggaagcgatttcaagtatccaatcagagctgttccagggcggagtctaccaatgccgaaagcgaggaggcggggtaaaaaagagagggcgaaggtaggctggcagatacgttcgtcagcttgctcctttctgcccgtggacgccgccgaagaagcatcgttaaagtctctcttcaccctgccgtcatgtctaagtcagaggtgagttaggcgcgctttcccacttgaattttttcctctccctttcctgaatcggtaagatgctgctgggtttcgttccttgcaccagcccattctacagttccttcggtcgctgccacggcctacccctcccaaagttcaagtcgccattttgtcctcttgatcgccatgaggccgctctccgccaaccatgagttatcatgcgggactcgttactcgtagcaaaattcttaggcacacaggatctttgtctttttttaaaccttgccttggtgagcgagttttctaaagagcgattagtcccattgtggagatgcacccctaccgcccaagcctttgttgcgcgtgcgtcggaaggcgactagggacgcatgcgcttgcgatttcctagcactcccaactccagcatacggcctcccttgataggcagaagcacgtgtcttgttgcgacctgaacgaacaataagtgctaggtacacagttggtgtctagtttttcttttcctcgatggaaattgtttcgtgttgtagcccatttaacacttccccctccccccactctagtctcctaaagagcccgaacagctgaggaagctcttcattggagggttgagctttgaaacaactgatgagagcctgaggagccattttgagcaatggggaacgctcacggactgtgtggtaagatttggaagggacaaagcagtaaaacagccgatttccttggcttatcttggtgcagtcttctccgaatgcttatgaaagtagttaatagcattatagttagagctttgttggcaaaggaacgtcctgctttgattttaaaagctacctcttaaatctagggtagtgggaaactggacgactttttataaaaggctggtgtaaagtttcctattgccctattcaaagttaaaatgacaaaagcttttgcggtcagactttgtgttacataaattaacactgttctcaggtaatgagagatccaaacaccaagcgctccaggggctttgggtttgtcacatatgccactgtggaggaggtggatgcagctatgaatgcaaggccacacaaggtggatggaagagttgtggaaccaaagagagctgtctccagagaagtgagtgggttttttttcttcttcttcttaaacttacttggatatgtgctgctatggacttaagattcgggagttttctaaacttaccaaaattttttattcgagtataggctttgctaatctaaacctatggtttttctcctattaggattctcaaagaccaggtgcccacttaactgtgaaaaagatat

SEQ ID NO: 916009 - DNA, 4001 bp, Homo sapiens
gacatattgacagaaaaaggaactgaagttaagcaggtgtagccaggagagacagtttttggctgcggccccaagagtccctcaaatgtcccctaaatctgggctgctgctgagcacccccgagtctctgcctgtgaaccgggctctttgttctctaagccccagggagtggaaaagcaatcccagatgaagtcagtgacaaggcaggatccgctctgcatgcaaaatcctagaggttgagctattatgtcttcatgcacattcatagccagctcctcccagcccaggggcccttggaaccccattcacccagattcctagggctgcagttccctcctcaagcttcctttaccaatcagcagccgcagagatctgtgagggggagaggcttctgcagagcactgaatatcttggatttcagcagaagggtaaatttcctgttgccagaacaaaatacccccaattccttaatttccaggtaaattgttagagattatttgccatggtcctaggtaagtcctttttcagaatagaaaaagcagaattttatttacacaattcacgggttctcctgttgtctgggaagggggaaaggacaggatagggatggatgggagtccagagatgggcgcttcctctcccggagcctcacctttccgcagttcgctataattcgcttagttgggcagaaagaattctcgatgctcccaaagtccttcaccctacaaatccttcctcgagggagtctctctctgcctgacccacaagagcagctgtccaagtgaagcatgccgcaccgcgccgttcagtccccctcgcgtcatgcactcggaaacccaaagacagcccgggaaggtagtgccccacggagtcccctcacagggaggcctcgccctccagttgcagcagggtaatgtcgggcatgtcgaggggctccacaagtggcccgtcccccccaaggagaccagcacaggggctttcggggcgctcacagtgactggagggtgtggcggggctgggcatctccttctcttcttcctcttcctcctcgtcctcgggatcgcgacccagcaagccgctgtccccgatcccaggcgaaggagtctccggctcttgggggtcgctctggaagctccccttgccgccgaccacgcccaagccgccctggcggggcgcagtggtcataatctggcacatggagacgatggctcgctggttggcgcacacgtcgtccgagagcacctggatgtgcgaggcctgctcgtccagggcccccctcatggccctcacgtcctcaaacagggcttgcagctgggctttcaggtgctccatcagttccttcatgccgccgttgtactccccggagatcacgtcccccactgccggcacggtggacacctccaggggcgccggcatgtcgccgccgtccttggtcatgatctccagcagaccgtcctccattgagtggcagaagcgggtggcggaggctctgggtcgcgtccagcccggcctccggggtgggggagggggtggagggggagaggtcccgggaggggctagcgggagccgagggaagcggaggctcccgagactggcggggagccgacgtgagagacgagtcctgggcagagggcgcaggcaggatcgcgggaggccgagaagaggctgcgggacgaggacccggcgagggtcccagagccggcgtctcttgggatcgccccgggacgaaagtgccctgccctgcctcgcctcccggatcgcgcccgtgtcagcgccgccctctgggcgccacaagcagagagcgcctgccggttccgtgggtcacagacgcgctcgcggaggggtccgcgtccaggctgaggccagcggcgcgtcggactcgggactcccccaggccattaccgggcagcgcccgcgagtgtggcagcagcagctggggtgggtctcccgggggtgtcgcggatgctcctctgtttccaaggcgacgcacggcacgtaaatgacgtgtgtctccatggtaaccaggaagtggcgaagaaaaagggaggatggctggaagctgcagtggggctctggagtctggactagcggggtggggggaggagaggggacgctacagtggcttcggccaaggctggaaagagcgtgtggtcgcaatgtttaatagggaagtatgagagagccgtctgctgcagaaacctccaagtccgggagagatcgtccctcccctagccggggtatgagacccagcgagactgccctggaaagatttttccagcccgcattcctttctcagaggatggcgctaaagtcgagtcctgcctccctgtcctccagcgatgcgcaggaaagcggagagggtagagaggctgttgctaatgatcccagagttgagctggggcacggtggcgctctggagccggacccaccgggcctgacggtgcagaggcaggaggagggcgctacggaggtttctgcagtaaatcagccctctagctatagaaatcaccggagcgggggaaggatgggactccctcctttatgagaccctaccgctcctacgcaggtctctgggagtttgtcccagatggggaggccaagtgcttaagttttgagaatgaaagctccataaggggagagatttttgtctcccctgcaccctccatcacggaatccccagctcctaaaatagtgcctggcacctagtatgtagatgcttaatatagttattgaatgaataacaaaaaccaccaagtcccacgctctcatccagaactccccaagccaaacgtagtgggttttaggagacctgaattcagtttcgtttctgccacttattcattcagcgaccttggccacatcattttcctcatctgttagggaattggactggataatctataatactatttctaattctgaataacagtctgcatcatctcacaggtgaaaaggtaaactgttgaccgttgtgtggagggtatggatggggggactgtgtgttagagtaattcccgctctctctttcagtgcccaagttcagacatacactgagtatccccaacctttgtgacaagccctttccctatttaaggggtggagcaggaagggtggaggaagaagaaaaattgtctttaatatacgtagatgattgcagattgagaaggaatcagcacctgggcagagcacaataattaataatgaccctaggaaattagggaagccaagtgatcggaagccaaaaatgaagttcataagaataaatctgggaaagagaaacaaactatatcacttcaagatagagaagaactacgtaaaggtgagtgttttgtagactggcggttcagtgacagcaaatgtgttacctttgggtttccctggttatgtgcttggtgatgaagagtgaggctggcccagggaaagttttgtgacactagaggactgcttgacctataccaatcttactgcttttaaaatagaaacaagtggggactatcctaaatgaccagcagcagaatgtttaaataaactaaggcaaaattgctgatacataaagtattatgcagccattaaaaatttgatttcccaaaacaaatatatgaacaaattttaaaaacacagtattgtattttctgaaactaatgattcaattctatttgcttgctcatttcttccttcattctacagatttccagcactctcaccttgcttaggactcctacctctgctctgtaccccacacgtggtaataacaccttagattactcctgaaactctggctcaagagaggacagaaatgcttttccttggtttccataagcacagctgaagtgggctggtgtttacaaagagactttattaaaaactataggaaaactagaaatagaaacagaacacatgaaaacagctgagcttacacagcataagtttctgattatactacagcaagcatgttctcagggcttataggtccaaccctgctttcatccttccgaggagag

SEQ ID NO: 916010 - DNA, 4001 bp, Homo sapiens
gtgtggggagatcacagttagcaattttttgtttacctaaaagccaggagccactgggtccttggcctgcttagatgcacgctgccgcttctgactaggtcagagcacagcacaatgatgaggaaattactttcaccttgacctttaaggcactgctggcgtcaggctatttagtatggacgcttctgttgacatttctgactgccccttttgcgaagtgaaaaaaaacaaacaaacaaacaaaaaaaaaaactggaggtcaagaggaaggaaggatgggttaaggagtcagcatatacaagtcagataatgtgaaaagtattttataagagctgctatcgggatgttggttattaccaaggaaaaatgtgtcatccttatccatctataactactgaacagtaactaaggaaagaaattcactcatcctttctgcttttgcaaacctcctgtttgcaggagcttatcaggtaatgttgtctgtctggactgtgaatcagatgcacagttcacccacaaacataaatacctatgaaaaagaaatataatttcttttagactcacccagaacttgcaagctttaagtacatggtctgtgaagtcaggagaggaactatactattggctgaaatctaatctttaacttaattggccaggaagacaaatagcaggattaaaacacacgaataatagtaataatacctattacttgtttagagctgggcactgggctaagtgatttatgttttattttatttaaaactcagacaagcccataaagtagaaacagctctccctatgatgaggatgagaaaacgaggcttcgagaaattactgtaaagaaattccccaaggtcaaacagcttataggaaacagaactcagactaagacaagtttattgaaccctatttttctataattttaacccatcctttatacatacaattgcatagttctgcaaatatgcctaaaattgcaaaatgtaactgattaaagtcttcagcagaaattttataatagaaaattttaatatttctctgtgaattagtgactttatgtgtttctattccccactatttctacttctctttttaaagacatagaaatatatgtatgtataaactttttaaaagctatgcacacacacacacaaacaacctgtttgtgattgtgtatatgagctgtgaataatcttctgatgccccctcccccccacccttagggtctctttcactcacattgtctatatattttccaatttttatctttctctttcctaactgatctctcttttataggccataatatgaagctaaattatattcttatttatcgtggtcatctaaaggagtgtttgctttctgttccaggtttttttaatgagactaaattaacttttatattttgtgggtttgcaggcttagtctgcttttatagtatattatttgtgtccacatctatcacttttattgtaaagtctttactgggcagggaaagcgcctttcctatctttgtatgttccacaagacttaacacagagcttgtgataaacatgaataaacgaaatcaagtaattaaggactcaaaagcctgggcctggcagtgtttccatagcaattggtagcaggaagcgacgaggctgagaatcacagaccatcttccataaacttgattctgtctccaattttggtcgcaagttgcttgtaggcccaccagacacagctgaggggtgggagggggcatgcggaggggcggacactgagctgaaacctattttacctcagcgagtttggatccaggagcctttccaacctatcgttcgggaaggcgttgtgggaaaagtgggcggaggtgccaatcgatcctccagtctcggctctatcctcccccagcccggttcccggtcatctcagggaccgtctggtagctgatcccggaacgcagctggccaacggataagtgcggggcacccgccacccgcgcggacccaggagcacctcccctaccgcatccccctcctccccacccccaggttccctcggctcgcggccctccgcgtcccgggctcccgccccagaacctgtgggcagatgtttcctccacgcagtaccctcccggggctctgcctccaggctcgcgtcccagcaccctaggcagaggtttcccccactctgtcctctcccggggctctacctccaagctcccgtccctgcccctgggcacagctttcccctactctgccctctccaggagcgctatctccaggctcccaccccaaccccccgggcagaggtttcccccatggccccccttccggggctctaccccaggttccggtccctcactcccgaacactccgggtgccctcacccagccaacccttgacgcgcttccacataccacgtgatccacacagctcactttgatctctcggggtgaccaagcttaagtttccttatctgaaaagtagggacactagtctccatctcgtttactcgggatgggacaagacgaccaaaaaagagaggattcctcatcaggtttattactcgttgccattcttgcaatgattaccgcccccgttgctgtggttgggggaggcgagcaaagggcagcggctgcgagcgcccgcccccgccccaccctcccagccccggacagcgcaggctgcggcttttcgtcctccactgagtcctgccggtggcccgagcccggtggcctcccggcgaccctcggcgcgaggcgacatggcaagcggccacagcctcctgctggagaacgcgcagcaagtggtgctggtgtgcgcccgcggcgagcgcttcctggcgcgggatgcgctgcgcagcctggcggtgctggaaggcgccagcctggtggtgggcaagtaagtggccgggcgcgcagggtggggaccgccacgggcggagctggccgctcttcctctcactgtgcactctggagggaaacaacgccgtgaaagcgtccctgcacagagatacacgggcaagccagcctttggggtacctgttgctaacacgctctgctgcttggggttgtcattccgtccaaagagctcagagaggaacaccccattggaacgcatcagggtcctgcctctgctggtaaaatatcactgtccaaccatcagaaggggttgaggtcctccccagtgcttcttaaagggaggccagaagaccacctttgtcagggtggcctgtggttattttattcttacggcagatttctgattccacctgcgtcccccactccctatccctagaattttagaatcagcatcactggggctggagttctgagacctgaatttttcaaaagtacctttcacatcctcgtgatctcgtacactaaagctttagaaccacggagaacatttagacgataatggccctgagtgataataaatcaagatttgaccatcagaaaacaagatatttctcttactcatctgagcttcctgccagatatgaataaaagaacaaagtttgagggcgacctggggtagcaagggaagttggatgagaatttgaatccaaagcgtgccatgggaccacaattgcacacgatcaatgagtctcacaaactgaccacggcttatctgaggcagtttagggttgtgcaagagcccagcttttaagggactgtgggttggtttaattttatttatttatttatttatttatttatttatttatttatttatttttgagacgcatgagccactgcgcccagcctattttttgtttttttgagacagggtctagctctgttgcccaggttggagtgcagtggcatgatcttggctccacctcccaggctcaactgcgatctccacctcccaggctcaagccatcctcccacctcagcttgacaagcagctgggactacaggtgcacgccaccacgccaggctaatttttgtattttttgtagagacaatgtctcactgtgttgcccaggctggtcttgaactcctgggctca

SEQ ID NO: 916011 - DNA, 4001 bp, Homo sapiens
caccactgtgtctggagtgccccattagccacctgctggctgtttaattttttttttttttttttgagacttgtttttgggtcttgctttgtcacccaggctggagtgcagtggtctaatcatcatagctcactcctgggcttaagcgatcctcccatcttgtctcttgagtagctgggactgcaggcatgtgccaccacacccggctaatttttatttttttatttttgtaaagatgaggtcttgttttattgcccaggctggtcttgaactcgtggactcaagcaatcctcctgcctcagcctcccaaagtgttgggattacaggcataagccaccacatctggttgaattattattattattatatagtttttgagatggagtcttgctctgtcattcaggttggagtgcagtggcacgatcttggctcactgcaacctcccgccttccaggttcaagcagttctcctgcctcagcctcccaagtagctgggattacaggtgcacgccaccatgcccagctaatttctgtatttttagtagagacagggtttcaccatgttggctaggctggtctcgaaatcctgacctcatgtgatctacccaccttggcatcccaaagtgccgggattacaggtgtgagccaccgcacctggttgaattctttattcattgaacaaattgtcctgagcacctactctgggccaggcacccttgtaggcactgggggtgcagctgtaaacaggacagacaaaaatccctgttccctcgtgaacttgcattgttctgggagccacagaaaatcaagctaataaataataataataataataataaagaatgccaggacatggtaggcactgagatgaaaaattaagtggactaaaggaatctttcaacacagaggaggtggcatctgagcagagacctggaggagaagagggagcaagccacgtggacatctccagggaacagattctaggaccctggtgtggctagggtggctgcagaggagggagggaggaggaaaaagatgggaattgggagcagggaggagctgagaatccaactgcggtgggccatggtgagtggagactttggccttgactctaagtgaagtgggagcggagggagtgttttgggcagaggaggggcccttctggctgctttgaggagcaaggacagtgggcagctgcgggagaccagtggtggggccacgggatattccagagatagtgtggttctgagcagggcagcagtggcaggaggtgagagcagaactgatggagtggggaggggagtgagaaaggggtcagaggtgaccccaggagccggaaggatgaggctgcaggagagcaggtcaggtgggggagaccagctccctactacggccaagcccgagatgcctgagacctctgcagggagaggcccaggaggcagtggggttctggagtccagcgccccgggagaaagggagagcagaaagaatgactaatgtgtaatcagcaaggctttcccagccgtggtccagaagaaaacccccctccccattttacagatgctgatactgaggttgggacttgaggccatgctgctgaacatgaaggagacacagaacaagcttcctctgttcctcctgaaaatgcagttttgggggtggattggggagcaggatttcatagaataattccttcccagcttggtttgaatgatttaatctcagccggatgtcagctaggggtgggggatcaggaacgatccctgagaccatggtgatgcctcggtttctctctgatcctcagtttcctcctctgtgaagtggggacaataacccccactatgatctgcccaaagccaggacccaggaggtgaggaagaaaggatgggccagcccacgcattcccgccctccttctagccctccctccctctacgtcccactcacgtagacagtttctcttgcaaagccagtcggaaatattcctcccagggcaccgccatccttctggcagttgccccagctttctttccaccagctggagttttgcacaagcttaggagaccctgggggttctgtggagcgtggtgtggaagcctgctcagctcggcccagaaggcagccaccagcaggctctggttgcctggcaaccgaccacacaacattccatcgcctagctgccgcctggagggagagggaggggcctgcgaggaaaggagcacctctgcccctcctggagaggcctgtaacaccccatcaaatcggtggtgcaatggagaggatggggctcccttggccaagaaattgcctctcttagtgccccacgtttggccaagcttcttcctggctgggtgggatagcctcactatctgggccacgcttgtgtgtactcagttaatggctcgaaagaataattactgggcgcgcactgctagccaggccctgggtggagtcattcactcccagccctttgaggcgccactccctgtcctggtgatggggctcctctggctatttctcagggagcccccagcctggttagggaaagggagaccatcaggacctcctagtggagaccagcttagaagggatggtctggacttgggggatggggtgatgggagaagctgagagttcgggcatttatttatttgacatggagtttcgctctgtcacccaggctggagtgcagaggctcgatctcggctcactgcaacctctgcctcccaggttcaagcgattctcgtgcctcagcctcccgagtagctgggattacaggtgaactccaccaggcctggctaatttttgtatttttattagagatgggctttcaccatgttggtcaggctggtcttgaaatcctgacctcaagtgagccacctgccttggcctcccaaagtgctgggattacaggcgtgagccaccacacctggccaatagtttgggctttactgtgggttagatgctatgctcagcactctatagtatctaaattaatccctaagacagccctgtggggggtggatggtactagggaaaagtaccaagagtaatataaaaagtacccttgggttcttcaattcaaagcaacaaacactagcatcttgtcctccctgcttccggtcattttattttccattttaaataatttattttccattcaaagaaatgtattttcttaatgtagagcaatgctgtttcaaaaacctatagttccttgtaatcctacattgcttaaaaaactcctaaggatttcgttagagcatgttttaaaaaacagaactagggccgggtgcggtggctgatgcctgtaatctcagcactctgggaggccaaggtgggaggcttgtttgagcccaggagttccagcccagcctgtgtaacacagagagaccccatctctacaaaaaataataagattagctggggatagtggcatgtgtctatagttccagctactcgggaagctgaggcaggaggatcacttgagcccaggaggttgaggttgcagtgagctatgatcactccactgcactccagcgtgggcaacagagcaagaccctgtctcaatcaatcaatcaatcaatatctaagaaattaaaaagaactaaaataatgtacattttacctttgagcatttttaaaaattaaattggacatgctgtctttctgcacaaattgatgtgaagttacaataagatatgatctcattttttcattcttttttttttgagatggagtcttgctctgtgacctaggctggagtgcagtggcacgatctcctctcactgcaacctctgcctcctgggttcaagcgagtctcctgcctcagcctctggagtagctgagattgaaggcgcgcgccaccgcatctggctagttttttgtatttttagtagagatgggtttttgccatgttggccaggctggtcatgaactcctgacttcaggcgatctgcccgcctcagcctcccaaagtcctgggattacaggcgtgagccacc

SEQ ID NO: 916012 - DNA, 4001 bp, Homo sapiens
ctataccttacataagacagaatgttcaacagacttacttgtgaatatctaagtcccataatttactttgctctttccttaaatgcaatttcaacccatggttcccattgtcttccccatcctcttttggctttttaaaagacagggattccctggatcctggatctagtacctaatcctcttttttaaaacaaaaacaaaaacaaaacactgagtttctctgttgtccagtcttgtctcaaattcccgggcgcaagtgatcctcctgcctctgcctcccgagtagctgggattacaggtgcgcactgctgtgccagttctggtacctaatccctagttgggtacttaatccttacatcacaagtcatttgcagaaaatattttcatttctataatcatatttgatgccaaagttatgtttctaggctatctcctctagccatcttttagatccagaatgtaaaataaatttaaacaatgtggttttggggtacgggaacgaatgacaaattgcaaaataaaaactgttttcaactgtgaaattttagaagccgggcgcggtggctcacgcctgtaatcccagcactttgggaggccgaggctagtggatcgcccaaggtcaggaattcgagaccagcttgatcaacatgttggaaccccgtttctactaaatataaaaaattagccaggcatggtggcgcatgcctgtaatcccagctactcaggaggctgaggcaggagaatcgcttgaacccgggaggtggaggttgcagtgagccgagatcgcgccactgcactgtagcttgggtgacagagtgagaccctgtctcacaaaaaaaaaaaaaaaaaaaaaaaaaattagatttcctattgttccctttaatcgcaataagcctgactgacctatctcacagggacctctagaacactaactcagtagaggaggggtgcaggattgattttaacagagtaaaagagaacctaagatgtgttaacacaattgggtgatgagaggtcacggtacatgaataaagactgtaattcttgttttactccatttgtcagtctcagcagtgaaaggtgatttccaggcgactctataaaccagtatcaccggacctacctcctcacaaactgtagaaaagcggttgaggaactgtacagtgtgcaccacaaattggtttagaaaagccaccgttcttttctgttgaatagctggcacctgtgttacgtaaaaacaaacatggttcatacaggaggaacgtacacagtgcaaatcttttcatatttggacataatcacgaggcactttgctgtgtgatatgaatttcttgaaggactgggaatagtcattaacttgtttcctaagctgtgggtggggtgtccgaagatgacagaggtgcacaaaagtttgagaacaggctctagactcactggtacgaattttggcaggcaaaaagcaccacacataaacacacacaaaatcttgggggctgaataagaggtagggctagctatcgcaaccggcgtgtgtcgccggcggcagagagacaagcgagatgggaagcgacagttgggagatgcacaccgtctccttaatcagctcaggagggaccccatttcaaggtggactgtggggctctccctcctgaggccccacaggcctgtcacaagggcccgaggccgtgacagggtggggactcggaaggtgggtgtctccccggaaagctgcgtcttccccatcctcctcccggctcgtcgggagtctagcaccgtcttttacaaaccttggtcaggtctatgcctgaccccatgagaggaagcccgtcctcatccatctcctcagcgggcggtggaccccgagttcacccacaaacccctcccagatggggcccgcccaacccggtaatcacgtctcaactttccccccaagtgcccgcctccggggcccttcccgccggaagaaagcttctccgctcactaatcactcggcggcttccggagagcccgcctcctcgctcggcattctgggattggtagttttagtccagattgtgacgtcaatttcggggtggcgcgcggtggtgcaaggatgcagttagagcactgaaatcttagaaaggaggcaacaaaacaaaacaaaaaaacaaagccagaagttgcgtccttttgaggttatccctacttagtcctgtctgttatataataactccgtcattccttgagcaacaattttttttttgttgttgttaatcctaagtgccatatactctgctaggcttttactgggaaaacaaagattgagtttgattgctgcacgggagaggtttatgccctgaagaatgagaaataagacctacttccaaagcgtgtgtgtgtgtatacacacaagttctcgctatttccccaggctggtctcgaactcctggcctcaagcgattctcctgcctcagcctcacacgattctcctgcctcagcctcacagagtgctgggattacaggcgtgagccaacgcgcctggtcttccaaaggtttttaaaacatgaaataaaatgtcaactactagatgtgaggcacaaacctacggaagtgactgccacttacagggagcatcaaaaagatgaagaccaagactgcagtgggcagttttgttttaaagatggggggtctcgctttgttacccagtctggcgtgcagtgaggatcatagctcaccttagtctcaaaccctttggctcaaatgatcctcatgccttggcctccctaagtgctgggattataggtgtgagccactggcacctggcctgttggtttggttgaagcaaataatcccataaatggagaatggtaggaaatgaggtaagagtgttactggtggagggtgtccaggttcttttgaacaaagaattggacaaaacgcacaaatcaaggagagaatgaaccaacaaaagcaaagattcattgaaaaccaaagtacgctccacagtgtactggatacagaatcttcttaggtccaaatacccactagagatttcccattggacactggtgttctcctcatgcaaatgaagtggtggcccacaatcagtctgattggttatggaaagcaaccaatcagaggctgaagtaaaatgacaaaggtcatactcctatacaaacatctgattggttgtggaaagcaaccaatcattggctaaagtgatgttacttagttgcacttctatgcaaaggaagatttggcccgcaatcagtctgattggttgaggtactttcaatttccatctgcctgtcagaaaaggtggggatttgcaaagggagtagccgctggtccttttgttacttaggtgtggaaatttggggtttaccttttgatttagttctaggaagtcagcgtgaatcggcgttaggttccctgcctccagaccctattctgcctcaggagacgtagccagaaaattttcgtttaagggccttttatgccagatttgatactatagtccatgtttatctaatgtgattcataggccatctgtagcaattatttgggtgtgggtggtgtttcttaaagttgcacgttgcccagcttaaccttagcgtgatcaccttctcctgattgaactttcttaatttttctttcaggaaggcagatcttctctggttttctttgtatcactatggtcatttcctttcagtttcttttgctggttgcttcttatgtccccaatctctagagtttctcacatttatatatctaacccagaccttacattggaagccagtatagctgaagcagagtgagcaaggtggggaactgaaggacatgatggctaaaagttatgtggagacctgatcatgcagagctttatgggacatcataaggactttggctttcactctgggtatgatgggaagtcatggaaagatctagagcagagaaatgatgggagctacagaagagcttttaagcagggggtggcatgatcagaattgcatttcgggaca

SEQ ID NO: 916013 - DNA, 4001 bp, Homo sapiens
aacaatgtcatgaaacaccttaggaacacctgagtttatgtgagtaatccattctggagctgtgcaacatggcagctctgaagtatatattcattacagtattatctttcccaatttaaagaggacatagtgttatttttcccattttaaagaagaggtcactggggcactaacatgttgagtctggctctagaacccatactgttaatgactaaaattataacacctctcagaagttatttttcaaaaatatagtcataacatatggtccaatcaagttaccacctgtacttgagaggaagaaacccaaattccagagctcttaattcccattacgttactttgtcaattaggctaaaccagcctaattcagttattgaagctaaaaatagagcctccatgaaaatgtttccctaattaaaccgtgacttctaaaatgtgttaaataagaaaaaatacaattcctatataaattatcctatagtacttttaaataataaaacaacacttaaaggatttcaaatgaagaaaatacatactttactgttttaatacattgttcttctggctgaggctggtcaaagctacactgatcttcaaataaaggctcgtcaatgctacactgttcttcaagcaacggctggtgaacttgttctgacaaaggatggtcgacttttcttgcttgcttcctatgtctttcctcttcagctaaatagagatgtttcagattatctgggtatcgatctgtgaattgagattccagtgacgtttgagccttcttttccttccgtagcaatttcttgtaactttgctgtattttcagttttcttcgaaaagcaaagccttgtcctacattgaggaatatcatccaaaattactttcagagaaaagaagttgaacgaagaatggagctgttaattacaaatgaaaactttttttacgtcatcacattcagattctagtattatattttgctttaaaaaattatttcaagcaacaaatttaagctgatggattgcatagtaagttggccctttgcaaaaagaccaggctaacagtcatgcggaaatccaagtaagaatctcaaagaaaaactgaccagttcagactgttgcacaacttgagtttacagctgtattcacaaatcaaaacaaattccttagttcatctaaaacacttaatctgagccttcaataaatgcttaaaaaataggaaagaaaatgccacatctagtatcttggacaaactacatgttttcgaaaatgtttcaacacgaaagaaaaagacagtgtatggttgtctgaaaagctagcaattatcggaagactgaatttaacatttatatattccaagtgggatctaagagaccttacagacagcaatacaaaatgacaaacacaaattaaagcgaaggctggagggcctcgggtatttgtaataaggaagaattcggagcagtgtttctggccctgtcctcctctctatcctttaccttaccacatgcgcaagagttcacagggtcatagactctctctgctcagtttctcaggaaaaatataggaaaaaagttctgatgaaatacagggttacgtcagaaaagacgtttaaataatagcaacactgctccgtcttcctatctagagctctgcgaagctcacagctttagcgggctcaggaatgaattcccttgccccaagtaggaccgggtctggttcctaaatccttcttccaagcttcagcgaatcttatatcctaaaacttagcaagcctgaggatttgcaaatggttgccttcttacataccctcgcgaacgctccccacgaaggcttgcgggtggttaggccgccatgtcttctgtctcacattcttattcctgtacccgacagtggaaaccccttcaccacgcgcctcaataccaccaggccgccacttcgcggaccgcctcaccggcgccattgcagccgactaactgcgtcatcagaagaccacgacggacgcccacaaaatacgtcaccaagccgaagcaatcaatcgctcagaaggaatccggctcggagctctactgagcctgcctgtgctaatttgggccgagctggcgcctcacggccatgtttgcgccacctacagcctcggagggtgagcgtcatggcggcttcttgccctctcccggtgaccccggacctgcccacgctgcgtgccaagttgcagggactgctgcagttcctgagggatgccctgtccatttccaatgcacataccgtggatttctacacagaatccgtgtgggaggagctggtcgacttgccaccggagacagtgctggctgcgctgaggaagtcagcgtcggagacggaggccctgccctcagagacgcgccccctagtggaagcagagtgggaagcaggtgggtggtggggtaggcggggcgggaagggaggcggaggagaaggtcccggcagacgaagcgagccccctggtggaagccagcagaaccaggtgcgtggcggcggaggcggggcggcccgctgggaaaccgaggaggggtcggattagttgaggggtggggtggggatgttctttggaatcaggatcactctttctttgggtgcttgtgtatgtccacaatttaaagaaagcaggaaacagggcaggggagttccttcatctagtaattccataataattgacgctagggaaactaggggagcagtgctctcacaggttttataaatgccagcatgtggtggaagattactcaacagttaataaagataatttcaagtggtggtaatgaagtagaaaataaaaacagtgtaatgtggtagggattgtgtaaggaggctgcctcaatttaggaggtcaggaacatgagaaggcactagctgcagagccacagggaggggttgcaggcggtgggaaccgcaggctaggcttggctctagccaggtgaggggctgcaggtgcaggacgggaggcaagcagaggccagatggcacaggcctttctaggccttggaaggattttggattttaagtgtgacggaaacccttgggattatttaggcaacatagtgacctaattcacatttgaaaagataactgtgaattatttgaagaatagactagggcaaaagctgaagctgagaggccagttaggagactacctcagtagtacaacagatgattgtatcttggactaggatggtattcggatagtcactatttcatttaaaaactattttaaagtacctaatatgtgtcttgaatttttgtaggctcaagcttttcctaccctcaagaaatgtagattcttctcaggcaagcatattttggaagtagaatgatggacaccaacaggcttctgggatttttactttccttctagacttcccaaagttacccttactagtgaactttattcattgagcattctctgaatgcaaagcatcactagagggacctcttataatagcacttggtaaatactgttgttgtttttttaagtaattgttattgaaaagttaggcacttcttcagtttgctctcataataaatatatggcacttatgatatgacaattttacttaaactccaaaagagcagagtctttgtctgacttgtcaactgatgtattcccagcacttggtaaaatacttggcatacattagatactggatgaatatttgttgaatggaggaattaatgagttactcatgttagttttaaataaataaaatgaaactactctcaagtttagagtgtaagactttaatacgtgtttagcctggtctccagacaatggtagagtcagattgtcttacatattctaataataattggattatttgatatttactatataccctgtagtgtgctaagtgtcttcatgtgtattttctcttttaatctttacatcagccttgcaagataggttctgttattgtcgatttgtggaattataacttgaggagttaatttgcaagggatatagctgataatgga

SEQ ID NO: 916014 - DNA, 4001 bp, Homo sapiens
ctgcttctgcctagttgatgttcctgttctaaattcatagacacaaggaaataaagcctcagagaggctaagcaattcacctgtctaaagtcacacagctggtgcgtggcaaacctagcctttgaacaccaaaagttgaccctctgcagcctctccatagagagaggggatatgcctgtttctggagaccagcagatctctgagagtaagtcctgcagacggcaaacctacaattcatcttaatttttttctgatgttctacagtgtcattgctgatttattccatcattttggaattactggctaataggatggcccagctcactgatctggttcgcgttttcactctttaagagaaaccagccattgatagcaacgggaatgtgtctcgacaatttaatcacaccatgactctcctctctctccctctcccttgttggtttcgaggctaattcctttttttgtattattatactttaagttttagggtacatgtgcacattgtgcaggttagttacatatgtatacatgtgccatgctggtgtgctgcacccactaactcgtcatctagcatcaggtatatctcccaaagctatccctcccccctccccccaccccacaacagtccccagagtgtgatgttccccttcctgtgtccatgtgatctcattgttcaattcccacctatgagtgagaatatgcggtgtttggttttttgttcttgcgatagtttactgagaatgatgatttccaatttcatccatgtccctacaaaggacatgaaaaccataaaaaccctagaagaaaacctaggcaataccattcaggacataggcatgggcaaggacttcacgtctaaaacaccaaaagcaatggcaacaaaagacaaaattgacaaaagggatctaattaaactaaagagcttctgtacagcaaaagaaagtaccatcagagtgaacaggcaacctacaaaatgggagaaaattttcgcaacatacttatctgacaaaaagctaatatccagaatctacaatgaacttaaacaaatttacaagaaaaaaacaaacaaccccatcaaaaagtgggcaaaggacatgaacagacacttctcaaaagaagacatttatgcagccaaaaaacacatgaaaaaatgctcatcatcactggccatcagagaaatgcaaatcaaaaccacaatgagataccatctcacaccagttagaatggcaatcattaaaaagtcaggaaacaacaggtgctggagaggatgtggagaaataggaacacttttacactgttggtgggactgtaaactagttcaaccattgtggaagtcagtgtggcgattcctcagggatctagaactagaaataccatttgacccagctaattcctatttcacttgttctcgaaaacatgattggtttcagcagaggggagacttacctgccttaggttctccgaggcataaaagggccggacagcccccgagttgggggaactctgaagcttcttggtggctggaaccttggtcatcttaaaaatccttcaggttttagcctgtgcccccaagacaaggatttttccagaatcttctacttcagtagttactggtatgagaagtttcggcaacttctccctgatccccaagtcccaattacacgaactccaaagcggtttccttctgaagagtaatgagaaagcacctgggtctcccacagacgggataaggaagtccgggtagggcagaatcaggcaagcctggacttatttactttttgaaaggttataaacttctgtaagcttcctcctcttcggaagggatatctttctcttctataagcaaaataaaatatgaactaaaaaataaataaaattccagtgacaaagtgtgagaggggtcccatggaggggctcccagatcgccatcctccgagagcggccgagaactaaggcggccccaacgaggggtttatcgcactgcggggaaagtaggcaactgctaacccttgggccgggtgggggtggggggaacccagttgcttggcaacgggacgccgaggagggcttcctcattggctggaattcgtgggggcggggtcatgggggtcgtgaactctcccaggttgctgggacgccggctcagagcagccggctgccaccggagctgcattctctaaacaaattggtttctgtttttaggcctgaggaccataccctttctctctgcctgactacaagcgaatccttcttttcaaactctgctctgtactgctgctaacccactagtaattttttgtgccttggggtgggtggcctgtagtcctgcaattcttaacctgagatgcctatttctcccgtttttccacctgacaaactcctgctcatccttcaaagcccttcatttcataaaatgaaatattgttattccatttatttagcaaagatttattgactctgctaaaataaaatataataaagtaaaaatgaaattaaaaaaaatgagaccttcaggacttcacgatctatagtgtgtatgtttgggatggggagcaaaagataagaaacattgttataaggcaggatgatttatgatgtgctgggaaagtatcatagggtattgtgggagcaaagaaaagggacagctgtatatagatatagatatatgcacacacatacatatacacatatatgaatatacatatgtagacatgtatatatgtgtgtatatacgtatttgtgtgtgtgggcatgtatgcatatgacatttattgagtgcttaggatgtgctagacactgttctaagtgtcacatactgactcaatccatacagcacctctttaaagaaggtgttttattaccccattgtacagcctaagcaactgaagcacagagacattaaatgacaagtttaaagtcacgcatgtgctgcagctgaaattcaaagccagaactgtttgagtctaaagagcaagcttttaaccacttagatgcctaactttgctgagtttggcttctatgtctttaaaatggggatactatctttgccacaggttgttaagaattgaagtggatgatgcatatgaaggctgagcccatggggagtcctagctaagtggtactattattattccctgacatcacttcccgaggaagaatcaggcattctcactgtgctgggttcatttcacagcagatgttagtactaactgatatttattgatcacttgctctgtgctaggtactgtactaagcacttcgcatacattaattcatttaatccttccaataaccctacggggtaggttcccagcctgcagcagatttatttcgtatgtttggatttgaatgccttatccttggcattgtttcacactggatcgatctgattcctgttttatccaacaaccttgagctgctggggattatgatatcattatggctgcatcttctctctttctttctttctttttctttttctttttttttgaggcagagtcttgctgtgttgcccaggctggagtgcagtggcgtgatctcggctcactgcaacctccgcctcccgggttcaagcgattctcctgcatcagccttctgagtagctgggattacaggggcatgccaccaggcaggccaggctaatttttgtatttttagtagagacggggtttcaccatgttggccaggctggtctcaaactcctgaactcaagttatctgctgggattacaggtgtgagccatggcgcccagctcatcttctctttagaaggcatctactgcaagatgacactctacagaatgcaaaatacctagccaagtaactctagatgctggtgcctgaaagtcattattttctcaccattgcctaaagactgaccctgaccttccctttcacaggaagttttggttctccggcttcttttgtgggcagcattaagcaatcggcagacactttcagaatgaagcagataaagggaatcatgtttgggagatagggctg

SEQ ID NO: 916015 - DNA, 4001 bp, Homo sapiens
gatttcactgcggctgcttcaatgtccttttcttttcattattggttaaaaaataccatttcacccttacatacttcagaatgcatctctaaaaatgaacatttcctatataaccatgatgccatttttatatctaacaatattatctattaatacaataatttctttgaagtatacagcattttaaaatctaacaagttggcctgaccaaattgtgatcccagaattagccacttagtggctacataaccttgggcaagttacttaacttctctaagcattagtttcctcacctgtaaaacgatagcaactgcattttaacatcttggagtggtgaagattaaacaagacaaactctgtaaagtactgagcacaaagcctggcccgttgtaatcactcaacaaacatcagctctcattaacactgtaaaccacatttcaaatcatggtgctgtccctgcctatgaaataaacaactaaaagtgttactttaatagagttccaccttaaagacagtaattaaaggttcaacagaggccctttgtacctccttactgctttttgaaaagtaagatttgtaaataaacaagaataatgaggttgggctcagtggctcacgcctgtaatcccagcactttggaaggccgaggtgggcagatcacctgaggtcgggagttcgagaccagcctggccaacatggcgaaaccctgtctctactaaaaacacaaaaattagctcggcatggtggtgggagcctgtagtcccagctatttgggaggctgaggcgggaggattgcttgaactcgggaagcagaggctgcagtaagccgacattgcgtcactgtactccagccctggggacagagccagaccctgtctcaaaaataaataaataagaatgatgaataaattacagttgctagtcttaacaaggaaaatggaatttggagtcaagggatttcaagtcccaaggcttgaattccagtgttgggttagcccttcattcatgcactcaacaaataatttattgagcgccagtggctgggccacagacctccaggcaaggagcacatattccactccaggaaaacaggcagtaagccgagtacacaaaggcaggtcgtcttacactgatggacgcgaaccttgggcaagcccacttccagactttttggtacagtggagttgtgagagctccttcctctactcgccaggttgtgtaaattaaggacaccctgagaggtaaatgggaaagcagctccccagacgccaatcgtcctccttaaacagtaagcaccgggtacgcgctactctgtggcccgggctgaataacaaggtgttattgggttaaggaaacggtcgtgacgccgttttcctctagtgtattgtttcactttttttttttttttttttttttgagacggagtctcgctctgtcgcccaggctggagtgcagtggcgcgatctcggctcactgcaagctctgcctcccgggttcacgccattctcctgcctcagcctcccgagtagctgggattacaggcgcccgccgccacgcccggctaatttttttttttttatttttagtagagacggggtttcactgtgttagccaggatggtctcgatctcctgacctcgtgatccgcccgcctccgcctcccaaagcgctgggattacaggcgtgagccaccgcgcccggcctgtttcacattttaagtagacaccgttcttgagaagcaatagatttcgaccaatgtgcaccgttcccgcggcgccccgccgcgcccggaaccgctgcttacctggcgcccggcaaggaaggctgccggagggttcataggtgtttcctccgcccccggagaagcccggtgtgggcggcgtcacctcagaaacgccatcggcgcgcctgccccgagcggcgggggcgagcccggagccccggggccccgcgccctcggccgacccccgccccgtactccaaccgcctgcctggtgcccacgcggcgtgcgcccgccggggctcggggctccccgccagggtttccgggccgcagccccgctgcgctggtgggcactgttcttctgcctcggaaactgggggctcccaagtggctcaggctgcgtatggacgctttttgcccacgcccgaggctccggcgctggaaggcctgaaagaaccggctgttcaccactacccagagaatgaagaagtcaataaaggctgctgcgccgcccccagcactctggtttatgacatttgagttgctcacttccctatcttccatcttccccctaataaccgtgagctcggccgtgctcgctcctgtgtagctggctcccagaacaggacctgacactcgaatgcgtggaggcagagcccagccctcggggataacagttgcgggctaccctagcacctttgatactttaaaccaagaatcacagatgaagagggggaaatttactcttgggagctcctgaaaagcaatgaggagaaccacggtactttgtcatgacaaaatctacgatattctgggttgaatctaagctttttcacctgttcttccatagtcacctcttcatccccctttcactcttcctaagatgtgggaacgggactaggaaaaaataaggcttatcacacttcagccccggctgcccatccctgaatgcttaacccatcagacagcaacacaattactaaatacggtcggtcttacagggtttcaactttactttttggttgaatatgaaatgccaaaacatgcccttgtgttcaaaaaatacaatctgaaaatggaaaaacaaaattaagatttcttattttgaagctttactgataggctcatgtttgggagaccaaagcaatgtcttagaatttaaaatcaagaaagctgggcgcagtggcctgtaaccccagcactttgggaggccaatgtaggaggatctgttgcgttcaggagtttgagaccagcctgagcaacatggtgacacccacctctaaaaaactttttttttttttttttttgagatggagtctggctcttgttgcctgagctggagtgcaatggcacaatctcggctcactgcaaactctgcctctggcctcaagcaaatctcctgcctcagcctcccgagtagctgggattacaggtgcccgccaccacgccacctttgttgtatttttagtagagatgggtttcactaccttggccaggctggtcgcgaactcctgacctcagttgacccacccacttcagcctcccaaagtgctgggattacaggtgtgagctaccgcacctggccaaaaaataaatttttttttaaactgggcgtggtggtgcactcctgtggtctcagctactcacgaggctgacttgagctgggagatggcggctccaatgagctgtgatcatgccactgcattccagtccgatcgagagtgagaccttgactcaaaaaaacaaaaatcaggccagacgtggtggctcacgcctgtaatcccagcactttgagaggccgaggaggatggatcatgagattagaagtttgagaccagcctagccaatacaacgaaaccctgtctctactaaaaatcaaacaaacaaacaaacaaacaaaaactagccacgtgtggtggtgcgcacccatagtcccagctactcggaaggctgaggcaggagaatcgcttgaatgcaggagatggaggttacagtgagccaagactgcgccacctcactccagcctaggcaatagagggacactccgtatcaaaaaaaaaaaaaaacaaaaaaacaccaaccaccactaccaccaaaacccaaaaccaaatagccaataaatacaaaaaggtggtctacttccctgatcattacagaaatgcaaaaaaataaaaataaataaataaatcaacaaagcaaattctgggtgggtatttgctaaaaacagtctagcagtagatgactgcagtaagttggtggtgatgagatgtaaaggaatg

SEQ ID NO: 916016 - DNA, 4001 bp, Homo sapiens
ctgactaacaaggtttgggcacaggatgctctctctgggacctctttcagccctggaatttggggcagctccaatttcatattgtccaggagctgttctatgttccagggccctttgggtcctaagtggatttgtaatgcaccatcttaataacatgaactgggtatatctgaccttcactgacagtgtgatttgacctctctgagcttcagtttcctcatctgtagaatggggatacccacacccatatctcagcgcaaaataatgtctgtaaagtggttagcatagtgcctagctcatgacagacgctgggcgaacgtagcctgtttgtgaagtgggattttcaagtaccagtctgtctggcccatgagatcattggctgggttatgcaccattctccaggaaccaaaagctccatcacctcctgcctttttgctgatccatatgcgcatacatagtcactctcccctagggtgctggcttctcttcaggttccagatgttaacccaggcctttccctttcgatcagtgccctctgggatgggctcctacattccctggggaacagatccaccccctcacccccatcctcatagcttggcctgcagagcatctcctggatgtcctgacccctggcttaccaccctctcattcaagggtctgaaactcatagtccatggggccaattcaacctacctccagttctgttccacagtgtttcaaaacataaatgtgggtcatgcactcactctcctggccacaggccccactcctccctattggctaagctcccctccccacaattctcacattttctgtaactgcctagagccagtaggaatttgaatttgcagttcctgttaggaatctaaaagctgcccacttctggggaacagcgtgtgcgaggaaaagtgcagagaagcccagcagcccaggtcaggggacgtcaggcaagggcctcctgccccttgggcctcagtctattcaccacagcatccatagtcctgggcgcatgggcagctcttggcaaatacagtttgaatgaatgaagtttcctccaggcagagatcatcttcatttatctaatatctaattaggcctgcacctcatctgcttctgaattttaacaacctgcctttaaaagacaagcctgcccccgaaggattccctagggaccttgggacaggcagctatgtggatcatattgagccagggctgcacaacctggaattaaacatgtgcttagggcactagccaaacaggagcacagaaacacatacacagttttttgttgttgttgttgtttttcttgttttttgtttgtttgttttgttttttgttttttaaggattattatgggaggaaaataaaaatttgttgaactttttttttttccttttttgagagcgtctctctctctctctgtcacccaggctagcgtgcagtggttcaatctcggctcactgcagcctcaaccttcccgggcttaagcgatcctcccccttcagcctcccaagaagctgggactacaggtggcaccaccacgcccggctaagtttttaaatattttgtaaagacgaatttgcccgagctggtctcgaacccctgggctcaagcgatcctcttgcctcagcctcccaaagtgctagaattacaggcatgagccacctcgcgcggctctggagttattttacacactacaatttatttatgcatgattgcgggagaccctgatactttcaacgcttagggcagcgagatatgaatggactggggaccgcgaccgctctttccttttccctggcagggggagctgtggcgcagcaggcgcggccgggcgggcggcgaaacttaccagtggcggggcccggactgcttgtccgtggctgctccggccgcttgtccgacggctgctgcaactgcgcttccgacggtgccgggaggactgcttgctgcgcggcctcgctgcgccacacccccagccccacgcccgggcgttctgggacccctggaacgggcgcctttgtgactcgcacaaacatggacgttctcccctgcaagtccgctgggagggcacagggccctcgggaggagaggacaagagcagctggttggagggaagcttttggttgggggagaggggcgacacactctccagcgaccccttaccagactacccggaccctcatgacgctaagtgacttcttgagtcaatcaacagtcttagcccctccctcggccaacgccatgcaatcgctggtccacctcgccccactcacaccccattcaccgtcttcttagcctacacctacactcatgctcacagcagccctgctaggtacagacttcacacgcagctaactcaaaggagcccagttttttctactctgaaaaataaaataaagtaaaaataaattaaaaaaaaatgttggggcggggggggaaagagatatttcatgagaaaaataacttcatcagtgcaggagaattttcttcagaacatccacctgacccccacccactgtgagcataacacgggaacccaagtgtgatccaggcaagtgagcttttcactgccctaacggagtttagtggtttaaagatacacatttttcatacaatcggccctgaaacacaagtcaactactttctctggggctaagctctagaaacaatcacagaattaatggaaaattattgggggtacctgttttctacagtaattttgattccatgtgatttccactttaactcctagccccctgagtggattgtagtagctcagccctgctaaggtctccacttcatccgtaaattcttgggacaggatgtgtgttttagaacttaccatattttggaggccaggtgcgctggctcatgcctataatcctagcactttgggaggctgaggcaggtagatcatttaaggtcaggagctcaagaccagcctggccaacatggtgaaaccctgtgtatttcttttttttttttttttttttttgtatttctactaaaaatataacaaatttagcccggcatggtggcacacacccggtgggtgcctgtagtctctgctactcgggaggctagggcaggagaattgcttgaacccaggaggcaaaggttgccgtgagccaagatcacactcactccagcctgggtgacagagtgagactccgtttcaaaaaaaaaaaaaagaacttaccatgtttttggtttcagaaagataatatggtacgcaagggagtatgttgcccctaatgttgctggcagccacgttgtaaccatgagggaagtcagtgggacagtatattacatacagggttcgggccacacagtccagatcaaacgaattactgtttctgcaaggaaacatcaatattcatgtcaagtaagataaggatagattatgaacagctacatgtcaggccttgcctccaaatgattcatatgaagtgttttggatacacttgaccatcctcattttacagatggggaaacagacttagagaaaccgagttttgcagtcagtggagcagccaggatttgaacccaaggctccctgtctctggagccccacgcttttccacaccctgactgaaaccacagccccaaatctgagcagccctgcaagctgatatctcccatctctgatatttaaagggctgctccagcactcagctccatgcagagcccaatgactcacacatttcaagtgtcaacgactgaaaaatgattaagttcaattaggttcaggacttgttaaaaatagaccttcctccgacgaatttactctctttgtctttatgggcgcagctctcagcagccgccatgcagagacgtatcaggcttttttaattagaacatgtcagaatcgattctgctaaagggaccttctgctttatcagcgggacttggagcagggtgagatgccagcttgccaaagcgatgagccagcggtgggaaatgttggcgacagcagagcctccagaacacaggag

SEQ ID NO: 916017 - DNA, 4001 bp, Homo sapiens
atgttgaagaaatgtataaaggctccacatggaacccagaatgtatgtaattgcacactcaggattactatgaaatctggcactaatcaaactgatacggtgctcctttcaagtcagctgtctcttcaatcaagtccttcactgaagaaatttcaaatcacaagtataaatctctgtagttgtacttctttacaaagtcgtacaactgaatctctttataaaaaaaaaaggaaggctttttatttctagacctctacttcaagtgaaaattaaacaattcaattcattaggctgctttttggcagtctacctataggtttcacaaacgacttttcagagaggtatctcaggagttcatcgactggcagacctagttagcaggacaaccgaactacagggcactcacaggtttcctttttttctcccggatttacttttacgtcgctggactataggcatacttaaatcttattacagaatatttctgaatttccattctgactgttcaaccagtagcagagatacggaacctgactagggtcaatttcaaacctcattcaggtctgtactattgtcttgctgtaactaagaatgaaaagagctggctgcaaccaaactaggtaacaataatagtaaacgcacaggcaggaaaggtaagtcacaggtgactccctctccccatccccctgccccttttttttgcaatctaatttttagaaatgctggcattctgtactgcattcaaggcccttttctagttaagggcaagaaaacaaacaactctgaaagactgcctagagaactggcagaaatattacggataccttaacaggtattttataacagaagttaaagtaatatggttctcataggttgcatttggtcattcaattgcaagcctgagacccagaacacagaaaagtactgtttaaatacacataaatactgaggcccaaattaaatccactaccagcggtcacatgttgagccctggctcgcctgatttctgcaatggaaccacatttcctaatccctgagcatttgaaggctatataaagctcctttaggggcacttgtttcccacaactctgagctgccaggaagttaagacaagggcatctaaaggccttaacgcccaaactggaaggctttaggctaacaccctgattagagattaactgctctgaaaacctgcaacatattttaaatgcttcccgacttcctcatttctctgtatgcagacatcacctcagtgctatatagtcatactgtaagctctattttagatgctgggtacagtacgtatatagaacggcccacagcggctggagccacgcatggacccatttgctgtgagcggggtggggaagtcaagtgggttcaacgaaatctgataatcctccatcctccctcccccattcattccagattttctgcgaggtagggtgagcaacgaagtgggggtgagtggttccctaactgcccagggccgggcgcgtgcctgggcggcccctgctccccacccatccctggagggaggtcctcacctcgagcttgtctgtcagctccttatgcatctgctcgtactgccggctcatgtcctggttcctctcgagcagcgccttacccagccgggccgccaacaccagatccttctccttctgtcggatcaccgacagcagctcggggtcctgggagggcggcggctgcggtccggccccctcggccagagacccaggctcggcctgagggtgttccccggggtcggacggccgctccccggccgccagcagcgccagctcctcctctaacgccagttctagctccccggagcccccggggaagatgagggcggcggcggcggcgggactccggactgcgtccccggccgcggcgggcagctccatgcagcaggcgctgtccggctcggcgggtgctgaagcgcggccgaccaagcccaggcagaaagcggacatggcccgcgcgcgcggagcccgcagcggtgcggcccggcccgcgcgcgccaggctgcaggggggaggggccctgccgcgccgccccgcgtcccgcgcctcgcctcgcgccgcggcacgcgcccccgggtccccgcgagccctgggcgcggcgcgcgccggcccgcccctcccccgcgccggcggcacgcgccccctcccccgcccccgggctcagctgctcaggcgcgcgcgggaggagggggtgggggtagtggcggagtaggtggtgggaacgggaaggctggggaagggaggactcaggaacagagactgagggtcggcgaagcgggaggggaggaagcgaggaggaacgccgccgccgggttctcagccgccctgttgccgctgccgctgctgctgctgctgccgccgccggccgggcagcgcctcacggggcgggctgcgctccgctgtcgccgcgacgcttcctgctgctgctgctgttgccggcggccgctctctgcagccgcactccatgacccccggctccgcggcagccccagcagcagcggcggcgacggcggctgctgctgctgcaggggccgaggcggcggctccacatcgcgcgccgcgcaacccggcgagctccttcctgccttccccggctcctcccggctcaccgggccggcagcgccccgccccgggcttccggccgcgtcccctcgccccgccccttgccggcgcctgacgcgcgcgggcacctgttcgccccgcccgcgcgggattcgccggctcgcgggtctcctcagcgacgcccaggtggcgccggcggccttaacccctgctctgcctcacgccctgcgggcggctgcgcgcgccgcctgcggaggcggctggcgcatccctcacggtcctggctgcctcaccgcgcggccacgcccccagccttgcacccacttcggggtgcggttccgccctcagcctcgctcagagctggggtgtggccacgccctcagctctcgtacctcggggtgtggcctcgcacccggcctcgctctcacctcggacggagcgcggccccgcccaccgcctgctgctcacctccaggcgcggccccgcccccagctacttggaagccggggcgcgcctcagagttctgttgccgcatctctggtggtgtctggggcaaaggggactgaggacattcctccaagactggtgacccggccccgagaaagacataccctcacgaaatttaggtctgggcccccaggagaactaagcagtcaggagagggagccctagagagcagtaggaggagggaggacttcggaaaccaggcatcttcatgctgatgactcagggatatgaaggaccagatgcttcgcagatcagcagcccggagagaaagggtttctgcggagaaataacggaaaaaactgctcacagatgggaatacgaagcaaagaacctccctaataataactaccgtttattcggcactcagtgtgtgccatgtcctgtattaagtgcttgatagtcattattttagataatcctcacaagaactttataaaatcagtactgccgcttgtcattttaacagagaaggaaattaaagcctgagagatggcatcgtctgcccaggtcattacaactggtagagtcaggattgagatctagccaggccgacgccagggatcacgtgaatcattattctttattttcttcacatagaagcagtcttgaggaagataaatggtcctttgtgaccaagatggattgggtggatatggaaggaacatttcctcaatgattaaaggaaggtttggagagcctactgggtgacttgcagtcattccttggtgttgacctcgttggtggtgctacgtgtctcctatttccagaaacaatcccatctaaagctagaattcgtccctatgcttccttttcctcttggacagacaacccattttttacttggatcatgcctttcttcttttcatcccagtgagatggaaatttcagaacatcaagaggctgaaa

SEQ ID NO: 916018 - DNA, 4001 bp, Homo sapiens
ttactgtgggctttgttttgttgaaaatggaaaagactctggctgggtgcagtggctcacgcctgtaatcccagcactttgggaggccaaggcgggtgggtcacaaggtcaggagatcgagaccatcctggccaacatggtgaaacccccatctcaactaaaaatacaaaaattagccaggcatggtggcacatgcctgtagtcacagctactcgggaggctgaggcagaagaatcacttgaacctgggaggcagaggttgcactgagccgagattgtgccactgcactccagcctggcaacagagcaagactccatgtcaaataaataaataaataaataatggaaaagactaaggagaaggcagtaaatggaggcagaatattaaaagtaagacaaaagaaggggtacagaaaatcccttagaagaaaagataggatggaatcaagaactcaagaacctcccaagagcataaggatggctgattgaattgcttagaaatccagaactgctcttacccatggagatcttctcaaccttatccagggccactgaagttgaatcaagaggccaaacaatttagttgaatggagcactgcagtgggaatcaataaacacatgctggagtcctggttctctcactgactagctatgtgaccttgggcaagtcagttcccctctggaactgagccttctgacattgaaatgaaggtgtgggactcatttcaagtcactgggtgatgtctactgtgccttatgactctactattggatagtactggttttgggcaatagatgacaagaagagtgggtcctctaagggagagagggatgaaagcccaatattctattttttatttctgtgaaaaccattattaccaatagcctggctttctcacagcctgtgtcttgtgagggctttaagatggattcactaggctcattctattaagaggtcaggaagccatactcaaggtttccttggaaagagtgcctaccttgatgacattgtccttacagtccaccactcgttcaaatgtttggctgaggatctcaatgtccttatgaagttctctggtcttgacttcccgaaggacagttctccactgtgtgttaatcttattaaggttcagagcactgttgtgttcctccttggccagcttgtcctgtgtgaaggaataaatatacctccaggaagtcagggcctttcagtacaacaaacaagatcactcttaatttatcagctgacaccttaccccttttcgatgggaacggcctgatggcatttagggagggcaagggtgaatttccttcagggtgggagcatcagagtaggatgttgtttgtaatgacctatctccagggagaatatcagcattccagacagctggaacagctgacaggacctacggtcccagttctgggattcagtaaagattgccaagccgtataccacgcaccccctccgtgcttcgcagagaacacccccgcctcccaaacaatgttgcctgaaatctaagtatatctgggtctcaggatttccggaggaggggaggtcaggatgaaaatgaggtttcctcagtgacagggccagggcagggggtggatggggttgagcaggacataatgcaaaaggccatcaccttcaagaactggctgaggagcctctccttctttttggccatctcctcctctgccagcaacttctgctgaaacagaagcagctgcttctcatcggacaggggcgtcttggccattttttctttcttaggcatgggggcaggggattggatccgggaaagaagcctcggtctgcctcggcccgcgttacagagcttagaagaaaaatgtccctagaaaggggacttccagaagtgcccctggttgtgggcggttgtgggaccggagatctcagccctcgaacaggagagatccccggctatcagtgaggctgagctctcccactgtaagacgcgtctagtctcctagcaacgaggatatcgctaacatggagaggcaacaggctagaagagtccctgtcttggagcgccccctacccagtggaggaccgcggtcggtttttgagagggtccttttaactctcaaaaatctgtctcctcagtgcattttatttatttatttatttatttatttatttatttatttatttatttttgacatagagtctctctctgtcgcctaggatgggcacgatctcggctcactgcaacctccgcctcccgggttcaagcaattctcctgtctcagcctcccctcagtgcacttttataaaccgtcctcagaacccttgggaagcccaagatcgtcaaaaagagaaccaagaagtttatccggcaccagtctgaccgatatgtcaaaattaagcgtaaccggcggaaacccagaggtattgacaacagggttcgtggaaggttcaagggttagatcttgatgcccaacattgattatgggagcaacaagaaaacaaagcacatgctgcccagtggcttccggaaattcctggtccacacgtcaaggagctggaagtgctgctgttgtgcaacaaatcttactgtgctgagatcgctcacaatgtttcctccaagaaccgcaaagccatcgtggaaaagagctgcccagctggccgtcagagtcaccaaccccaatcccaggctgcgcagcaaagaaaatgagtagacagctcatgtgtatgttttctgtttaaataaaactgtaaaaactgcaaacaacaacaacaacaaaaaccttttttaaaaagataagtgttggagagaatgtggagaaacgagaaccctcatatattggtggtagaaatgtaaaatggtgtagccactttggaaaacagtttggcaattttttaaaatgttaaacataaatttaccatgtgacccaataatttcactcttagggatctgcctaagagaaatgaaagcatgtatacacacaaaaacttgcacaggaattttcttatctgtctcactcataatagcccagttggaaaaattggagacaacctaaatgtccattaacatgtgaatgagtagacaaaatatgctatgtccatacaatggaatattattcagaacaaactatggataccagctacaatgtggatgaacctcaaaaagaatatgcaggctgggcgctgtgcctcacacctgtaatcccagcactttgggaggccgaggcgggaggatcgttttagcccaagagatcgagactagcttgagcaatgtggcgaaaccccttctccacaaaaaatacaaaagaagttagctgggcgtggtggtgcgtacctgttgtcccagctaccccaggaggctgaggtgagaagatcacctgagccccagaggtcaagccatagtcaagccactgcactccagttgggtgacagagcagccctgtatcaaaaagaaacaacaacaaaaacaaaacaaacaaaccctttttttttttttaagactggagtctcactctgtcacccaggctggagtgcagtgcgtgatctcggctcactgcaacctccaccgcccgggttcaagaaattctcctgcctcagcctcccgagtagctggactacaggtgtcaccaccatgcctgcctaatttttgtatttttagtagagacggggtttcatcatcttggccaggttggtctcaaactcctgacctcaaatgatccaccaacctcggcctcccaaagtgctgggattacaggcgtgagccaccatgttcggccaaaaaaacccctatgctcagtgaaataagccagacacaagtgattacatattgtatggttccatttatatgaaatatccggaaaaggccaagctataaagacagaaagtagattactttcttttcttctcccttcccttcccttcctttctttctctctttctctctccctctccctctctctctccttttttgactgagtctttctctgttgcccaggctggagtgaggtggcacagtctcg

SEQ ID NO: 916019 - DNA, 4001 bp, Homo sapiens
gctgcactgagctgagattgccccactgctctccagcctaggtgacagagtgagaccttacctggaaaaaataataataaaaataaatattgctttgtagttgagaatgtgggctctgatatcagacttgggtttgagtcaaagccctgcctcttattagctgtgtacctcaggcaagttatcctctctaaatttcagttacttctatgtcataggttggtgtacggatataaggccgagggacagtgtttgacacatatataagcactcagtaaatgtggactattattattattgacaattttactcccttggctcagaggttctgtcttcaagtttctttatcatttcctctaaccatttctttgggaacatcattattcctcctgtttttattattaactctgtcatctaaaacactacatggcatacagtaagtaacaattacatgttgaataaataaacgacatctctttcaacctcttgatttgaattaacaaaaatgtagtggacattttcacccatagtcccactggcacttgaaacgtttaacttaaaaaagaaatcactcaagttaggtatttttttagcatctcaaagctaacatttcctaaacctaacacatcatctttttatccaaacatgccccttctgactttcctattttagttactaattcagcgtttccaagcaaccgggagttggcaacttaaattcatcatttgatcactcattcttctgaacctcctgtctaaccatatgaatatcttgtatattttatctccacaatgaccatgttaattcagagtctcaatacttcttacccacaccattacaacaccttaacggttctacctactccttgcgtctcctggaccattttctttaataaaatacatcagtagcacctcatagcctaaagcattaaatccaatttgttagcctagaattcatggctttctacataagggccaaacctaactttcctgccttatttctctctactctcctaaatgtaccgtttccagataactttcctgcctccatacctttgttcatgagcttccctctagctggaacacaactccctccacaaccctcataatttcacttaacaaaatctagtctgtacatgaaaactcatcttaaataccacctcctttttctctttcctgagtctccccatccaaaatgatttagcaaaaatgatctaagtgcaaaagaactgcctttgaaattatctacaagtcaacatattagagtgctttattgctatcgtttctcccatgctagcgtgcgctccctacagacagaaatcgcgtcttactcttcattgcctcttccaaaggaacaatgcctttgtttataggtaaattaacgggtttcagctagggtctctgcacctatctccaatacccttgcttagatatattcttatagcttgtctactaacaattaacatttgtgtagcactttgaatttttttcttttagccacgtgacaaatctgtacaatttattatcccaacaaccgttcagtattttcactatcccttatttcacaaatgaggaaactgagagctagaccagcgtggggttagagtacaccggaacgcatctccagggcgcccgaatcccgtactccttttcccacttcatcccattctcgaccgcctcactgctccaggtcccaacgctccagcactcctgaggtctctccctttgcacattggagctttcctcctccggtccccagcccctccacggacaccacattcaggctcacgtcctctcctccgcactgcttccgcagttacttctccctaaccagattttcttcccaaggcttcttacctaaccccttcaccccaaacccgaaactctatactcacgacacactaagactccgagtcagggaacgcaactgaaaaacaaaagtcaaaccaaggagcggcgcggcgccactgagcgtccctgaatccgtgcaatcgcgaagaagtttacatggccctttggaatgcgcaccaatgggaagggccttcacacagaggcccgcccccatctcgcccctcctcgcggtgctcccgaccgcgcagaggtctctgggaaatgtagttttcttctgcctggagctctgcgcggggcgacgcagctgggctgcaacccgctcctccagggacgggtagtgtgacgtttggggtcagaacgcaccactttcgggcacccccacttaagattgctcaactgctttgagctcaggtacttcgcgttcatggtacatatatgttgtaatttccaagcttgtctcaagagataaagattctaagaaaagtttcttcttccatgaccgggtggcctagagccaggataggacctgaggttcagtttctacggtcaggggactatgtattaaaattctactatttgttccatagcaaacactgcttccttttccggagaaatgtaagacactgggctttaatgataaaagcaagttcaaaatccattatggtcttatctttccagaaagcaaggtgtaaaggtgggggaaaagcactttcgtctcagaattacagctactggtatggaaaagctggggcccttcgctggtgtgagtcctaaggatgtctaaatggaacgtgcatctgctacaggctcgcactttcctttattgcgcttcccaggtaactgtttttacaaatgtaaggtttgtggcaactctgcatggaaccaaatctatctgcgccatttttcctacagcacaggcttactatgtgtctctgcaccacatttggtaattttcacaatatttcaaactttttcataattattgtatatgttatgctgatctgttatcctttatattactattataattgtttaggggcaccatgaaccatgcccatataagatggcaaacttaattcataaatgttgtggatgttttaactgctccacagaccagcagtctccctgcctttctccctctcttcttgcctccttattcctgtgatacaacaatattgaaattagaccaattaacaatcctacagtgggggttcaagtgaaaggaagagtcacacatctcttactttaaataaaaagctgaaaatgattaagctcagtgaaaaaggcatgttgaaagccaagacaggatgaaagccagtcttcttgcaccaaagttagccaagttgtgcatgcaaaggaaaagtttttgaaggaaattaaaagtgctactccagtaaacacaaaaatgataagaaagtgaaacagacattgctgatatagagaaagtttgagtggtctggatagaagatcaaaccagccacagcattccctgaagccaaagcctaatctggagcaaagtcctaactcttcaataaaatgaaggctgagacaggtgaggaagctgcagaagaaaaggtggaagatagcggaggctggttcgtgaggtttaaggaaaggagctatttccgttacttaaaagtgcaaggtggaagcagcaagtgctgatgtagatgccgcagcaagttattcagaagagctaactaaggtaattgattaaggtggctaaactaaactacagacttttgatatatatgaaccagccttttattggaaggagatgccaagtagtacttttgtagctagagagaagtcaatacctggcttcacagcttctaagaacagactgactctcatgttaggggctaatgcaactggtgactttaagttgaagccagtgcccatttacatccctgaaatcctagagcccttaagaattatgttagatatagtctgcctgtgctctataaatggaacaacaaaacctggatgacagcatatatgtttatagcatggttaactgagtattttaagttcaccgttttatgtatgttttattttaagtcctactgctcaggaaaaaaaggatttctttcaaaatattacttctcactcacaatgcaactggtcacccaagagctctggtggaggtatgca

SEQ ID NO: 916020 - DNA, 4001 bp, Homo sapiens
cctggatagctgggattacaggcgcctgccaccacgcctgggctaattgttgtacatttttaatagagacaggatttcaccatgttggccaggctggtctcaaactcctgacctcaggtgatctgcccgccttggcctcaaaaagtgctgggattacaggcgtgagccactgcacctggacataaatcattataataattgtatggaattattatgaatcacagcgtcctgtgtctacacccctttgtaatgtgacattgtcactcttctcataaaaaattggaattttcccacttcttgaatctgggatggtcttatgacttgctttgaccaacagaatatgatggagtgatcttgtacattttggagtctaggctttaggtctttgcttccactctcatcttcttagaatgctaagaccaccatgcagtggaaaagctccatctaccagaagatgagaagccatgtggagaactaagacttcccagccaatagccagcaccaactgccagacacgtaagtgaggccatcttgaaccctccaaccctagatgtattcacggttctccagagaaacagaaccaataagatgtgtgtgtgtgtgtgtgtgtgtgtttataaagatatttattttaaggacttgactcacttgattatagagcttccaagtccaaaatctgcagggtgggttggcaggctggaggccagggaaaaggtgatgctacagttcaagtctgagagccatctactggcaaaattccttcttgctcatggaaggtcagtcttttgttctattcaggccttcagttgattggataaggcctactcacattatggagggcaatctgcgttattcaaagtcccctgatttgttactcagaggtgagaaaaatcatggtgtactaaagtcaccacaaaaacttctgtagatcatatggagaagcaggagagatgaagctggagagcaaagcagcaaatcagcaattaaaaaagatgtttggagttgttgagtttggagatgaaaagtgacaagatgaattctggattttagacaaagcaatccaacgtgtggatggagagggatttgagaggagaaatcagctgttgtcagtaagagtatttaaattaggatactggtaacggggatggagagacacacgattatacatgggaagtgagagcagaaagaattaggattatttcttgattttttttttttttttttttttttgctcaggcaactgaatagatgaagtcattaatggaaaccaggaacactgaagaaacagtgaacaattaaagtactttgagttatcaaagtgagatgtcctgcaggtagctagacgatactggctggtaattcaggagagctgctgcgtcctgtgtaaaaggaaaagcaattcatggatggtggctaaagccagctggcaggatttaggggatgggttagacctgcacttgttttgatggagaagaggcgggtataaagtggcagagtgagattactgtaaaatatctgcattcaaagggctaaaaaaagagaaatgctggaaaggctacttgctataaacgcagcagggtaggttaaaacaaattacgaagcacgggcggtgaggcgcggtgcttaagattaagcccggcgtgttttcgagtgcactgatacacaaaagggaaagggaccctcctcaccggaagcacaacctctgccctctggggcattacacattcctccgcgccggaagaaagcgtcacgtcgcgtcgcgcctcgccccgcctcgttgcgcctcgccccgcctcgccccgtcggcttccctcaatccgtacctctagtaaagaagagcttgtgcccctccccgaccccttaccaagggcgagctgcgtggagtcgttggactgggcagaactttggcgggcaaggagacaaacagccacactgtgctgccggggaagagaagaagaaggaaaggccagacacacaggcgtcgtgcagctgcggaaggattccgtttcctgcagggggcggagggatttgacagcacggtaacttccggaaaagtcctgaacctcagtggaaaagccttgcaagaaacaataacaaacgggaggaggaagcgattctggggtttctgtgttgaacggttcttgtccgcgaagatgcgcttcggcctctgtcaggggacttgaacgggcttagtgggcttcagccagcttttctccaccggttccccacggggacccccccccccccccggccgttgcaatggcgggcgtggggccggggggctacgcggcggagttcgtgccaccgccagagtgccccgtctttgagccgagttgggaggagttcacagatccgctcagctttatcggccgcatccggcctttggcggagaaaaccggcatctgcaaaattcggccgcccaaggtacctcagtctgtgaagagagagggggagaaggaagaatgggggagtccgtacactgggtttagctttacttttctgatccttgtctcgtttcatatgtactctcttttgagacaactggagcctgtttctggatgtttttgcctcggtttcttttgtggtcttatgtagacacgtctgaaagcgagaaagtggtgtctcttgggcctcttccgcctagaacttgggaactgatacttttctctcagccgtgggcctaaagcctttcgttagccgatatggtgtttaaagtacagtattatgacgtgacgtattcttccctcacgtatcctcattatggtttgatagtcggctatctctttattcaagacctggttggatcaaatatttgcaggcctcatctcagggctagggtttctgaaaaggttatctgagctctagtctcaccggatggtattactagacaagaactccagactaattattgccgcagtgaaaaagtcttagcggggaaagagaaggagcagcaataattctaaaatttagaggtttaggaaaaattggtttatagtggaggtggaaggaaatgttgaaatctcttgacgtagggaactcaagatcaacgattttagaatcacagttattgcagataactaggtttgcctataaggttaattataatctcacctttgaggtaaggaaaacagatactatcccttgtgtggaggggattaatgccccaagaggttgagtgattactcaaggtcaaaggtgtttttctttactcattagaccagtgctttttaaatgatgttgctggaccacttgcaccagggtcaactggatgcttgtttaaatgcagatctctagtcttgttgtggaagttctggaatctgcttttctagcaactagtctcagatgattctcatgtaagttgaggttttcgaaccattgctttagtcgttgcttgttaaaggcattttgctttatgttttgtctagtattagtaatgataaaatattaagcactgttaaccagtgttgctttttaaaaagcatctgccgtcaccactgactaccacagagataggcaccgcagcgtattaaaaacttaaatgacagcgaggaggaactaatttaacacctatagattgtttgctttaatctttgaagccctgacaggtaaataaagtccgccttttacagatgaggctaatctggataagttaaaacaccaaatgtgtgatcttgggcaagtggcaaagtgtattttgaacctagatcagtttttctgattctgaaacagacgtaatgctctcactatgttgaatgactttgtttaaggttatagactactcatttcaagcagaggattaacaaataattgctatgatgatacgcattgccatcctccaaaaacttccatttaacccttttttctatcataattacctaatattaacaaatcttaagcattgaaggttttcctaagtcatatttttatctactcttgaatttattaattagaaattctattcacggttactttgattaaaaaaagtttttttacttaaaaaa

SEQ ID NO: 916021 - DNA, 4001 bp, Homo sapiens
catgactcaccacccccagtacccatgccttattaacttcaagtaaaaattttttccttattcagataactctactgttagtcaatatttttattttatatattcttaatcacattttcacttgtaaactttatatttaagtattttaacttaacttaccacatttaaccatctatgtaggaaaaatatttgtctttaaaaaatatagacaccaaattcttttaattaattagcacaagacccaattagagattaattcaaagaaataggattcatctgtcttgaataatatactacctagagttaatagctttcaatatttagagaatttctaaaactcaagttttcaattaacaagccgtcctattttggaacaattactgaatactgagtttgtaggtaagagcacagagttttctgtctgttagatgcccaggtcacagcaaattttctactaaaaattagagccagaatttcaatgtgtattctccactgagttgccaaccccttaaggagaagttaaaaggggtaatctgacacaggagctaagtgacacagaatacagtagctattctctacaactatgaaaaatgaacatattttatataaccaagggtagagaccttccctatttatacagcaggatatggaaagaaagaaaaacctaataactacaattaaattgtaacactggttaacctgtacctatgcagtactgaaaggaatcaatttgatgaatataacaaagtgtaatactgttattctacagaacactatccactgtatttttttcctaaataatacatgaagtgtggtttaaataaagaagactatgccagactgtaaccctcaaataacaacttctaaacaataaactaagccagatgatatctgaaacatacattttcctcaaaatggaaggcattttaacaaaaataaatgttacatttcagtaacataaataagattcaatcactcaacaaaaccaaaatattaagcatacaagcatgcttaaacaaaaaccagttttagatgaaatagagaaaacaggtatgtctatactccatattgactgattttaaagatcagcaaaagagaagaagatcctaacaaaaacctcacaccattctttcatgaaattcacaacactgaatatatacttaacatcttattcatcctattaaggtcattaattacaatccctggtttttataattccctttttaccaaatccaaagtaggtaaaattctttaaaaaaaaaaaaaaaaatcacagcattcccttgatggtagttccaggacttgagctcaggcctcctgactcctaatccagagattttcctgcaagactatactggctccataaaaataactgggttataaaatatttcaataaaatgaacacacattgaaaaggattaaggaaaagacagtgctccttcagctaacaatttccacttacaaagtatccattcctaacctactagaataatctaacaatacaaacatactaattaactttataaccaccaaaaggctatgtacttaatatactaaatcaactcattgcaggtataaacatgcaaatatgtgacaggatctttagtactcatccatcatctcacaagtatttcctaacagacatgtatcccaataaaatcatctgctgacaatttttaaaatctttcctttagtgcttacactggtagcacttaattaactcaatttaaaccattcctatgggcaagtccaaatgttctataataatacatcagttttaatttttagagggtttttttttatttttcttgatttcatctttttactccagaattacattaaaatgatcaaggaaatatcatgaatgccaatgaaatataatacattttcaaaatagtttactccattataatcccacaaagttaaaacaaactaatgtaaataacagtgcatacctcaaaaccaccaaaatcatcatcatccattcttcaagtggcacctgaaaaatataagatattgaaacaagcccgcacacacacagtcatttatgtcaaaatactctccaacttaaatgtatacatatttatttgtaaattagaatttctaactgtctatgcattttttatgcaaaaaagaatttgcaattggcttttactttttggcaaaattagcaatttctgtaactttttcagcaaccatgtattttgccattttatgttgagatgccaggagtggaaaaatattcttttacattttaatttgcttttcccaaattggcactagagctcaattcaataatgcttcctgctttttgcatctattcctcagttgtctggcaacatcagcacaaactccagctaagaacaggactgtggtgagtttttggaaatctgtcccctaccacaaaggttcttccctcggtttcagggccaaggctgatttagattttcaaaattgatcagcatttttgagctgtggccacaacttttggatcattttgatatgtgtatttttagctgaaactgctttgcacttttggaaaaatgtggagcaagttactaggctgatcaagataaatcaagtcatgtattcatgggagatgagggatgagaaaaacacaaataaatatccagaattcctcttttctttactcttaaagtatgtaagagagacaagcactcaaatattatttgcttttttagtcctaaatgtatatcataaaaatgaaaagataaaaccattagtatcagggctttaaaaaaaaaaaaaggagcagcagctttatcaaacaaaccatgcaagaactaaataacctgaaaaggtgaaattagtaagaggaagtatacattaaaatgaaaaataagttctcatatagattgtttcttaatttacaatttggaacctgtaattgtgaatctatagctgcaagtaatactctagtcagtaataattggtttatttttctatcattcagaagtgaccatatgacaaaataatctgtacaacaaacccccatgacaggagtttgtctttgtaataaacctgcacatgtaccccttaacctaaaagttaatttaaaaagcaatgttttaaattaaaaagaaaactttaagtgaacatacccaaatgttgattatagtttccttgactcagtaatacaagatggacttcattacaggaaaacaatcctttcccacttctaaaataaaaatagctatacatattaaactatatgttaaacattaatcttaagggcattttctaaggtcatttgctttaagtagtcatctatatctgtgctttaccttctggaaactagtgctaacaccttcaaaaagaaaattcaaaaaattgtcaaagaaaaaaacagtaaaaacattaatttcaacgattgttttaacaggcaaaggaaattcttttcacagaaactcagtaggtaatgacactaaaaaatatatatttagacagaaacatattgtaaaaaggaaaggtattaaattaaccagaatataatcatggtatcattaccattactcacaattttagcaatctgatgaaaatgttttataaaatgtatttctccaaaaattaaaactaagcaggtcatccacgtatagcacctaaaaaatataaaccagactttcagaaacttttgatgatgtttagtttgaaatggaactcacattattctgtgttgcaagtgaacagaaatctgtatgtggctacatttttcatgaagaaattatgaaagaagagtgatatgaacatcaagaattaaccaagtcaaactataaacaccaactttatctcttccacatgtatcccatgaatctgaagaaacaaaaaatttttagcatctacatatgctgtactcaaataatatggtttcaaaagaatggaatttttagagtaatgcttctgtgtgttttcttaagtcacttcccaataaactatttgtaaggtgacagaaaatttgaaaataaaaacaaatacccacatct

SEQ ID NO: 916022 - DNA, 4001 bp, Homo sapiens
tgcaacattggtgtgtgaagatacaaagtcacctagtcactgcccttgaaggacatggaattcagtaaattcagtagatataattaatcttagttaccaaatgtgtgcccactatgtattagaaactatttatggctgaccttgttccagatagaaggaaaaaagttccatgacttttcttgccagaaatacgagaaaatgcttttttaacataagtattttttaaaagcatcaacattttattaacgttagtatcgttgcaaaggcatcctaccaattaggtaattatgttgagatcaatttatccaaagataattggataagttgagatcaatttatccaattttgcaatttatccaacatggcagatgaaagagttataaacccaagatgaatgattcgttttttaaagagttaataaaaatatctaatttcaaaaaaaccctatttgttagaccgatgtatttaaaatgtgtcacagtaaaaatctcacacaaataattgtcctgtactttagatcttaaatgtacctaaactaaatttactgagtaattataatacgcagaggagtaacaaaactattttaagatttttcagtggtgtgtatggatatgtacgcatacccgtatatataatcacgagttttaaagccttcttccaagcatatttcacataagatgaacagttagccaaaagaattacatacatttcaaaacatctttggaggtaaaagccactttaaacgttagcatctttttccttacaatgcaatagcgagaaaatgcatgggaattcttgatgagcaaaaaaaaaaaaaaagaaaagtcgttttatcaataccaatgctctttaaataaatttcaaacgtaaaagttttaaaatggcaatcctagttttaatactcttacaggtttctggaactgcgtaatatgttaaagtattacagcgtggtagcttgcattttgttataaaaccgactactgcaacctaagctacagagcgcggttatattttctctctggcagcctaattttccttagtggactagatcgtactgctaaataccaaaacttgaaatgaaacaatacaggtcagcatgaaaacctaagttagagaaactcactcgccgtagcagacggcagcccagtagccaagcctggagctctgctgcgtttgtgcattctgctccgtttcacgaatcacaggcaaatcgttactcagagtaaactaaagccgcatcaaagcttcaggaaggggctggcaaggtagtgtacttacggaaaggctaccaggacgggaggcgatacaacttgtcagggagggtctctaaggttccccgggtggtaacaagcatttaaaaaggcgatgtggattcagacggcctcctccccacagcatcccagacaaagccgggctaggccccggggcgctcctggtgcacctgcaatgcggatccctcgccctgcgatcccaccccggggcagacaggagcgccccgggaccggcctctcctcccccttggcactggggtgggcgcgcgccgcggccggtccgcaccctggactggagcccgggccggggagccccctccccagaaagggccggcagaccccgcgggggcgggcgcgggggtcgccgagcctcagggaccctctttccccgactccgccgtctcccgagttgccttcgcccggggccacccctgcccctgggggagctaacgtggctcccaagccccggaggtggggcaggaggaccccgtcccccgtctcccggcggggagggtttttaaagtcttcgccacgaactcccgtccctgcccggcccctccgcccctgcccggcccctccgcccccgccggcgctgccaggtgagcggggccggactcgacacaccccgggccccgcctcacctgcgggcgccgccgtcgcgttccttcaggcggctgccctcttaggctcggtcctcccggcgggcggcggtgggggcccgtggcccatgggctgggcggggcgcggcgggcggggctgcctgggctcgggcgctgcccgggccgggccgccgagggaggtcagtgggcaccgcccgcccggcgcatctcgcccgctcccaccccagcgctagccgcggtgcaccctgggagcggggccggcggcgaggcctggccgcgctgacccggcgggctaggcgccggcgcggcggcgggcctgtgtctgccgggctgggcgggggcggcgggccgatattcacttggcgaggcggggctacgcccccttccgcccggctgtggcggggcaggggcgaaggccgaggggaagggagggtcgggcccgcgggacgcaggcgcacagctcaggtgcggccgcactgcggttgccctgggtaacgcggcccgagggaggggggggcgcggggaggagcgagggaggcgagcgggagcgcgcgcgccgggcgctggggtgggggatggccgggcccgaccgggccggggctggggggcgggggcggaggcgggcggtgggggcgcgggccgggtggccgcgcatgcgtgcggcccccgctcccccggggcttccccggcctcgtgcgtgcgcacgcgcgctgtcccccggaggcgtctgggtgtgcggagcgcgcgcgcgcgcggctcggaggcgcacctgtgaggtgtccctgaggagagggaggtgggtgcgcggcgcccgcggcctggggcgctgactcccctcacttggagtgagttctcggcggccgggctgcagtctttctttctttcccggagggaggcgggggccgggggccagggagcgggctgggggtgggaaggaggtggagtggcttaaagaaaagaaaaacaacccatcccggaggatgggcctcgggatggcggggaaggtcagagcggctccgcgcagcctggcgggtcccgggctgagaagccgcccctcgggcctcgggcggtcggccgcgggcccgcagtgcgggggagcggggccggggggcgcagatggcggccggtgcgagcgagggctgggcagcgggcagggcgaggccgggcgaggcccctcgggagccggactcccgagccaggctccattgttgttggagccgagggaagggggagcgctgccgccctcgtcgcccgtggagccgcgtcttggagcccttccaggcgggtcccgggagaggcggtcatggccgcgccaggggaccggggagccgggcggctgcggaggagccggctgcatggggtgctgtgtgtttttcagggcgccctgcgtccggcagaggaggcgagcatcccgctcaggtgatgaggaacccctcgcgcacccagcgcagaaggctgctgccgccggacgcctccattgtttgaccacaacaagggccggattctcacccaggtaaaccggctgccggcgctgtccacttccctctgactcccgcctccgcaggcgttctcaccccttccaggactcgactgcagttttctcactgtccccggcttctcatgaactccgtataccccctcccagacattttcccgtccggatccatctctccgccacatcacctctcatttcccccagaactcagctcctttgtgaaacctttcttgccgaactctaacaactaaatctccccgggagcctgctccgaactgaactgttctggttgctagattgcttacgggctgtcttattgcaacaaaggagaccagataccgaaaaaagatttctgagctattgccttcttcaaggaacgttttctgatatttacagtttattgttttcacaggctggaacggtttttaggcattttggcttcttatttagagagggctcctatttccttcatagacgcatagttttttagagcaggaaattgaccttgttcaacccgcaggttaattaaaaatttaaaaattaattctaaattagcagagtagtacattttctttgtaaaaacagcatatcacagagatggcattttgtctttga

SEQ ID NO: 916023 - DNA, 4001 bp, Homo sapiens
tttgtttcaaaaacaaacgctttttcagcattgccagatttaaaaaaacaacagcaactctgttttctagaggggaaaacaccaaatgaaaatattcaaatggtagtaataaaatacttggcctttaatcagttccagtaaaattatatttgaaagcttccccaccacccacccatagtcatacacatacgcatcaaattttaaacattttataatggccaaagaaggtgtttacatagatctgtttattaatggaactcactttttaatcagtttttaataaattgctaatccagtttagcctcaaatcagttccatcccttttctcaatcccttttctgatgtctaacagttaaagtcctgtgccatgaacagggattcctgtggcactttgggaattatctgctctgggtttaaaaaagtgcagcttataaagttctctctcttttcttcagcctctacgaagattgataaaggcatttccagaggcaagtgaaattcttcccctctctgctcgttctcctccaggacctcctcttcctcttccagctcctcctcttccagctcctcctctccctcctccacatattcagcctcttcgacctcttcttcctcctcatcttcgacctcttcctcctcatcttcgacctcttcttcctcctcgctcgcctcctttgcatcacacacctcctggtcatactcctcctcatcatcatttttcttctcctcctcttcttccaccagcagcggggcaagagactggttttcctctgggttgggactgaatgctagagagggattctgcacaaagccatacagagtttcctgcagtccccaggtttccttgctgccgccagggggcgcgtcgtttccggaggatctggctggggaggcctcgccgctcaccgtggccttctgcgcccgcagcgcctcctgctgacgctccaccttctcctgctgcctcatgtcctcgtagatctggttcatgatgaattgggtggtgttgggcggcgctcgcatgccaggctctctccactcatacagcttgaccggccgcggcagcgtgctcacatccgctggcgggctccgcgggtaggagtggcgagggtggtggcgcaggccgcggcctctgcggccccagcgcttcttcctgcctgggggcttcacccagccagggttccaggacccgctccagcaggagcagcagcaaaagcagagagggtgcaggccatacacccgaaacacttgcaccgggcaggggaatttccagaatcctggagggggtgggcgccagggccctccccagcacccccagttagagcacacgggtggttggaaccaaaagcccgggccgtgctgttgcttcggctgcttccttgggggcccatactcggtcttggggctatatcggtgcggtctattgtacgctggagcacccgggcgccttcgatggcaggacgaccaggagctcaaggaggccgagtgtgcccagccacagccacagccgccgccgccaccgccgcccaggttcagagggtcttcccttgtgtcgagggtctgagtcatggttcagggagctccgagaggtccagatggtagcgacctgaagctgtcgtcaagttttgccaggtaggacggtcagaagagcctcgtctcgtcaacctgtctctccacgcagcgccacgtgtctacccctgggatcacgttttcctctccaggaggctgctctcttcctggtttgcacgctcttcggtagtaatcgcttgtccttcgcacctgggttgtctcgcccaggtgtgctgggtgggactggggctgggtaaggatggtgggggaggaaggtgttggcaggcgacacgcagtgagacccactcccgggtccccaccacacccggctctgctgaggcacgggctggggccgggggaggcaggggttgcgcagttacctgctgctccctctcaacccaggtgcttcactgtcgccgtcctggcaggactgtggtggcgagggcagcggcagcctttaaatactggctgtggtctcccgcgtgcccactgcgttcttggtcacccagggcaacagccaattggggtcgaaatcgtcctccctgtgtgcaaggccgggttctgtccggaaccaggctccaggtgaacattcgcagggggcttgtgacgcagcgtttgggggaggtgaagaggggtccaggctgggtttctgctgctcaattcaagcaagtctggaggcagtttatccgaaagctttgtatcaccttgaggcgggggtttagaagatgggccttcatctgaacccggtgggggcgggagaacttgagttttgaaaaccccacattctacacctttggagggcctaagggatcatggaaaattactggagaaaggaaactttgcccaacctcttaccttctggccggtgccaactcttcttactcctgagaattgggattcataatacataaaacaagaccacgaacatttattattgcatgtgctcactgacaaataatcctgtcatctaccctgagaggtaggcgtatcttatcacctgtcacagatgagggaactgagagcttaatttccccatggttgtggggctaataaatttccaggctacgatttaagcctaaacctgtttgacccaaaagttaggttcctaatgacattgctatgtgttctaccaaacccccagtaggacccttgtgataactaaatgacataacatttgggaaggtactttgctattggtaatataccgtacatgtgtacctcaattaaacaaatattattattaccataatgaataccacaggtttgtccttgggaagaggaatattctgattgtctttccttttgtcccttcactgaccatacagcatatacacgggaagcctttaaagcattgtggttaagcatatgggttttaatttaaataaatgggattcaacttcaactcaccaattattaatctctgtaagcctcagtttccttacccataccatgattatactaccttttccatacggttgtgtaaagaattaaatgcatataacaggtcctctaatattaatgttttgctcaatgtcatttccttataacgttgctgaggcaaaacaacaacaataacaaaaccacgtttcattatatgtcttctcatttaaaagtagcagtttccaagaacctatgatgctaagtgaggacttactgtaattccttcaagtacttagtgcaggtaccctgtaagtactcagtaactgttaactatcatccttatttgtaaatacttcatgacttctaaaagagatgatatagtatatgtaaaggcacttgttcttgatgcaaaaataggcatccccaccctggcttgtgtccttttcttgtccttctttgtaaaacgtcaaggaaagtgctaccatacttggtcctagagaaaaccgtctcagtttatatccctttcttacttttctgtgctgagtggaattgcacaaaatggaaaactgcctgctgggaacttcagtctatataaggctccattaaatgccagaaaagcaaaatgtgtgaaagccctgaagctggcaaaggtcatttatgcattcctggctgaaaattgagaacattatagggggtcttggatcaggactccaacatttgccctgagacctgtagaatccacaggcttcatttaatttcatttgctctgtggtttgctgaggacacccctgcttgactcaaagtacagaatgctgacatgtttagcctgcagtatccctttctagatatggactcacctttggcagttattctgaccctgctctgtgtactcaaaatggaatggtgagagcccagttttatttttttctaaggacgtgtgttatgcaaaaatgggttttaattgagagcattacagatggaccatgttgctgtgttgaaattccaatcagtttctttttgttttaaaagagatggttaactcattttacaggtaa

SEQ ID NO: 916024 - DNA, 4001 bp, Homo sapiens
tgcgcagcagccgcggcagctccgcgacgctccctttggctactccttcgcgcactctaactcactcactcttttttggatttcgtcatcttttcaaaaaatcaataaaaatattctggaggctccgggggtccacttcttggtctcatccggatccccagatcctcctctatcattcccgacaattggaaaaaatgtctgggggggtccctgcggcccaggggccgcttttgggggggcgggtgaggagaggtggggaagagagggggagggaggagaggaggaagagcgccgcagcctcggcagctggagtcggagcagggggggatggtttcaaaaaataattaaaaatcgaggaaatatcctagaaaagcccttttggcgtgaaaaccccaaagaagagccaggcttcccgaaacagaggtttcgggtgccagaaaggtctgtattccgacccctggggctttggatcccgggaggaaacttgaaggggtgagcgccgcggcgggagtgtccggctgcggcccacaaggacagaaactagggaacgcggtgacgagcgaggggaaagacgggagcagagagccctggaaagaggcacggggggctcccacctctccttcaggggtgacccggtatcccccctacacacaccccctcccccccttcctaccccacccaaatctccgcaccgaggaagctggaaaaccaaactgtaagtaatcttcgtgaggtggggggtgggggagagggcacgattagaagtggggtggccgggataatggggtgcgagggtaagcgggcgacgtttcccagcctttccaaagggagtttgcaaagcaacatggcgaaaccacggcaggtccagagctgtgcatacgtgggcacacggctcgctgggcaaagacttggagtgaggggcaagaagcggttcttttgggttcccctgaaacacgcgtttcttcaatgggacttccggggctcccgaattccccgtttctctccttctccctcctccctccacctccccggtgaagtgccagcgcggagtcgcgaccacaggcggggacctgaggccaagacgaatttgctctggccttttggggggggttgcctttctactcggggtcccgatttcaggccccgactctcttcctggccgcagcgcaagcagccgcggcggcttcgcaaaagacaggtcgcgaggggggtgggaagaagaggcagccacatgcaggaacacgcgcgcgggatgctcccctacccccgcccaggacagcctcgcttctcccagattttcctcccccctctgcctccccagtttatctggagaggaacagaaataaagccacgcgtctcgccagaaggcgcgcggtaaactcccgcacaggagccgggaggccggcgcggggattgccctctcccaggtttagggctccggccggggacccgagcatccggaggggtcctggctcctggcgagcgccaccccccgacctacctccagcatccaggtggccaccattctgcgcatgtagggttggatgtccttctgcacgcacttgaagtaggagcactgcggaaggtagcgctcctcgatggtgagcaggttctgcaggacgcggtcgtctcggagcaggttgcggtcccgcacggccctgcggaccgggtccacctcgtggcacagcagctccatggccagcccggcggcccctctccctcctgctttccccggcctggaaaaaggtttttctgtttttgttttttggaaggggaggggagagcgttcccctgacctccttcctttggctaaatagggggttttcgggggagaggtgagggcagagagagaaggtggagcagaagggaggcgaggattgggtggtgggcgagcagagcctcggggctgcctcactcgcaccggtcctccccttaaaactggtctcgctctcccctgctcgctcttctccgctctgaagcggtgacgcaagctggctgggcagttagctctcctccctctccccgcgctccccgctctggttcctcctcccctttcctcccctcccggtcctcccctcctcctttcaatctctccctccctccctccttttcccctctcgttattaaggagaacagcagctggcccgacccaacttcaaacgcggtcccccgccaccccccacccctctccctccatccagccctgcatgccaggggccccggacagggcaacccacaaaaaactaccgactcctatttctgccctctaatttcactcattctgtaggtgtagcacgccaaaatacgaccctccaactttggcttcttcaaaacggatcctaatcctcctgcccttgtatttaagatccaggaatgtagggtagattatctgaagatggggtgacctcagacaatttagaaataggtcccttaagtgaaaaataagggagggggtgattttagaaaatagcaacctcgcatacccagagataaaggtcatgtccctgaagtctgtgttcctgataacttcgaagctgtttcgaaagccccgattaaagggaccagaacaacgtcccttctgcccccccctgcagagtgtgtgcagaggaagaagagggagggagaggtgggtattaggaaggaaggggggtgcttctctggagggatagaatgtgatcctcgagcagaaaccatcgtgtttctgggggctcttcgggcgccgtggggcgacgcggtgcagcgtctagggccgccgcaggccgggggcagggctcccagcggttcccccgcggccagcggccacgcaggaaaaacccgcttcctcgcccctgcatctgctgacaagccgcccgaggtgtctgcgctgagcgtggccacaccgatgcagctttctaggaaatggcccgggagggggagggggcgagtgagggattaggtccggctccccctcgctccccctgcgcaaacaccaccaccccttcctttccccggaggcatgaggcctccacgctcggtccttcgcccgcatcctcgccgacccctccggtttcgcgcctcactcgccaggctttctccctgggagccgactgcggtgaagtcgccgccagcacggtcggccctgacacgtgctctaacgcatgcttgagtcaaggctgtctttacaggagatacgatctggtggcgtttcttcacctccttcctcccgtcaccccccacccccaccgcgccctttggtgtatttcactccaggaggaaggggagagaccagcgccctgatgtgctggccaagctggcacgtgcagcgggcatggcgtggctcgagctctctgggcacaccgaggccgactgagtgcctccctcaccgagagagggggcccgggcaggggcgcggagagccagcaaggcggggtggggcgcgggctgggtgagccgtacactaggttccctgcaaggcggaggaggggagcgaataaactagaggtgcaagcgattaactcaggccccggagccagcctctttaaacgagggtggggcggaaggggtggtgggggggaaaggaggggatatcgctttaaaagggtgaggaagagtttggggcgccgtctcccctccctctatttgcatagccaatagctctggggctcctgctactgcgcgctgattgttaccgggcagattactttttttttttttttttttttttttttttagtaggacgcgttccccactacatcaaaaggaagccaagggagggcggagggagagcgggcgctggggcgggcgaaagctggggagaggcccggccgcctccgaccttatcaatagcagcgggaatgagtatcccatctcctatatgtaaagaaaggggagggaaggggcgggcgaggaaaatgtctaattgctgtggaagccattagctttcaggaagaaaaaaagctcgctgaaaaacccaagttgcaaactcaaaatgaaacagtccagcgccgcggatgacacccggg

SEQ ID NO: 916025 - DNA, 4001 bp, Homo sapiens
gacatggtttcaccatgttggccaggctggtcttgaactcctggcctcaactgatcgacctgccttggcctccgaaagtgctggtattacaggcgcgagccaccgcgcctggctgacaaccttaatgacaacacacatacaaaaaggaaagcattttaaggatgcactgaaatagaatttcgaacaaaaagatttaactccatactgacaggatgcttaggaaacaaacctggacatcagcaggaaacaaactggcgataaaacagacacccattttgagatgaacacacccttaagatacacacattactgtcagccacacatttaaatagaagctgcacccaagaaaattttcacacgcagagtggaaagaaatttaaaactatactagttttctccaccataaaataagtgtatttcctaacaaacaaaaatatgtgggagaggttacctcattttttttttaattttttttttctgagacggagtttcactattgttgcccaagctggagtgcagtggcgccatctcggctaactgcaacctccgcctcccgggttcaagcgattttcctgcgtcggcctcctgactagctgggattacagctgcccgccactacgccggggtaattttttgtatttttagtagagacaggggtttaatcatgttggccaggctggtctcgaactcctgacctcaggtgatccacccgcctcggcctcccaaagtgcagagattacaggcgtgagccaccgcatccagccgttacctcatttttgaaaatgaaatacatatcatcactctaagtaagttaaggacccggtattttgtaaactatttaaaacattagattcgtgggtatcccctacaaacgtaaactaacatctttcctctgaaattctataaaacagtagctactaactgagcatctgaatgcaaagcactgtgctggacacagaatcaaacacaagaggtattatcccattttatagacaagacggccaaaaatttgagaggtcacttaaacagctagtagatgaggaatggattttggaccaaggctgaggcattaattctagtccaccctttataacactttcaggtactgaatttctcgaaatttacacactaggtttgggaggcagccgtcaacagagaaacctctgccagacctagacccctagggcacagcggaaaatgagaatcttaacgtcaccagagcagatcagaacacaatgaagacagagttggaagggctggttaaaacacaaagccgggaaggatacgaattcccagcaaggctggcggcacgggtgagcgagcgggaaatcaactctgcctcgcttccctagcgctaactgagtttcagcccgccccatcgtgggctctcccaactagacatccagcttctgcccaccttcttccccactttcgtcccccccacagagcctgagacccggacgccagagcatggcgggaccaactccaaggccgaaggcctaggccacaaggatacacgttaagacgctgccccatgtcctgaagcagattggccgcctgctggcgataagaaagttctttatctgggtccacgccaaaacgacgggatgggctattttccagctgttctcgagtgaaataccaccgtttgttgttgttcttcctctctccctccatagtgcttcaaccagaaggcagcggcgaaggctgcaggcacttcccagcgtcacctaagaggcgacccacatccgctgtgcgggggcaactgcgacttgacgaacttccgctaagcgtcgaccgccgggttgttacttgcctccgtagaggaagcaaaagtcaaaggacctacttccggaatgcacctcgctacaccccgtagccgagttaacagccaatatgcgaccagaaaaaaccttgaggcgaggacgcaggcgcgtcacgtgaccgttgggcggtggagtggggttagaagttctttcttaaaaaccgtgtatcttcccgcgagaaccggattgagcgttggcgccccgggtcaggctgcgaggccgcaattatagtgggatggggcggccgcccacgcgccgcttggcggttcttacgagaactttgtttgtgacggcagtggtgatgtaaaatggggcagatgggccgggcgcggtggttcacgcctgtaatcccagcactttgggagcccgaagcgggcggatcacgaggtcaggagttcgagaccagcctggccaatatggtgaaacccccgtctctactaaaaatacaaaattagccggcgtggtgtcgcgcgcctgtagtcccagctactcgggaagctgaggcaggagaatcgcttgaacccgggaggcggagatcgcagtgagccgagatcacgccactgcaccccagcctccagcctgggtgagaaagcgagactccgtctcaaaaaaataaaataagtaaaaatgtggcagatgaacttgaaagagaaagtaggtgaggctgtcagaaactgaaaaacagaatcaaatggtggggctctttcgtatatcggagcataaagcaactagaaggctgttacattgttggtagcaatgtaaaatgcgacaacccatttggagaggtcgctttaatgtgtagccaaaggcatgaaaacattctcacgttgttcgccagtgatccaacttaaaggaataaaatgaaattaataacattaattaagagcttacatgtcccaggcacaatactgacttaaatatactgtttcatttattcagcacaactctaagaggtaatttttaagtacgtttgcgaatgggtgaactaaaactgccccttgagtgtggaaagcctccaccactacccctcacttgcacagattagcaagttcttgccctctgtcaaaatatttcccagctcctttgccgggcgcggtggctcaagcctataatcccagcactttgggaggccaaggcgggtggatcacctgaagtcgggagttcgagaccagcctggccaacatggtgaaacctcatctctactgaaaatacaaaaattagccaggcgtggtggcgcacgcctgtactcccagctactcgggaggctgaggcaggagaatcatttgaacccgggaggcagaagttgcagtgggccgaaatcgcgccactgcactccagcctgggcaacattgcgagactccttctcaaaaaaaaaaaaaaaaaaaaagatacatcccagctccagcctctgataactgtttggtgctgggcaagatagttaacttctctatgcctcttttctgtgataatacctatgttttagatagtgaaagggagtaaagatttaatgagtaaaaagtatttataatagtacctagtacttagaaaatattcagtagcccttattgttataatatttgttacattgtattgaaattgaaggcaagagcaatgccttcatttttgtatggcacttacctagtaaagccctggccctagtaaatagtccataaatctttgtcagataaatgtgcaaaacacccacaatacagaaactgaggctttgggagtttgccctcactacaccactaataagtgtagatcttaaatctaattccattgatctttccattcacgcaagctgtattcctgcttttctggaaccatattcagtttaccttgattaaatatgggtaattttagatagatttggataatattagaatccttcatcttgctttgataatattttgggttttgtcatttctaggcatgggtgatcttactatgcttgattgtcattcattctcagaagtatttctttccattcaggtcacctctgccatatactgcctgtagttagtattagctccattttaccctggagaaattgaggttcaggaagatttaaatgacttacttctagttataaagtaaaagaacttgggatttcaaatttcttccctcacagactctttactattaagagaataagcacttacaaaatagattttt

SEQ ID NO: 916026 - DNA, 4001 bp, Homo sapiens
aaagttatttcaaaaatgttaacaaacagtattattaggttggtgaaaaagtatattcagacttaccaactaaaactttagctgctggattgtcaacaccaatgttttttagaatagtggcaccatcattggttaccataagagaggcatctcgtccactgcttagaagaattttgtcctaaagggaacataattggttcaagttaagacataagcacatcttgaagaatgcatggatcaatcagtattctcacacagtgctagtgtataaacactctggatagctattttgtggtatccattcatcaaatgttttcaatacatacaccacgtaaccaaaccatgtatctacccctagaaacactagaagcacaggtagacactagtttttgtttcaacaccgtaactgcaaaaacaatggaaagaaactatcaatacagccataattaaattataaaataattaaggtacaggataatatttgacagttaaaggggcagtgttatctacttacactgaaaggaatttaaaagagcaagctacaaaaaagtattgataaatagtatctgttttataaaacagtatgttacatgagtataaaatacataatgaagtacacatacttctacataaacagaatattagaagatgtacgtgcaaatgataacagtacttgtcattggggaggggcatgggattggggatggtgattctggggactctgatttttactaaggagaacatacttgtcttttataattaaacgttttaaagattaaaaagcattttaatacgcttgttattatatttccaccaagcgctctaaaacaatattaaaatataaaacttttctatttttcttaccatgcctttgggtcccaaggtgctctttaccaagtctccaatggcgatggcaccaataaaagaagtctggagtaaaaaccaaggagattatcagaatcaactttacagtcttcaagtacagttttatctttatttacttttttttttttttgaggcagagtgtcgctctgtcgcccaggctggagtgcaatggcgcgatctcagctcactgcaacctccgcctcctgggttcaagcgatcctcctgcctcagcctcccgagtagctgggattacaggtgcccatcaccacgcccggctaatttttgtatttctagtagaaacggggttttaccatgttggccaggctggtctcgaactcctgacctcagttcatccgcctacctcggcctcccaaagtactgggattacaggagtaagccaccgcgcctggcctccagttttatctttaaaacaatgcttagaacaaggcttaccagacgagctgtctctgctctctcttcatcagctcctgccttaaagatgttaacaggtgcaagggaaagggacgcctgaaaaggaaaaccaagaggcattccgtttaagtaccaatactctaacacatacactgaggtgccttccactagtcttacaagtggacatctaagagaaaactcatttacaacaatgttttcaatcaaatgaagcttccatcatcggagaaagcatttaagtgggagagagggacttgtaggagagcgacatggcttttcggatttacaaggcccccgggagtataaattatacaccagcgagattgacagttacgtacagcgagactaaagacgatcttgaactaagaatgaggcagggaggggttgcaggccatcaaggtgacgcctgccgggcgggcgagggaacgcggcctccatcttccaccctcggaaggctgcggcccctccaccctctgatggctcagaccccgtcgctccaggctccgcccctagaaggagggcggagcgggtcccacactagaaatttcttcgctccgggtgaggcgcggacctgggctgccgggactatgcaaagacctaggcacaaggagacgctggctttgcggtccacccctccccctcgtggtgagctccaccggctggcctggcgcaggccgcacgccccgcgcatggctcgcaccatgtgcggagggccggggagacagaaacggagcctacgaccctagcaggacagaggaagcagtggggtggcaagagcacggcggagcaggggtagggcaagaggcaggggagtcaggctcaccatggttccgaggagttccgcacacaagtgaatcccctcacagctcgtgctcgggaccagcggactgaaggaagccggaagtgacgccacacgccctacttcggggggcggggccccggcctgtcgttaccgccagcaggcgtcccattttgattggagccccacgggccggaaacgcagcctttcacactggagggggcgtggccgccgctccagaacaaagaggcggctgccgcgcgggttgccatagaaatggagttcttgctcacactttttattttcttaaatttaatctttaaacacttctattaaagtcacacatgtacacagtttaaagtgttatataccaataaggaaaaacataatttatctgcctcaccacttcctgtctccaggaaaactgctttcaactttttcagttttttggaggggctatttactatcatattcccagataatattattgctatgttaattttaaacattatttactgagtattacagaagaagacttccttttctcttactgaattttcagacgttatttctaactggacgttgactgcccaggataaggtcttgtgaactgagagagacatttatagtattttatctttgccctatttactcattttcaggaatttttgcatttcggtcttttttttttttttcctccaatagtagagacgacttattagtctttgtttataataaactgaaatatttgggactgatcttgatgtctgccaaaaccttggcagacatcaagatcagtcccaaatatttcagtttattatagacagttttctactttctctaagttgacggatgtctaaaaatttgttctctaaaaaatttttctgtcatctactgataccctcttttctccctttgactaactgatcgcttaagctcctcggcagggcgcggtggctcacccctgtaatcccagcactttgggaggccgaggtgggcggatcacctgaggtcaggagttggagaccagcctggccaacatggtgaaaccctgtctctactgaaaatacaaaaattagccgggcgtggtgtgcatgcccgtaatcccagctactcaggaggctgaggcaggataattgcttgaacccgggaggcagaggtttcagtgagccgagatcacgccgctgcactccagcctgggcaacagagcgagactctgtctcaaaacaaaaacaaaacaaaacaagctcctggatttttctttttctgttttgttttttttagagatggggtcttctatgttgcccaggctggcctggaactcctgggctcaagcaatcttcctgccttggtctcctgagtagctggggtctcctggatttttgacattgctaacattaacaggaattttcaattttttagttgtttctacccttcagatttcctctaagtgggttgatttccaccaggggttggcaagctgtgaggagtcaaacccagcctgccagttgttttttgtatggcctgagagctaagaatagtttttacatttttaagtggttgaaagaaatcaaaaatttcctgacacatgaaaatcctgtgaaattaatatttcagtgtccataaagcttcattggaatccatgggcatacccatacatatttactctgtcacaatacgatagcagagttatgtggcagagttgagtagtcatgacaggttgaatgggcccacaaaacctaaaacatgtattatctaattctttacagaaaaagtttgctgaccctggtttacagtattcctcaggtccaacatgaaaaggggagttcaggctggacaaattgttattttaaatctcccaagagtt

SEQ ID NO: 916027 - DNA, 4001 bp, Homo sapiens
acagtgctagtgtataaacactctggatagctattttgtggtatccattcatcaaatgttttcaatacatacaccacgtaaccaaaccatgtatctacccctagaaacactagaagcacaggtagacactagtttttgtttcaacaccgtaactgcaaaaacaatggaaagaaactatcaatacagccataattaaattataaaataattaaggtacaggataatatttgacagttaaaggggcagtgttatctacttacactgaaaggaatttaaaagagcaagctacaaaaaagtattgataaatagtatctgttttataaaacagtatgttacatgagtataaaatacataatgaagtacacatacttctacataaacagaatattagaagatgtacgtgcaaatgataacagtacttgtcattggggaggggcatgggattggggatggtgattctggggactctgatttttactaaggagaacatacttgtcttttataattaaacgttttaaagattaaaaagcattttaatacgcttgttattatatttccaccaagcgctctaaaacaatattaaaatataaaacttttctatttttcttaccatgcctttgggtcccaaggtgctctttaccaagtctccaatggcgatggcaccaataaaagaagtctggagtaaaaaccaaggagattatcagaatcaactttacagtcttcaagtacagttttatctttatttacttttttttttttttgaggcagagtgtcgctctgtcgcccaggctggagtgcaatggcgcgatctcagctcactgcaacctccgcctcctgggttcaagcgatcctcctgcctcagcctcccgagtagctgggattacaggtgcccatcaccacgcccggctaatttttgtatttctagtagaaacggggttttaccatgttggccaggctggtctcgaactcctgacctcagttcatccgcctacctcggcctcccaaagtactgggattacaggagtaagccaccgcgcctggcctccagttttatctttaaaacaatgcttagaacaaggcttaccagacgagctgtctctgctctctcttcatcagctcctgccttaaagatgttaacaggtgcaagggaaagggacgcctgaaaaggaaaaccaagaggcattccgtttaagtaccaatactctaacacatacactgaggtgccttccactagtcttacaagtggacatctaagagaaaactcatttacaacaatgttttcaatcaaatgaagcttccatcatcggagaaagcatttaagtgggagagagggacttgtaggagagcgacatggcttttcggatttacaaggcccccgggagtataaattatacaccagcgagattgacagttacgtacagcgagactaaagacgatcttgaactaagaatgaggcagggaggggttgcaggccatcaaggtgacgcctgccgggcgggcgagggaacgcggcctccatcttccaccctcggaaggctgcggcccctccaccctctgatggctcagaccccgtcgctccaggctccgcccctagaaggagggcggagcgggtcccacactagaaatttcttcgctccgggtgaggcgcggacctgggctgccgggactatgcaaagacctaggcacaaggagacgctggctttgcggtccacccctccccctcgtggtgagctccaccggctggcctggcgcaggccgcacgccccgcgcatggctcgcaccatgtgcggagggccggggagacagaaacggagcctacgaccctagcaggacagaggaagcagtggggtggcaagagcacggcggagcaggggtagggcaagaggcaggggagtcaggctcaccatggttccgaggagttccgcacacaagtgaatcccctcacagctcgtgctcgggaccagcggactgaaggaagccggaagtgacgccacacgccctacttcggggggcggggccccggcctgtcgttaccgccagcaggcgtcccattttgattggagccccacgggccggaaacgcagcctttcacactggagggggcgtggccgccgctccagaacaaagaggcggctgccgcgcgggttgccatagaaatggagttcttgctcacactttttattttcttaaatttaatctttaaacacttctattaaagtcacacatgtacacagtttaaagtgttatataccaataaggaaaaacataatttatctgcctcaccacttcctgtctccaggaaaactgctttcaactttttcagttttttggaggggctatttactatcatattcccagataatattattgctatgttaattttaaacattatttactgagtattacagaagaagacttccttttctcttactgaattttcagacgttatttctaactggacgttgactgcccaggataaggtcttgtgaactgagagagacatttatagtattttatctttgccctatttactcattttcaggaatttttgcatttcggtcttttttttttttttcctccaatagtagagacgacttattagtctttgtttataataaactgaaatatttgggactgatcttgatgtctgccaaaaccttggcagacatcaagatcagtcccaaatatttcagtttattatagacagttttctactttctctaagttgacggatgtctaaaaatttgttctctaaaaaatttttctgtcatctactgataccctcttttctccctttgactaactgatcgcttaagctcctcggcagggcgcggtggctcacccctgtaatcccagcactttgggaggccgaggtgggcggatcacctgaggtcaggagttggagaccagcctggccaacatggtgaaaccctgtctctactgaaaatacaaaaattagccgggcgtggtgtgcatgcccgtaatcccagctactcaggaggctgaggcaggataattgcttgaacccgggaggcagaggtttcagtgagccgagatcacgccgctgcactccagcctgggcaacagagcgagactctgtctcaaaacaaaaacaaaacaaaacaagctcctggatttttctttttctgttttgttttttttagagatggggtcttctatgttgcccaggctggcctggaactcctgggctcaagcaatcttcctgccttggtctcctgagtagctggggtctcctggatttttgacattgctaacattaacaggaattttcaattttttagttgtttctacccttcagatttcctctaagtgggttgatttccaccaggggttggcaagctgtgaggagtcaaacccagcctgccagttgttttttgtatggcctgagagctaagaatagtttttacatttttaagtggttgaaagaaatcaaaaatttcctgacacatgaaaatcctgtgaaattaatatttcagtgtccataaagcttcattggaatccatgggcatacccatacatatttactctgtcacaatacgatagcagagttatgtggcagagttgagtagtcatgacaggttgaatgggcccacaaaacctaaaacatgtattatctaattctttacagaaaaagtttgctgaccctggtttacagtattcctcaggtccaacatgaaaaggggagttcaggctggacaaattgttattttaaatctcccaagagttttctcttctttgtaggaaaatttggtcttctttcaggaaatgtactttcctaggcagatcccaaatcgcattctggaatgagaagattcacaataaaaaactaagatgcctgcacaatattgaaaaaggttgtttttattgtgggcaaaattacatacctggagatatttattatgtcctctggtaggcaagcctgagactgtgtgtgatggggaaaccaatgactgctccctgctgggctttgaatgtagcca

SEQ ID NO: 916028 - DNA, 4001 bp, Homo sapiens
caaaatcctaaggtcgatagaaagaaggctgatagagaatttatgaagatgaaaagactagttgtaagaaatttaactcttatttcatacgtatatgtaaaatagcataaatcttaaaaacgctagactgaaacttatctaaaattaagatggagatattttctgctattttctaccataaaataaacctctttgtactctcttcccatccccagatgatagatgatctcagttgcctccttggcattattttagctttatgtaggaatctggtcccaccaacctggcatctctcaatacatttttagataaattttggcatttgaatttactaatgtgtttcccaaattcacttttgttttaatgattctgaagtttctcctcctttgtattctttcctatttttcagttcaacattatttctaatctttaagtaaaattcatttctctcctgtgagtttatttcatttggtgaggaaccatgctaatattttggttagatttttattgtgtgcttttaataatatctgatcctttgaatacatggagcatgtcacctagtttttagatgctacttggccttcagaaaaattgtttgccttttaactgttcttgtcagagtgggctaaggctgtaagtaaatttgacaaagtactcaccaagagaactggtgacaaaacaggcactgagaagtaagaccacagtaatggtgaagggactcaagttgacaaaatgtcttctgaagtctgtgaaaaagaaaagagggcaaaagtagcatcttcccaaaaagagactttggagaagatagatggtttcagaggttaattaacaaagaagctcaaaccaagacagaaaactcttcattctaaattgcaaggcaggcagaaaacattcatacccaggctcatatagtttcagtgaaatggttttgaaaatgttcatgtttataggcaacctagaggtgacggattagcagaaggttggtggtggaaacgagaattgcaaggtcaacccttaaaacctggaaaatggaaacaacatcaatgaaacttagtagtggacaattctcccagcaggcacagggaaggtatcctgagatttctctattccctaaccaccttgatattcaattatggatgcccccatctttaagactacctagccgcactgatagaggataagttccatgagtaaacgaattatatctatcatgttcaccataatttcaccagtacctggcttgatgcttgccaaatagtagctagcagaacaatacctaagtgatgatatccatatctgaaaaactcaaatattaaatcttgtcatctctacctgtatccttatcacataatacactctttaatgctgttattactctcatatcttctcgttactctaacccaacactaatttaaaactaaaaatgctaaatgattttaacatgtccaaataagtcttaaaatagataactcacttatcagagtagataactttctttatgtaattaactctctatcaatattcctttctgcatattctatcttttctaacaactattttttcatactcagtacatttcagttaactttagttcctgacttaatttcacctcagcagttttacaaaattaatgccgactctgattcccatatcacatcttcaattttgaatctatggcagatcaaaggtgctgccatataagcctatgtcctttttccactccttactctcctgatgccaatcacttttaaatcacatccattgactgtcataataattacataccccattaaaggggaaatgtagaataaatgagaagcttttaccagcagatccagagtcttcaagtagcaccattctgagtttgctcattccaaagatttataacttcaatgattcctaaatcttcttgtattattccctagaaatgttcttctaaagaaaacaactaagaattctaaaaatcacttcactttcatgaaaatgaaaaggctacatatggaggcggagtcaactcaaaaagggaagtcattgaaagagctgaggttccatttcatactcatgttttcttcaatatagcacatgaaacaaccaaaggaaattgggaaacacttcccacagatttcgaaaaattagaggaaatactaactcatatgctgctgttgctgaattaaatattttacatttttgaacttcattttggacaaatatataagacacaaaaaattactaattgtcatgtagaaaaattatgtaaaaaactaaagcaaaacaggcaaaacataattaaataacattttatcatatgcacttttaattttatttccataatcaaatgtgtctaatgagtaattttgtgtaagttgttgagacacagcatttgtcatttcttttctaatgggatgaagtacaccaagagaattagccatgactattactgatattacaaatggtgaaacaaaaattagcaacacatgattttagctctatataactcagattcaagtaagagaaacacatatgataacaacaatgaacataaagctaaagtgcagtgttaaaaataatggacaaagtagtcctatctattgagagaaaggaatgaacagtcagaaaactattttctctgaggacaggcttaaattgtgtcctaaaagatgagaaaaacattgccaaagggacaaatgataaaggagtttaaggcataaaaaatagcacatacaaatgaatatttgtatataaaaacatataagctcaaaagaactactaatagttcatcatggcatacatattgtcaggtgttagtgatgggcctgaaatggggaattaaagagcaactccagccttccagagagacattcactagaacccagtcaacaaaggcaccccagttttcttccacttctcaggcatgccaaatctctccctgcctcatggtatgtcatacatattgttccttctgtgtttactgcctccctacccgtacctttctctaagataactctcactcacgtatactttatttctcagttaaacctcccttcactaggagaaataactctaacgctgaaagaccccagaaaatatgcactcatgatagcctgtacttatgagggttgtcaattatatatatatttttttcctttttttaaattattattatactttaagttttaggatacatgtgcacaacatgcaggtttgttacgtatgtatacatgtgcaatgctggtgtgctgcacccattaactcgtcatttagcattaggtatatctcctaatgttatccctcccccctcccctgaccccacaaccgtccctggagtgggatgttccccttcctgtgtccatgtgttctcattgttcaattcccacctatgagtgagaacatgtggtgtttggttttttgtccttgcgatggtttgctgagaatgatggtttccagtttcatccatgtccctacaaaggacatgaactcatcattttttatggctgcatagtattccatggtatatatgtgccacattttcttaatccagtctatcattgatggacatttgggttggttccaagtctttgctattgcgagtagtgccgctataaacgtacgtgtgcatgtgtctttatagcagcatgatttataatcctttgggtatatacccagaaatgggatggctgggtcaaatggtatttctagttctagatccctgaggaattgccacactgacttccacaatggttgaattagtttacagtcccaccaacagtgtaaaagcatgcctatttctccacatcctctccagcacctattgtttcctgactttttaatgatcaccattctaactggtgtgagatggtatctcgttgtggttttggtttgcatttctctgatggccagtgatgatgagcattttttcatgtgttttttggctgcataaatgtcttcttttgagaagtatctgttcatatccttcgccaatttttgatggggttgtttgtttt

SEQ ID NO: 916029 - DNA, 4001 bp, Homo sapiens
ctgtaactgttagagaactatcttaaatagtattttcattagtatcttatggaaaagatgaagtcagagttaaactgagcatgtgtaatcccagacaacaaaaaacaaaaaccctaagaggacagaaggaacagtacccatcggggaaaggcccatgctgcttgggctacgcaaaagcagagacagaaggcgcaacctgctttggtggacatctttagtttttcaaatgatgctttgaaactaaaatggatcccgggcacttctctaagaagtaatcccaagtgagtttggcaacagtcagtaataaccatagaggagactttattattacaattatcatcagtcacatccatcattcttggaaaatgtacccaaatcaagagaaaaccctccctatagaacgaaacagggagaaataagtgtggaatgggcaattagtgtcccaatttccttcttttccatcttgtccaaaacactttaagttggtcttcttttttctcttatttcttttgttcctaataagaatatttagttccatcaaacctcatgtgtaggattatcctaggaggccatttcatcttcctaaatccttccaggaaactctgagtgcccatttgtaagaatggttagagctaaagatgaactataaagaaaaaagaatagtaagctctgacaccagcacaatcaagatctgatgaacgtgaacaaatagtgcagtaggaaattcttgagaaggagaattaaagtataattgccagaacttgtgaccttctatatatctaataccatctcaccaattcaagaccttcatctttcccattccttttctaattagatacatggcagacagcatgttgaaagttaaataatattatcttttaagtaacacacatgaattatgaagaactgtaattcattaagatgagccttgctagatagaaggcagccaagcttctcaaactgtagaaaccctttttcaaaaaggaggctttgaaaaatatcagaacttctgctggttttctagaaatgtgctggtctttagtcataagcaaaacagttacaaaatattaagttgacttgtagtaattgcactgaggaatggcacagagacacaatgccaacaggagtagcactgcattttcaaaagcctcaatcctatttaggagttataagtcccaaatacagcaaaaacctcccttcgtgattctttatttccacgaaatgtctatgaagtgcaagtgcaaaggttactactaatttcagatgtgctgtgaaagacttcttagccatgtattcctttcttagtccttactctttagggtccatcaaagacttgttctttgttttttatcataatgtcttcttatttatttgctttattaaaatttatagcagaaagatcaagggctcagacttagctggtcctgaatttaaattacacttgagattctactacatgaccttacataagtcagttagtccttataagtcttcattttccatctaccaatggagacaataatatctataaaataggttacatgtgtgaattaaattgagatgacctaaagcatttactgtagtacctggcacttgataacaataagtttctaatttatcccttctttctatttccacaacttcatatccttgtgtgacttctaatctccagtctttataatacattttctgtttactttattaatgttttcctcctttcttggatttcagttttgcctccaatattgctgctactctaagttccacaaaactttcaatttttttatatttctcatgtcctgttttctttttaccttactacataatatttatatctgtttgttgttacacatattcttagtatacccaccatctcccaaatggcagagcaaaataaaagcaaaaccttaccaatatgccacgagttttgaggcagcatcattatgggtctatctcttcctgagtcctgatgtaactcctgggtcctcttatatataatctcagaactgctcatgaggtgaaaacagatctgctatttggaaatgacaatactgtaaaattgagttcatagttttccaaaggggaagtcattataaaagctgaggttgttttttctttgctacttccttatcacgttaggatatggaaaacaaaggaagttaaataatatgcctggaaagtctcacagaataaagggaactgtaaattgccactctaaattttcaaaaagactcatgtttcacatttaaaaatttttgttccataaatgtgatcttgtcagcacagttttatagatatttatctaaaagataaaatatatcatcaggtttgtttactttagcatacatatttcaaccagttatgctaaaaggatcagaagaggttacattgctgaaaactggctagtctacgaaagctttgctgatgaaacatgagcacagataaacatatttgaaaaaatttcatgtctataaaaatgtttaacaaaatggagtcctttaaaattagttttttattgttaatgattatgtaaaagaaaataaagcttagtcatcaaatgagtttggaaaacattcatttaaatgatttcaaccattaggtagaaaaccatgagtggcttctgagctcatagtgattgttctgtgttcggataggcctgtatgtcctgccctgcttctttgggaaaattgctttttcccttccttgatatgttaagaatggtagatcacatcttttcacacgcccacgtctccccgattacagtgacaagttcaaggaaaagccaatgacccaagtgagcccatcagagtgtttgccaggatttttcgtcctatacttccatgtcgagtaggcctattagtaaaaaagaagctaatatatacagaaattaaaatgagatataaaatatctaaatactttagataaataagtccttataaatctccattgataaattcaagaactttattttttcttgtcccttttcaacttagatacctgacaaggctttatataacagaggttaaataaaattctgctgcaattaatgccaaatgtattttgaagtccaattaaacatcggagcttgctagatatgagcgagatgtgcctctgaaatgataaagtgccattctcaaaatatagtctctttcttacttctcagaactgaggtaggtgcccaaagtcagaagaaatcaggaggaaaacagggagaattttttcttggaaagcttgagatgaaatgtctttggggaaatgtaattcactaactaggataagtcacatgatggaagaatggaagacacaaaaagaggatgctgaaacttgttttagtatattatttctcagccatgctgagaaaatttcctgaaatttttaaaatacagtatgaccggaaacgctttcatgctaacagaatccatagcaaactaactgctgataaaatgatctcacagaagtgggaactgaaaatagaaaacaatgaaaacctgattattgctattctttgatagaataaatgtctccacaatatctctgctactgttttgagtttctcccatttctagacacccaagttctctcactctcaaatatttcgtagcaggttctaatctaaatgagtccctttcttgcctttatgataaaaaagcataagggatgtgataactatctctttggggaaatagctggatattctgcttcaagatctcacacagggctataattacattgtaaactggggctgtggtctcacctggaagcttgactgaggaaggatctgctcccatggccactgctattccatggactgaattgtgtctcctcaaaatttatagattaaagcaataaccccccagtgtgactatgtttcaagacagggcctttaaggaggtaattaaggttacttgagattataagggtgaggccctaatccaataggattgatgtccttacaagaagggacaccagagcttgttctctctctttccacaaatgtgcag

SEQ ID NO: 916030 - DNA, 4001 bp, Homo sapiens
cttaaactcctgggctcaagggatccgcctgccttggcctcctaaagtgctgggattacaagtgtgagccactgctctggctttttgtgtgtgtgtgtgtgtgtgtgtgaaaaagggttttgctctgttacccaggctggagtgcagtgatgtgagcagcctggacctcttggggacctcttgggctcaagtgatcttcccatctcagcctcccaagtagctgggactgcaggtgcactaccatgaccagccaatttttttagagacaaggtctcactatgttgcccagctggtctcaagctcctgggctcaagtctctacaaaatatgcaaatacccttctgccttggcctcccaagtgctgggattataggcatgagccaccacatctggtgttggtttttgtttttgtttttacgggaccaggcactacagctcacacctgtaatcctggcactttcagaggctgagactagaagattgcttgagcccaggagttcaaggctgtggggagctatgattgcaccactgcactccagcctgggtgacagagctagaccttgtctctaaactaaacaaaacaaaacccagtaccaagagacccagtgacaccaaacacgttttgcaagtaggtagtttaatagttacagttacctggttctaaaaagtgtcttgctagagaacatttgttcaaaggggccactttaaagcctgctattctagtgtatactggccgtagtttctgaaattgtagcgaagatggagaaataataacagcattcataagcacaactgcagatattatacttcttagtttaaaaaaaacctttttttttggaactataaaataaaaacacaggctacatacatactcattttctcaaattggcttttgtgcaaaaaaaggttgttacctattgggttgctttgttatttccttagaaagatgtattccaaattcccaatggccaacctgcacatgtgcactctgggaacacagtcagtttattggttgggggttgcttgcccgaaatctggggtcatagagccacttctctcattttattgtcttgatcctatccatagacccgttctcaccaatccctcaaattctatttatccctttcctggaatactagatgtctgcccacgttaattcatgccccacctagggtgccgcatttcccagcattggctccacttgctgtgagccttgaagaaggccaaagctttggccccgtcatcctccttgcacccccaaacccgtcaccagccttgctcccccagatgcttgtccatcgtccccacctacacacccttgcccacctcaccagagttacagtgccgacagctctcacagtggggccgggtgtggtggtcaggagagaaggagacccccggtatgcaaggatcacactgagcagcctttctatgctggtcacagtccttcacgaggaatgttcctgggaggagagggtaagggatcaaggcctgagaagggctggttctctgccctcttcaaggtggtgcctccccacagctgcaggatttccctccttgcttgagctcagtctcaccctgcgcctatttactgtattaaccccagtcctctctctttcgccactcacctggcccttaccaaggccccctcttacctggctcacacatctggcagcacagctttccctgagcccagtagtgcctctctgggcagctcttgggggctggagtagctgagagccccaccagggtccccagaacgcacagccaccagggatgtggccgtgccatggtccctgcccaggcggctcctttctgtgcccagttgctgatgctggcctctggagttagcacctccaagctgggcgctgctgtctcttctttgcaccccctgggcagtggctgcttcaggtggcaagccaacctttgaaggcagaatctctattgtggctgttttttttttctctctcatagcagcaacctccacccccttccccttccgtgtgctggggagagtattaaagagcaaactctgtgagacctgctgctcttcaaacatgcttcctccaacacatgagccttccttagtttccgcctctcctgctcatgaagcacgtagcccactgactcctgcttctttgacaaaaaggtgatggacacacagttgctcacccctcctattcatgcacttgtgcacaaaggtgcccacgttacccccccccacccacccccccgtccacagtttacagacgaattcgcaggactcctgtctcccatacctgcatccctcctttcacagacaacagttgaaagaaggaaggagaaccagaattgagcacaggtccacaagctcttatctgaaactttgggggtcagataagttttggaattcagaatttttcaggtttatacagaaaccagcaccacaaaacacccttggggagttggggtagtctcataatcaaacgcaacatttctgcagcaaaactattgaatatttacaccaactgggaggaagcttaaatagccttgtctcaattgaggtctggtttgatggccaaacgagtttgctacagaatgctcagaattgcaagcaaggggtgtagagctgcctctcttctgtcacactctgaccgatcacctatgctctcctttaatcctcatgtcagtctctgatgtgggtgccacctactgcccacatggccttccctctcagacccttgctcactcctcacttttgtgccatctttatcctcccctttcccacctctggctgtgtcagtcactggtgtcctggatcgcctggagcatcttctctcctagccttgggcacttgggattaaaggtagcttcctacgggggtcatctcttttttattttcccagttctcccagcaagactgatttcgggatattggaaacagctagacttttccctctttgagtcatggggacacacacgggtcaacagcctcctccactctttcctcagcaaccgatatgtggagtggcttatttccccaggaagtttttaatttaggggctttgccgttgtttccacactgttcataaatgtcacactgctgtggtcacacctgtcagatctgttctctatctcactctgtagtttcctttctcctcattttctccattctcttgtcttttcccagccccctctgcagctcttcatgggggtccactcaagtcagaagccacatttgggtgtgattcagagagctgtttatgcaaaaccagctttgtcaccatcaggcaaggcacctgaattcccaccgcagagagtgttgtggccgtgaggacttttctgtcaccagccatttccaggttgtggtaaatgtgttcactgcaggcatggggcagtggggtggctagctgactgcaggccctgggagggtggatgagaccctcagaagaatcatgaggaactggggacctttaggaagaaacttgtcgaacagggacttgcagttcgctgagcctagcaaccttgaaccgactgggaactgctcactagcctaacgctgctgtcctctgggccaaagcccatctcctcttttctacatatcacttctccagggggtcagagcaggagcagggtctgcctggctttcctggagggcctcggccaagaggaggaaggccaggtttctggacgtttttctttcctaggcaaatagaatgagctcatctccagcactctttgcatccacttctggtgagccttccccatcctaggctggctccctggacgggaccttccttttttttttttttcctccctccatttcactctgtcacccaggctagagtgcaatgatgcaatctcagctcactgcaacctctgtctcccaggctcaagccattctcacgcctcagcctcctgagtaactgggatgacaggtgcgtgccaccacgctcagctaatttttgtatttttagtagagatggagttttgccacgttggtcaggctggcctcaagttgat

SEQ ID NO: 916031 - DNA, 4001 bp, Homo sapiens
ccaggagtttgaggccagcctgtccaacatagtgaaacctggtctctactaaaaatacaaaaagtagccgggcgtggtgttgggctcctgtaatcccagctactcaagaggctgaggcaggagaatcgcttgaacccaggaggtggaggctgcagtgagtggagatcacgtcattgcactccagcctgggcaagagagcgagactccgtctcaaaaataataataaaaaataaaacgtgcaagacaattggtctagccaattgccctcagcaccaccccgccattacggccagggtcagagcctagggctgcccccaagctctgtctagcaccagtggtgggaggagtttttatctagatatagacctctcctatgtaagtgctcccacattgaaagagggaaatcatctcccgagtgtctctaacgctgtcctcaggggctctttcatctgactttgagggcggcggccattttgtatcagcctacagcatctgatacagcacaaggaattattggtcaaaatgtgaagtagcagtgacttcccccatcaggccctgctcttagccttgccccgataaaaatgtccaccacaagagcagggcattcaggaagcactatcccactcagagtgaaatctttgaattattgagaacagggcctttccgttttgagggatcagaacgtaccccaggaaacctctctcccagaagaagcctatgaggggaaagcagaggacactggggatagcacggcttcaaggccatgaggtctcaggggctggaaaggtctgagggcggaaaggctgagatggcacagggcttcccttcaggagggacagtgagtcctcactctccctcacaccctgccaggcccaggaggggctgcacatccttctgtaactctcccggcctcatgagacccctaccaccaattcttttcgaatccgtttcttaaatgacatatttatctaaagatatgtatctgcaacttttagggcaattcatacgcaaaagctcagtttcaacactttctgagaattttagctttcctatttcatgaatcattttaaagctaactagagtagaagtgcctttagacattgttcaaaaatcttaaaagagcaaagaagcagacaaaaatttaaaaatacacacagaaacacaaaaggtagttaaaagagactattacatagatcatgcgacttatgaaatgctgcaagtatgatatttggtgtcaatttttggagattgtcccgttaaggaaaattggttttgcaagaattttctctagactagattccacttcttttgctctttttcttgtttttatgtttttcctcatcatttcttttttataggtttcctcccaccttatatttatttattctttctaattttttccctccccttcttcactctttttctcctcttttcccctcttccagtcttctcccctcaactgcccacgactagttgccttccacgcctttcccagcctgggatagtctccagtcttcactccctctctgatcttgctatttaggtcactactcctctaaggagcacccattgctctggacactgagctgtgcacgctggggctgcagagaggagtctagcacagtctctgacctctggaagctcacagttccagtgggaaatcgctgctcatgaccagttccaagagaaatgcaagagaaggtggccagagctgtgggcagacaactgggcagagcacattcctgtgcatctgccccacgttcccctccctctcagctccggggaaggaagccgagtctgaccaccttacctctgggcttgcgtctttcttgcccgctgcttctcaaacaggcgtatctgtgtgaggacttggagctctgcaaccaggagcccagtggggagggtgctttgttccttctgcagagtcgtgcttaaatgaagagagacaggaagcccgatggcaaggctcctccacaccctaggcctgggccggccccaaacgtcaccagctggagctgggttccccaccccccaggctctcagggaacatgtcaaagtgaaaatgccaaagtcaagggaaaaagttaagcagaatcaggcttaaatcaggagtcaaactgtcactgccactgttaagcggcaagaaaaagatggcaagaaagattccattagtggtagcgccatgtctgaccaggctgtggggaaagaagtgggaggcagttgggggcatatgggaacagcagtggtaagcccacaaacagctccttgctctggggccctgagggcatgtgtccagtgggtgccccaggggtatctgtggaggctttataggtggcccagtgtggaagagagggcgtgggctgagcagagaatatctgagacaccaggagtgactgttaaccaggctctgttcctctaggcgtctctggccaggcctcaggtgctttcctctagcccgaatctaccatgaactctctatgtgagtatccgtctgcccattggacatctccactgggaagctcaccggacatagcaaactcaacacacatccccaactatgcataccacctgcatactaccaccctccaaacctgcttctccaggcttctcactcagtgaggggctcaccatccaccaacttgcccaagcaaaataaattgggtgtaatctttgacacccccttcacccaacttctcccacgtatttatttaccagttcctgtggatgttaccttctaaatggctccaaaatctacccaagtcactctgcactaccactactgccaccatgccaatccaagatgccaatatcatcccttgctcggacaacagctcctgcctcctcactggtcgccattctccataccacagcccaagtgatcatttaaagatgcacatgtgagtgtgcgttttccagtctgaaaaaagtggggctgggagtggtggctcatgcctataatcccagcattttaggaggccgaggtggggggatcgcttgagcccaggaagttgaggctgcagtgaaccgtgattgcaccactgcactctagcctgagtgacagagtgagaacctgtcttgaaaagaagaaaagaaaagaaaagaaaagaaaactctagttcagcttgcgactccaacaattaacacaagtacccctatttgacagcattgtacttcatctgtagcatatagtactgtgtgctacttctcatttcatgacacaccgtactcaagggttgagatttaataaaattagtatttactgcttcattaaaggcattctatatatatatatatatatatttttttttttttttttttttgagagggagtctcactctgttgcccaggctagagtgcagtggcgtgatcttggctcactgcaacctctgcctcccgggttcaagcaattctcctgcctcagcctcccaagtagctggggctacaggcatgcgccacaatgcccagctaatttttgtatctttagtagagatggggtttcaccatgttgcccaggatggtcttgatctctcttttttttttttttttttttgagacagagtcttgctttgtcatccaggctgaagtgcagcagcatgatttcggcttactacaacctccgcctcctggattcaagccattctcctgcctcagcctcccgagtagctgggattacaggcacccgccaacatgcctggctaatttttgtatttttgtagagacagggtttcactcgttggccaggctggtcttgaactcctgacctcaggtgatcctgatctgcccgcttcggcctcccaaagtgctgggattacaggcacgagccactgcgcccggcctcattaagggcattcttaagtaaaagtggcattaattttttttctttttttactgtaagtacctggcagtgaagaatgcaatgactatcatatggtttggcaccactgccttcatttatgctaaggcagcagttttatccagattgtttttgcaacattattgca

SEQ ID NO: 916032 - DNA, 4001 bp, Homo sapiens
cctcactatcctccagtgcacatcccacgcgcgcatcagctgtgactaaggttcctctggccagttaggccaggagaagggaagaggaaaagggagcaagagtgatgtgtccctccctagacaaacagtagcctctcaagccaggagcccagggcaggagcaaattgaagtgggcagagcccttcctcacccccaagcgctgggaggagggaaagggggagaggggctggacagggatgagagggttggggagggagagaggggagaagggagagcgaagggaagccccatggcgatagcatcaggcggttggctggttgccccactgccccatatcacaagtggttgggtcaccagacaggaagggccaggagggatgggggtaggggttgctgcacacccaggatggccattctcggtggaaacaagcctcaggtgtccaggaaaactggaggagggagtggctgcgctgtctttccctggctttctttccacatctggtctccagctgccttaattctcattccctcagccctcaccactgtggagccaggtctccccgcaccctgccggcgcgccccccaggacccctcgccactcacgcaaaaggccagcaggaggacgtagagcaagaacttcacacatttcattcctccttccaccgccatggctgccgggcctggggcagaggggagggcggggggattaaaactggccgaagggggacctcggtttccgggctcccggccggccctcgagggcttcccttcacggccccgattcccggcccctcccacccggaaacccgcggtcggatccacgtctcccagccccctctttacccgcaggagaggggtgggggcgacggccgcgaagcccggaccccgccccgccgcctctggggcccaggacagatccaagggcgccggcaggggcttgagcctgacgccgaccctcggcccgccagtctccgggcgtcaaacaccctttccccacccaacacccagcctggagaaacggtcttcagcccaaccccgacccccgccccagcccctttcccctgggctctgacctccccgcccaccaaaaaaaaaaaaagtgcagccagcacccccgccacaccctgcccgggcccagggaacttcgaagcaaagttgctccagggcggctggagagcgccggacgagtctccgcgggcctggggcgagccctggaggaagggactgcgggtggtctctcccagcccgcgccgaagtccgccgggtccccgcggcctcacctgggcttcccaaggctggctgcgcgttcctctcccgccgcggctccggggctctctagctgcgccccccggctcccgccccgcctgccgcgcggccccgccccgggctccagccacggtcccctcccccgccgagtggccgccggcctccctcatgtgacgcggtaacagctgcggcctgagtcactgggcccggcgcggggtgggccgagccccccgcccggccagggccacgtggcccctacccggaagaaggcgcccacccccgcaaagggaaagccgcaagggcaagacctcggggcgcctggggcccccctctggcgctatacctccgtgccaactcggggtaggagagcggggcggagcgcagcctgggtcactctggttcagagaagcggacgaggtgggtgagagttaccctctgagcgccggggcggagagctgaggccgggtgacaatgtggtctgtgaggtttccccatcctaccgtaggggatgagccagctctctcctctggctccaactctgtgcaagccccctccccatccgactgtgcagacagctggggactgcctggggtcgggtggggccagaacaaacacttccagaaagtccctggctcacatcctgggtgtctcccaacattctacagcattctagagtggggatttctggcccccctctattagcacagcttctccattttccagggatcctagtctgagaaaaggggaggaagcccttccccgaagccacgctacccagtcaatcaagacacgtccgcgtcgggtcccgccctctgggggaggattgacaaggtctgtgcttccagcctcccagacagctcctgcatccgtctgtgatagcgagggcttgggggaagacacgaaggcaggagaggcttacatcctctggatttccccgtcttatcccagaagacaaagccaggtgagggctggaagcgggctagggggatcaagctgcctccctcccttgtgtgccaggggtggtccccagaaggagctgatctgaacaggccggagagtaggaccggccgtcacacccccacacctccagcctcggccccactccttgggctcttaaggtcctgcctcaagaaccacttcctgagtcttagtgtatgtgtgtacacaaagaatgaaagaagtctctagagctaaaggaaggagatccgggctgggctgagaagcatcttccaggatcacggccttcccgcgggacacaccaagcccattccggatcttgctcttcctgaccatggctggcaggctgtggaggaggagcggagagcagaagaaaggagtattcatcaggttccttattgtgctgccactagatgccaggcatgtgctaggcttgggggctgcaaggagaggaagacagcggccctgccctctgctagcaggcagaaccgagttctggccacactgtgaagaaaggcagaagcctgcggtggcagctggttaagctcagagggagggaaagggagaggagaatggatttcacggagcagaaggatgtgctcaaggtgaccttggagaataaaggggagagctccagggacagagaagcagtcgactgtggaaaaaaaaggagcattttgtaaagtacatggcaggttggggttggctggctcaaagggcttgggacggatgtggtgagatgggctgaaggtggtctgaagatcaagattgagagactagatacataacaaccaactgcaatgtttggtccttcattgaatggttgaacaaaccagctgtgaaagacattttgggacatacagacatggactgagaattagacataagaaaattattttgttaactgttatcatggttaacaaaacggtcatataatatgattatgtagagaagttactctagtttttcctctttttttttctttattctcctatcagccaatgcatttgttacaggaaaggggtcccaatccagaccacaagagagggttcttggatctcatgcaagaaagattcagggcgagtcgcagtgcaaagtataagcaagtttattaagaaagtaaagtggtgaaacaacagctgctccatagacagagtaggatgttccccaaagtaagaggaggggctaggcgcagtggctcaccacacctgtaatcccagcattttgggaggcctaggcaggtggatcacctgaggtcaggagttcgagaccagcctggccaacacggtgaaaccccgtctctactaaaaatacaaaaagtagctgggcacaatgatgtgtgcctgtagtcccagctactcaggaggctgaggcaggagaatcacttgaacccaggaggcagaggttgcagtgagcagagatcgtgttgctgcatgccatcctgggcaacaagagtgaaactccgtctctcttttttttttttttttttttgagacggagtctcgctctgtcaccagggtggagtgcagtggtgccatcttggctcactgcaacctccgcctcccgtgttcaagtgattctcctgcctcagcctcccaagtagctgggactacaggcacgcaccactacgcccagctaatttttgtgtttttagtagagatggggtttcaccatattggccaggatggtctccatctattgacctcgtgatccgccccctcagccttccaaagtgctgggattacaggcgtgagccactgtgcccggcaaaactctgtc

SEQ ID NO: 916033 - DNA, 4001 bp, Homo sapiens
atgagaattctctattcccaccacccctgctcccagcaaccccactcacatctgcctgcatcctgtccaggatcgaagcagtgtggttgtttttcgggtaattctccatctgctgccggaagttgttattaaactctgacatcacctgagagtacggaggagcactgttgcagtcagaattcaagcaccagggtcccagacccggctgaggcaggcccttcccattattccctgcttaccttatctctaaacacatagccagcaatggctgcggccacctccaccaacatgataagagacagaaagatggcaaactgcaggagcaaaggacagaagtcaagtttggagtctatgcattacaggggcccgttttggcacagccggtccctggacactcacaaaggtcttcctcacccacccacctcacccaccttcctgagcccgaaccaagctgctctggcagtcccagaccgcccatgttggtcccgcccccaactcaccgtgatcataagacaatagttctccttgcaggccccgcagcagcccacaaaagccaccaggaagaggaagacacccactgcgatgatgaccactggcaacagagagccaggggtagccccctggattatggtctgactcaggacaagctgtgccccgacacccacggcaatcagtcccactgcacaggcctaagagaaaatcaggtgaggattaggccatatccacaacacagtggccctccatggtggagggcagggggtacacctaggacacagacttgaccccatccggaagagagattctcacacctctagggaatttctttggctgtggggtagggggatgacccatccttgcctgcccctacctcccctgatcccctcccggctctttaatcagggacatgaccaaattcaaaaacctcccagaaagccttgacctcaagacacgtatttctgacctagaataatgctttctacaggcctccagggctcccagctcaattctctcccagaactgccccctcactatcctccagtgcacatcccacgcgcgcatcagctgtgactaaggttcctctggccagttaggccaggagaagggaagaggaaaagggagcaagagtgatgtgtccctccctagacaaacagtagcctctcaagccaggagcccagggcaggagcaaattgaagtgggcagagcccttcctcacccccaagcgctgggaggagggaaagggggagaggggctggacagggatgagagggttggggagggagagaggggagaagggagagcgaagggaagccccatggcgatagcatcaggcggttggctggttgccccactgccccatatcacaagtggttgggtcaccagacaggaagggccaggagggatgggggtaggggttgctgcacacccaggatggccattctcggtggaaacaagcctcaggtgtccaggaaaactggaggagggagtggctgcgctgtctttccctggctttctttccacatctggtctccagctgccttaattctcattccctcagccctcaccactgtggagccaggtctccccgcaccctgccggcgcgccccccaggacccctcgccactcacgcaaaaggccagcaggaggacgtagagcaagaacttcacacatttcattcctccttccaccgccatggctgccgggcctggggcagaggggagggcggggggattaaaactggccgaagggggacctcggtttccgggctcccggccggccctcgagggcttcccttcacggccccgattcccggcccctcccacccggaaacccgcggtcggatccacgtctcccagccccctctttacccgcaggagaggggtgggggcgacggccgcgaagcccggaccccgccccgccgcctctggggcccaggacagatccaagggcgccggcaggggcttgagcctgacgccgaccctcggcccgccagtctccgggcgtcaaacaccctttccccacccaacacccagcctggagaaacggtcttcagcccaaccccgacccccgccccagcccctttcccctgggctctgacctccccgcccaccaaaaaaaaaaaaagtgcagccagcacccccgccacaccctgcccgggcccagggaacttcgaagcaaagttgctccagggcggctggagagcgccggacgagtctccgcgggcctggggcgagccctggaggaagggactgcgggtggtctctcccagcccgcgccgaagtccgccgggtccccgcggcctcacctgggcttcccaaggctggctgcgcgttcctctcccgccgcggctccggggctctctagctgcgccccccggctcccgccccgcctgccgcgcggccccgccccgggctccagccacggtcccctcccccgccgagtggccgccggcctccctcatgtgacgcggtaacagctgcggcctgagtcactgggcccggcgcggggtgggccgagccccccgcccggccagggccacgtggcccctacccggaagaaggcgcccacccccgcaaagggaaagccgcaagggcaagacctcggggcgcctggggcccccctctggcgctatacctccgtgccaactcggggtaggagagcggggcggagcgcagcctgggtcactctggttcagagaagcggacgaggtgggtgagagttaccctctgagcgccggggcggagagctgaggccgggtgacaatgtggtctgtgaggtttccccatcctaccgtaggggatgagccagctctctcctctggctccaactctgtgcaagccccctccccatccgactgtgcagacagctggggactgcctggggtcgggtggggccagaacaaacacttccagaaagtccctggctcacatcctgggtgtctcccaacattctacagcattctagagtggggatttctggcccccctctattagcacagcttctccattttccagggatcctagtctgagaaaaggggaggaagcccttccccgaagccacgctacccagtcaatcaagacacgtccgcgtcgggtcccgccctctgggggaggattgacaaggtctgtgcttccagcctcccagacagctcctgcatccgtctgtgatagcgagggcttgggggaagacacgaaggcaggagaggcttacatcctctggatttccccgtcttatcccagaagacaaagccaggtgagggctggaagcgggctagggggatcaagctgcctccctcccttgtgtgccaggggtggtccccagaaggagctgatctgaacaggccggagagtaggaccggccgtcacacccccacacctccagcctcggccccactccttgggctcttaaggtcctgcctcaagaaccacttcctgagtcttagtgtatgtgtgtacacaaagaatgaaagaagtctctagagctaaaggaaggagatccgggctgggctgagaagcatcttccaggatcacggccttcccgcgggacacaccaagcccattccggatcttgctcttcctgaccatggctggcaggctgtggaggaggagcggagagcagaagaaaggagtattcatcaggttccttattgtgctgccactagatgccaggcatgtgctaggcttgggggctgcaaggagaggaagacagcggccctgccctctgctagcaggcagaaccgagttctggccacactgtgaagaaaggcagaagcctgcggtggcagctggttaagctcagagggagggaaagggagaggagaatggatttcacggagcagaaggatgtgctcaaggtgaccttggagaataaaggggagagctccagggacagagaagcagtcgactgtggaaaaaaaaggagcattttgtaaagtacatggcaggttggggttggctggctcaaagggcttgggacggatgtggtgagatgggctgaaggtggtc

SEQ ID NO: 916034 - DNA, 4001 bp, Homo sapiens
tacaggcactcaccaccacacctggctaatttttgtatttttagtagagacagggtttcaccacgttggccaggctagtcttgaacttctgacctcaggtgatctgcccacctcggccttcaaaagtgctgagattacaggcgtgagtcaccacacccagccttggagatgagaattctctattcccaccacccctgctcccagcaaccccactcacatctgcctgcatcctgtccaggatcgaagcagtgtggttgtttttcgggtaattctccatctgctgccggaagttgttattaaactctgacatcacctgagagtacggaggagcactgttgcagtcagaattcaagcaccagggtcccagacccggctgaggcaggcccttcccattattccctgcttaccttatctctaaacacatagccagcaatggctgcggccacctccaccaacatgataagagacagaaagatggcaaactgcaggagcaaaggacagaagtcaagtttggagtctatgcattacaggggcccgttttggcacagccggtccctggacactcacaaaggtcttcctcacccacccacctcacccaccttcctgagcccgaaccaagctgctctggcagtcccagaccgcccatgttggtcccgcccccaactcaccgtgatcataagacaatagttctccttgcaggccccgcagcagcccacaaaagccaccaggaagaggaagacacccactgcgatgatgaccactggcaacagagagccaggggtagccccctggattatggtctgactcaggacaagctgtgccccgacacccacggcaatcagtcccactgcacaggcctaagagaaaatcaggtgaggattaggccatatccacaacacagtggccctccatggtggagggcagggggtacacctaggacacagacttgaccccatccggaagagagattctcacacctctagggaatttctttggctgtggggtagggggatgacccatccttgcctgcccctacctcccctgatcccctcccggctctttaatcagggacatgaccaaattcaaaaacctcccagaaagccttgacctcaagacacgtatttctgacctagaataatgctttctacaggcctccagggctcccagctcaattctctcccagaactgccccctcactatcctccagtgcacatcccacgcgcgcatcagctgtgactaaggttcctctggccagttaggccaggagaagggaagaggaaaagggagcaagagtgatgtgtccctccctagacaaacagtagcctctcaagccaggagcccagggcaggagcaaattgaagtgggcagagcccttcctcacccccaagcgctgggaggagggaaagggggagaggggctggacagggatgagagggttggggagggagagaggggagaagggagagcgaagggaagccccatggcgatagcatcaggcggttggctggttgccccactgccccatatcacaagtggttgggtcaccagacaggaagggccaggagggatgggggtaggggttgctgcacacccaggatggccattctcggtggaaacaagcctcaggtgtccaggaaaactggaggagggagtggctgcgctgtctttccctggctttctttccacatctggtctccagctgccttaattctcattccctcagccctcaccactgtggagccaggtctccccgcaccctgccggcgcgccccccaggacccctcgccactcacgcaaaaggccagcaggaggacgtagagcaagaacttcacacatttcattcctccttccaccgccatggctgccgggcctggggcagaggggagggcggggggattaaaactggccgaagggggacctcggtttccgggctcccggccggccctcgagggcttcccttcacggccccgattcccggcccctcccacccggaaacccgcggtcggatccacgtctcccagccccctctttacccgcaggagaggggtgggggcgacggccgcgaagcccggaccccgccccgccgcctctggggcccaggacagatccaagggcgccggcaggggcttgagcctgacgccgaccctcggcccgccagtctccgggcgtcaaacaccctttccccacccaacacccagcctggagaaacggtcttcagcccaaccccgacccccgccccagcccctttcccctgggctctgacctccccgcccaccaaaaaaaaaaaaagtgcagccagcacccccgccacaccctgcccgggcccagggaacttcgaagcaaagttgctccagggcggctggagagcgccggacgagtctccgcgggcctggggcgagccctggaggaagggactgcgggtggtctctcccagcccgcgccgaagtccgccgggtccccgcggcctcacctgggcttcccaaggctggctgcgcgttcctctcccgccgcggctccggggctctctagctgcgccccccggctcccgccccgcctgccgcgcggccccgccccgggctccagccacggtcccctcccccgccgagtggccgccggcctccctcatgtgacgcggtaacagctgcggcctgagtcactgggcccggcgcggggtgggccgagccccccgcccggccagggccacgtggcccctacccggaagaaggcgcccacccccgcaaagggaaagccgcaagggcaagacctcggggcgcctggggcccccctctggcgctatacctccgtgccaactcggggtaggagagcggggcggagcgcagcctgggtcactctggttcagagaagcggacgaggtgggtgagagttaccctctgagcgccggggcggagagctgaggccgggtgacaatgtggtctgtgaggtttccccatcctaccgtaggggatgagccagctctctcctctggctccaactctgtgcaagccccctccccatccgactgtgcagacagctggggactgcctggggtcgggtggggccagaacaaacacttccagaaagtccctggctcacatcctgggtgtctcccaacattctacagcattctagagtggggatttctggcccccctctattagcacagcttctccattttccagggatcctagtctgagaaaaggggaggaagcccttccccgaagccacgctacccagtcaatcaagacacgtccgcgtcgggtcccgccctctgggggaggattgacaaggtctgtgcttccagcctcccagacagctcctgcatccgtctgtgatagcgagggcttgggggaagacacgaaggcaggagaggcttacatcctctggatttccccgtcttatcccagaagacaaagccaggtgagggctggaagcgggctagggggatcaagctgcctccctcccttgtgtgccaggggtggtccccagaaggagctgatctgaacaggccggagagtaggaccggccgtcacacccccacacctccagcctcggccccactccttgggctcttaaggtcctgcctcaagaaccacttcctgagtcttagtgtatgtgtgtacacaaagaatgaaagaagtctctagagctaaaggaaggagatccgggctgggctgagaagcatcttccaggatcacggccttcccgcgggacacaccaagcccattccggatcttgctcttcctgaccatggctggcaggctgtggaggaggagcggagagcagaagaaaggagtattcatcaggttccttattgtgctgccactagatgccaggcatgtgctaggcttgggggctgcaaggagaggaagacagcggccctgccctctgctagcaggcagaaccgagttctggccacactgtgaagaaaggcagaagcctgcggtggcagctggttaagctcagagggagggaaagggagaggagaatggatttcacggagc

SEQ ID NO: 916035 - DNA, 4001 bp, Homo sapiens
tttttttgagacagagacttgctctgttgcccagacaagtgcccagcggtggctcaatctcggctcactgcaacctccgcctcccgggttcaagcgattctcctgcctcaccctcctgagtaggtgggattacaggcactcaccaccacacctggctaatttttgtatttttagtagagacagggtttcaccacgttggccaggctagtcttgaacttctgacctcaggtgatctgcccacctcggccttcaaaagtgctgagattacaggcgtgagtcaccacacccagccttggagatgagaattctctattcccaccacccctgctcccagcaaccccactcacatctgcctgcatcctgtccaggatcgaagcagtgtggttgtttttcgggtaattctccatctgctgccggaagttgttattaaactctgacatcacctgagagtacggaggagcactgttgcagtcagaattcaagcaccagggtcccagacccggctgaggcaggcccttcccattattccctgcttaccttatctctaaacacatagccagcaatggctgcggccacctccaccaacatgataagagacagaaagatggcaaactgcaggagcaaaggacagaagtcaagtttggagtctatgcattacaggggcccgttttggcacagccggtccctggacactcacaaaggtcttcctcacccacccacctcacccaccttcctgagcccgaaccaagctgctctggcagtcccagaccgcccatgttggtcccgcccccaactcaccgtgatcataagacaatagttctccttgcaggccccgcagcagcccacaaaagccaccaggaagaggaagacacccactgcgatgatgaccactggcaacagagagccaggggtagccccctggattatggtctgactcaggacaagctgtgccccgacacccacggcaatcagtcccactgcacaggcctaagagaaaatcaggtgaggattaggccatatccacaacacagtggccctccatggtggagggcagggggtacacctaggacacagacttgaccccatccggaagagagattctcacacctctagggaatttctttggctgtggggtagggggatgacccatccttgcctgcccctacctcccctgatcccctcccggctctttaatcagggacatgaccaaattcaaaaacctcccagaaagccttgacctcaagacacgtatttctgacctagaataatgctttctacaggcctccagggctcccagctcaattctctcccagaactgccccctcactatcctccagtgcacatcccacgcgcgcatcagctgtgactaaggttcctctggccagttaggccaggagaagggaagaggaaaagggagcaagagtgatgtgtccctccctagacaaacagtagcctctcaagccaggagcccagggcaggagcaaattgaagtgggcagagcccttcctcacccccaagcgctgggaggagggaaagggggagaggggctggacagggatgagagggttggggagggagagaggggagaagggagagcgaagggaagccccatggcgatagcatcaggcggttggctggttgccccactgccccatatcacaagtggttgggtcaccagacaggaagggccaggagggatgggggtaggggttgctgcacacccaggatggccattctcggtggaaacaagcctcaggtgtccaggaaaactggaggagggagtggctgcgctgtctttccctggctttctttccacatctggtctccagctgccttaattctcattccctcagccctcaccactgtggagccaggtctccccgcaccctgccggcgcgccccccaggacccctcgccactcacgcaaaaggccagcaggaggacgtagagcaagaacttcacacatttcattcctccttccaccgccatggctgccgggcctggggcagaggggagggcggggggattaaaactggccgaagggggacctcggtttccgggctcccggccggccctcgagggcttcccttcacggccccgattcccggcccctcccacccggaaacccgcggtcggatccacgtctcccagccccctctttacccgcaggagaggggtgggggcgacggccgcgaagcccggaccccgccccgccgcctctggggcccaggacagatccaagggcgccggcaggggcttgagcctgacgccgaccctcggcccgccagtctccgggcgtcaaacaccctttccccacccaacacccagcctggagaaacggtcttcagcccaaccccgacccccgccccagcccctttcccctgggctctgacctccccgcccaccaaaaaaaaaaaaagtgcagccagcacccccgccacaccctgcccgggcccagggaacttcgaagcaaagttgctccagggcggctggagagcgccggacgagtctccgcgggcctggggcgagccctggaggaagggactgcgggtggtctctcccagcccgcgccgaagtccgccgggtccccgcggcctcacctgggcttcccaaggctggctgcgcgttcctctcccgccgcggctccggggctctctagctgcgccccccggctcccgccccgcctgccgcgcggccccgccccgggctccagccacggtcccctcccccgccgagtggccgccggcctccctcatgtgacgcggtaacagctgcggcctgagtcactgggcccggcgcggggtgggccgagccccccgcccggccagggccacgtggcccctacccggaagaaggcgcccacccccgcaaagggaaagccgcaagggcaagacctcggggcgcctggggcccccctctggcgctatacctccgtgccaactcggggtaggagagcggggcggagcgcagcctgggtcactctggttcagagaagcggacgaggtgggtgagagttaccctctgagcgccggggcggagagctgaggccgggtgacaatgtggtctgtgaggtttccccatcctaccgtaggggatgagccagctctctcctctggctccaactctgtgcaagccccctccccatccgactgtgcagacagctggggactgcctggggtcgggtggggccagaacaaacacttccagaaagtccctggctcacatcctgggtgtctcccaacattctacagcattctagagtggggatttctggcccccctctattagcacagcttctccattttccagggatcctagtctgagaaaaggggaggaagcccttccccgaagccacgctacccagtcaatcaagacacgtccgcgtcgggtcccgccctctgggggaggattgacaaggtctgtgcttccagcctcccagacagctcctgcatccgtctgtgatagcgagggcttgggggaagacacgaaggcaggagaggcttacatcctctggatttccccgtcttatcccagaagacaaagccaggtgagggctggaagcgggctagggggatcaagctgcctccctcccttgtgtgccaggggtggtccccagaaggagctgatctgaacaggccggagagtaggaccggccgtcacacccccacacctccagcctcggccccactccttgggctcttaaggtcctgcctcaagaaccacttcctgagtcttagtgtatgtgtgtacacaaagaatgaaagaagtctctagagctaaaggaaggagatccgggctgggctgagaagcatcttccaggatcacggccttcccgcgggacacaccaagcccattccggatcttgctcttcctgaccatggctggcaggctgtggaggaggagcggagagcagaagaaaggagtattcatcaggttccttattgtgctgccactagatgccaggcatgtgctaggcttgggggctgcaaggagaggaagac

SEQ ID NO: 916036 - DNA, 4001 bp, Homo sapiens
aggtggcaggcacaaaggacaaaagcaccatcagaaacttcccaccccaaccccctcccttggtccatcagtctcttccctgcccctgtacctttcaccccacccttagcatttccagatcccctccccatccctgaccctgtccacctccatcctgggtctcttgcattctaaaacatttcccaggtttcccaagtcccatacacagtctcctccctacctccttatggatcgccttctcgttgaaattaatcccacagcccacagtaacattaatgcagcaggagtcggggactcggttcttcgacatggaagggattttctcccaatctgtgtagttagcagccccacagcacttaaactgggggagggaagaaatatggagaagaaggttgttaagtgaaccttcaccttcaatatggagatgagaattctttttttttttttttttttttttttgagacagagacttgctctgttgcccagacaagtgcccagcggtggctcaatctcggctcactgcaacctccgcctcccgggttcaagcgattctcctgcctcaccctcctgagtaggtgggattacaggcactcaccaccacacctggctaatttttgtatttttagtagagacagggtttcaccacgttggccaggctagtcttgaacttctgacctcaggtgatctgcccacctcggccttcaaaagtgctgagattacaggcgtgagtcaccacacccagccttggagatgagaattctctattcccaccacccctgctcccagcaaccccactcacatctgcctgcatcctgtccaggatcgaagcagtgtggttgtttttcgggtaattctccatctgctgccggaagttgttattaaactctgacatcacctgagagtacggaggagcactgttgcagtcagaattcaagcaccagggtcccagacccggctgaggcaggcccttcccattattccctgcttaccttatctctaaacacatagccagcaatggctgcggccacctccaccaacatgataagagacagaaagatggcaaactgcaggagcaaaggacagaagtcaagtttggagtctatgcattacaggggcccgttttggcacagccggtccctggacactcacaaaggtcttcctcacccacccacctcacccaccttcctgagcccgaaccaagctgctctggcagtcccagaccgcccatgttggtcccgcccccaactcaccgtgatcataagacaatagttctccttgcaggccccgcagcagcccacaaaagccaccaggaagaggaagacacccactgcgatgatgaccactggcaacagagagccaggggtagccccctggattatggtctgactcaggacaagctgtgccccgacacccacggcaatcagtcccactgcacaggcctaagagaaaatcaggtgaggattaggccatatccacaacacagtggccctccatggtggagggcagggggtacacctaggacacagacttgaccccatccggaagagagattctcacacctctagggaatttctttggctgtggggtagggggatgacccatccttgcctgcccctacctcccctgatcccctcccggctctttaatcagggacatgaccaaattcaaaaacctcccagaaagccttgacctcaagacacgtatttctgacctagaataatgctttctacaggcctccagggctcccagctcaattctctcccagaactgccccctcactatcctccagtgcacatcccacgcgcgcatcagctgtgactaaggttcctctggccagttaggccaggagaagggaagaggaaaagggagcaagagtgatgtgtccctccctagacaaacagtagcctctcaagccaggagcccagggcaggagcaaattgaagtgggcagagcccttcctcacccccaagcgctgggaggagggaaagggggagaggggctggacagggatgagagggttggggagggagagaggggagaagggagagcgaagggaagccccatggcgatagcatcaggcggttggctggttgccccactgccccatatcacaagtggttgggtcaccagacaggaagggccaggagggatgggggtaggggttgctgcacacccaggatggccattctcggtggaaacaagcctcaggtgtccaggaaaactggaggagggagtggctgcgctgtctttccctggctttctttccacatctggtctccagctgccttaattctcattccctcagccctcaccactgtggagccaggtctccccgcaccctgccggcgcgccccccaggacccctcgccactcacgcaaaaggccagcaggaggacgtagagcaagaacttcacacatttcattcctccttccaccgccatggctgccgggcctggggcagaggggagggcggggggattaaaactggccgaagggggacctcggtttccgggctcccggccggccctcgagggcttcccttcacggccccgattcccggcccctcccacccggaaacccgcggtcggatccacgtctcccagccccctctttacccgcaggagaggggtgggggcgacggccgcgaagcccggaccccgccccgccgcctctggggcccaggacagatccaagggcgccggcaggggcttgagcctgacgccgaccctcggcccgccagtctccgggcgtcaaacaccctttccccacccaacacccagcctggagaaacggtcttcagcccaaccccgacccccgccccagcccctttcccctgggctctgacctccccgcccaccaaaaaaaaaaaaagtgcagccagcacccccgccacaccctgcccgggcccagggaacttcgaagcaaagttgctccagggcggctggagagcgccggacgagtctccgcgggcctggggcgagccctggaggaagggactgcgggtggtctctcccagcccgcgccgaagtccgccgggtccccgcggcctcacctgggcttcccaaggctggctgcgcgttcctctcccgccgcggctccggggctctctagctgcgccccccggctcccgccccgcctgccgcgcggccccgccccgggctccagccacggtcccctcccccgccgagtggccgccggcctccctcatgtgacgcggtaacagctgcggcctgagtcactgggcccggcgcggggtgggccgagccccccgcccggccagggccacgtggcccctacccggaagaaggcgcccacccccgcaaagggaaagccgcaagggcaagacctcggggcgcctggggcccccctctggcgctatacctccgtgccaactcggggtaggagagcggggcggagcgcagcctgggtcactctggttcagagaagcggacgaggtgggtgagagttaccctctgagcgccggggcggagagctgaggccgggtgacaatgtggtctgtgaggtttccccatcctaccgtaggggatgagccagctctctcctctggctccaactctgtgcaagccccctccccatccgactgtgcagacagctggggactgcctggggtcgggtggggccagaacaaacacttccagaaagtccctggctcacatcctgggtgtctcccaacattctacagcattctagagtggggatttctggcccccctctattagcacagcttctccattttccagggatcctagtctgagaaaaggggaggaagcccttccccgaagccacgctacccagtcaatcaagacacgtccgcgtcgggtcccgccctctgggggaggattgacaaggtctgtgcttccagcctcccagacagctcctgcatccgtctgtgatagcgagggcttgggggaagacacgaaggcaggagaggcttacatcctctggatttccccgtcttatcccagaagacaaagccaggt

SEQ ID NO: 916037 - DNA, 4001 bp, Homo sapiens
cccctgctcagggttatctcttacctcgacaaaagcaattccaagggctgctgcagctaccaccagcacatttttcctcagccagcccccaatcttctccacacagccctgaaggtggcaggcacaaaggacaaaagcaccatcagaaacttcccaccccaaccccctcccttggtccatcagtctcttccctgcccctgtacctttcaccccacccttagcatttccagatcccctccccatccctgaccctgtccacctccatcctgggtctcttgcattctaaaacatttcccaggtttcccaagtcccatacacagtctcctccctacctccttatggatcgccttctcgttgaaattaatcccacagcccacagtaacattaatgcagcaggagtcggggactcggttcttcgacatggaagggattttctcccaatctgtgtagttagcagccccacagcacttaaactgggggagggaagaaatatggagaagaaggttgttaagtgaaccttcaccttcaatatggagatgagaattctttttttttttttttttttttttttgagacagagacttgctctgttgcccagacaagtgcccagcggtggctcaatctcggctcactgcaacctccgcctcccgggttcaagcgattctcctgcctcaccctcctgagtaggtgggattacaggcactcaccaccacacctggctaatttttgtatttttagtagagacagggtttcaccacgttggccaggctagtcttgaacttctgacctcaggtgatctgcccacctcggccttcaaaagtgctgagattacaggcgtgagtcaccacacccagccttggagatgagaattctctattcccaccacccctgctcccagcaaccccactcacatctgcctgcatcctgtccaggatcgaagcagtgtggttgtttttcgggtaattctccatctgctgccggaagttgttattaaactctgacatcacctgagagtacggaggagcactgttgcagtcagaattcaagcaccagggtcccagacccggctgaggcaggcccttcccattattccctgcttaccttatctctaaacacatagccagcaatggctgcggccacctccaccaacatgataagagacagaaagatggcaaactgcaggagcaaaggacagaagtcaagtttggagtctatgcattacaggggcccgttttggcacagccggtccctggacactcacaaaggtcttcctcacccacccacctcacccaccttcctgagcccgaaccaagctgctctggcagtcccagaccgcccatgttggtcccgcccccaactcaccgtgatcataagacaatagttctccttgcaggccccgcagcagcccacaaaagccaccaggaagaggaagacacccactgcgatgatgaccactggcaacagagagccaggggtagccccctggattatggtctgactcaggacaagctgtgccccgacacccacggcaatcagtcccactgcacaggcctaagagaaaatcaggtgaggattaggccatatccacaacacagtggccctccatggtggagggcagggggtacacctaggacacagacttgaccccatccggaagagagattctcacacctctagggaatttctttggctgtggggtagggggatgacccatccttgcctgcccctacctcccctgatcccctcccggctctttaatcagggacatgaccaaattcaaaaacctcccagaaagccttgacctcaagacacgtatttctgacctagaataatgctttctacaggcctccagggctcccagctcaattctctcccagaactgccccctcactatcctccagtgcacatcccacgcgcgcatcagctgtgactaaggttcctctggccagttaggccaggagaagggaagaggaaaagggagcaagagtgatgtgtccctccctagacaaacagtagcctctcaagccaggagcccagggcaggagcaaattgaagtgggcagagcccttcctcacccccaagcgctgggaggagggaaagggggagaggggctggacagggatgagagggttggggagggagagaggggagaagggagagcgaagggaagccccatggcgatagcatcaggcggttggctggttgccccactgccccatatcacaagtggttgggtcaccagacaggaagggccaggagggatgggggtaggggttgctgcacacccaggatggccattctcggtggaaacaagcctcaggtgtccaggaaaactggaggagggagtggctgcgctgtctttccctggctttctttccacatctggtctccagctgccttaattctcattccctcagccctcaccactgtggagccaggtctccccgcaccctgccggcgcgccccccaggacccctcgccactcacgcaaaaggccagcaggaggacgtagagcaagaacttcacacatttcattcctccttccaccgccatggctgccgggcctggggcagaggggagggcggggggattaaaactggccgaagggggacctcggtttccgggctcccggccggccctcgagggcttcccttcacggccccgattcccggcccctcccacccggaaacccgcggtcggatccacgtctcccagccccctctttacccgcaggagaggggtgggggcgacggccgcgaagcccggaccccgccccgccgcctctggggcccaggacagatccaagggcgccggcaggggcttgagcctgacgccgaccctcggcccgccagtctccgggcgtcaaacaccctttccccacccaacacccagcctggagaaacggtcttcagcccaaccccgacccccgccccagcccctttcccctgggctctgacctccccgcccaccaaaaaaaaaaaaagtgcagccagcacccccgccacaccctgcccgggcccagggaacttcgaagcaaagttgctccagggcggctggagagcgccggacgagtctccgcgggcctggggcgagccctggaggaagggactgcgggtggtctctcccagcccgcgccgaagtccgccgggtccccgcggcctcacctgggcttcccaaggctggctgcgcgttcctctcccgccgcggctccggggctctctagctgcgccccccggctcccgccccgcctgccgcgcggccccgccccgggctccagccacggtcccctcccccgccgagtggccgccggcctccctcatgtgacgcggtaacagctgcggcctgagtcactgggcccggcgcggggtgggccgagccccccgcccggccagggccacgtggcccctacccggaagaaggcgcccacccccgcaaagggaaagccgcaagggcaagacctcggggcgcctggggcccccctctggcgctatacctccgtgccaactcggggtaggagagcggggcggagcgcagcctgggtcactctggttcagagaagcggacgaggtgggtgagagttaccctctgagcgccggggcggagagctgaggccgggtgacaatgtggtctgtgaggtttccccatcctaccgtaggggatgagccagctctctcctctggctccaactctgtgcaagccccctccccatccgactgtgcagacagctggggactgcctggggtcgggtggggccagaacaaacacttccagaaagtccctggctcacatcctgggtgtctcccaacattctacagcattctagagtggggatttctggcccccctctattagcacagcttctccattttccagggatcctagtctgagaaaaggggaggaagcccttccccgaagccacgctacccagtcaatcaagacacgtccgcgtcgggtcccgccctctgggggaggattgacaaggtctgtgcttccagcctccc

SEQ ID NO: 916038 - DNA, 4001 bp, Homo sapiens
ggacagaagtcaagtttggagtctatgcattacaggggcccgttttggcacagccggtccctggacactcacaaaggtcttcctcacccacccacctcacccaccttcctgagcccgaaccaagctgctctggcagtcccagaccgcccatgttggtcccgcccccaactcaccgtgatcataagacaatagttctccttgcaggccccgcagcagcccacaaaagccaccaggaagaggaagacacccactgcgatgatgaccactggcaacagagagccaggggtagccccctggattatggtctgactcaggacaagctgtgccccgacacccacggcaatcagtcccactgcacaggcctaagagaaaatcaggtgaggattaggccatatccacaacacagtggccctccatggtggagggcagggggtacacctaggacacagacttgaccccatccggaagagagattctcacacctctagggaatttctttggctgtggggtagggggatgacccatccttgcctgcccctacctcccctgatcccctcccggctctttaatcagggacatgaccaaattcaaaaacctcccagaaagccttgacctcaagacacgtatttctgacctagaataatgctttctacaggcctccagggctcccagctcaattctctcccagaactgccccctcactatcctccagtgcacatcccacgcgcgcatcagctgtgactaaggttcctctggccagttaggccaggagaagggaagaggaaaagggagcaagagtgatgtgtccctccctagacaaacagtagcctctcaagccaggagcccagggcaggagcaaattgaagtgggcagagcccttcctcacccccaagcgctgggaggagggaaagggggagaggggctggacagggatgagagggttggggagggagagaggggagaagggagagcgaagggaagccccatggcgatagcatcaggcggttggctggttgccccactgccccatatcacaagtggttgggtcaccagacaggaagggccaggagggatgggggtaggggttgctgcacacccaggatggccattctcggtggaaacaagcctcaggtgtccaggaaaactggaggagggagtggctgcgctgtctttccctggctttctttccacatctggtctccagctgccttaattctcattccctcagccctcaccactgtggagccaggtctccccgcaccctgccggcgcgccccccaggacccctcgccactcacgcaaaaggccagcaggaggacgtagagcaagaacttcacacatttcattcctccttccaccgccatggctgccgggcctggggcagaggggagggcggggggattaaaactggccgaagggggacctcggtttccgggctcccggccggccctcgagggcttcccttcacggccccgattcccggcccctcccacccggaaacccgcggtcggatccacgtctcccagccccctctttacccgcaggagaggggtgggggcgacggccgcgaagcccggaccccgccccgccgcctctggggcccaggacagatccaagggcgccggcaggggcttgagcctgacgccgaccctcggcccgccagtctccgggcgtcaaacaccctttccccacccaacacccagcctggagaaacggtcttcagcccaaccccgacccccgccccagcccctttcccctgggctctgacctccccgcccaccaaaaaaaaaaaaagtgcagccagcacccccgccacaccctgcccgggcccagggaacttcgaagcaaagttgctccagggcggctggagagcgccggacgagtctccgcgggcctggggcgagccctggaggaagggactgcgggtggtctctcccagcccgcgccgaagtccgccgggtccccgcggcctcacctgggcttcccaaggctggctgcgcgttcctctcccgccgcggctccggggctctctagctgcgccccccggctcccgccccgcctgccgcgcggccccgccccgggctccagccacggtcccctcccccgccgagtggccgccggcctccctcatgtgacgcggtaacagctgcggcctgagtcactgggcccggcgcggggtgggccgagccccccgcccggccagggccacgtggcccctacccggaagaaggcgcccacccccgcaaagggaaagccgcaagggcaagacctcggggcgcctggggcccccctctggcgctatacctccgtgccaactcggggtaggagagcggggcggagcgcagcctgggtcactctggttcagagaagcggacgaggtgggtgagagttaccctctgagcgccggggcggagagctgaggccgggtgacaatgtggtctgtgaggtttccccatcctaccgtaggggatgagccagctctctcctctggctccaactctgtgcaagccccctccccatccgactgtgcagacagctggggactgcctggggtcgggtggggccagaacaaacacttccagaaagtccctggctcacatcctgggtgtctcccaacattctacagcattctagagtggggatttctggcccccctctattagcacagcttctccattttccagggatcctagtctgagaaaaggggaggaagcccttccccgaagccacgctacccagtcaatcaagacacgtccgcgtcgggtcccgccctctgggggaggattgacaaggtctgtgcttccagcctcccagacagctcctgcatccgtctgtgatagcgagggcttgggggaagacacgaaggcaggagaggcttacatcctctggatttccccgtcttatcccagaagacaaagccaggtgagggctggaagcgggctagggggatcaagctgcctccctcccttgtgtgccaggggtggtccccagaaggagctgatctgaacaggccggagagtaggaccggccgtcacacccccacacctccagcctcggccccactccttgggctcttaaggtcctgcctcaagaaccacttcctgagtcttagtgtatgtgtgtacacaaagaatgaaagaagtctctagagctaaaggaaggagatccgggctgggctgagaagcatcttccaggatcacggccttcccgcgggacacaccaagcccattccggatcttgctcttcctgaccatggctggcaggctgtggaggaggagcggagagcagaagaaaggagtattcatcaggttccttattgtgctgccactagatgccaggcatgtgctaggcttgggggctgcaaggagaggaagacagcggccctgccctctgctagcaggcagaaccgagttctggccacactgtgaagaaaggcagaagcctgcggtggcagctggttaagctcagagggagggaaagggagaggagaatggatttcacggagcagaaggatgtgctcaaggtgaccttggagaataaaggggagagctccagggacagagaagcagtcgactgtggaaaaaaaaggagcattttgtaaagtacatggcaggttggggttggctggctcaaagggcttgggacggatgtggtgagatgggctgaaggtggtctgaagatcaagattgagagactagatacataacaaccaactgcaatgtttggtccttcattgaatggttgaacaaaccagctgtgaaagacattttgggacatacagacatggactgagaattagacataagaaaattattttgttaactgttatcatggttaacaaaacggtcatataatatgattatgtagagaagttactctagtttttcctctttttttttctttattctcctatcagccaatgcatttgttacaggaaaggggtcccaatccagaccacaagagagggttcttggatctcatgcaagaaagattcagggcga

SEQ ID NO: 916039 - DNA, 4001 bp, Homo sapiens
cccccaactcaccgtgatcataagacaatagttctccttgcaggccccgcagcagcccacaaaagccaccaggaagaggaagacacccactgcgatgatgaccactggcaacagagagccaggggtagccccctggattatggtctgactcaggacaagctgtgccccgacacccacggcaatcagtcccactgcacaggcctaagagaaaatcaggtgaggattaggccatatccacaacacagtggccctccatggtggagggcagggggtacacctaggacacagacttgaccccatccggaagagagattctcacacctctagggaatttctttggctgtggggtagggggatgacccatccttgcctgcccctacctcccctgatcccctcccggctctttaatcagggacatgaccaaattcaaaaacctcccagaaagccttgacctcaagacacgtatttctgacctagaataatgctttctacaggcctccagggctcccagctcaattctctcccagaactgccccctcactatcctccagtgcacatcccacgcgcgcatcagctgtgactaaggttcctctggccagttaggccaggagaagggaagaggaaaagggagcaagagtgatgtgtccctccctagacaaacagtagcctctcaagccaggagcccagggcaggagcaaattgaagtgggcagagcccttcctcacccccaagcgctgggaggagggaaagggggagaggggctggacagggatgagagggttggggagggagagaggggagaagggagagcgaagggaagccccatggcgatagcatcaggcggttggctggttgccccactgccccatatcacaagtggttgggtcaccagacaggaagggccaggagggatgggggtaggggttgctgcacacccaggatggccattctcggtggaaacaagcctcaggtgtccaggaaaactggaggagggagtggctgcgctgtctttccctggctttctttccacatctggtctccagctgccttaattctcattccctcagccctcaccactgtggagccaggtctccccgcaccctgccggcgcgccccccaggacccctcgccactcacgcaaaaggccagcaggaggacgtagagcaagaacttcacacatttcattcctccttccaccgccatggctgccgggcctggggcagaggggagggcggggggattaaaactggccgaagggggacctcggtttccgggctcccggccggccctcgagggcttcccttcacggccccgattcccggcccctcccacccggaaacccgcggtcggatccacgtctcccagccccctctttacccgcaggagaggggtgggggcgacggccgcgaagcccggaccccgccccgccgcctctggggcccaggacagatccaagggcgccggcaggggcttgagcctgacgccgaccctcggcccgccagtctccgggcgtcaaacaccctttccccacccaacacccagcctggagaaacggtcttcagcccaaccccgacccccgccccagcccctttcccctgggctctgacctccccgcccaccaaaaaaaaaaaaagtgcagccagcacccccgccacaccctgcccgggcccagggaacttcgaagcaaagttgctccagggcggctggagagcgccggacgagtctccgcgggcctggggcgagccctggaggaagggactgcgggtggtctctcccagcccgcgccgaagtccgccgggtccccgcggcctcacctgggcttcccaaggctggctgcgcgttcctctcccgccgcggctccggggctctctagctgcgccccccggctcccgccccgcctgccgcgcggccccgccccgggctccagccacggtcccctcccccgccgagtggccgccggcctccctcatgtgacgcggtaacagctgcggcctgagtcactgggcccggcgcggggtgggccgagccccccgcccggccagggccacgtggcccctacccggaagaaggcgcccacccccgcaaagggaaagccgcaagggcaagacctcggggcgcctggggcccccctctggcgctatacctccgtgccaactcggggtaggagagcggggcggagcgcagcctgggtcactctggttcagagaagcggacgaggtgggtgagagttaccctctgagcgccggggcggagagctgaggccgggtgacaatgtggtctgtgaggtttccccatcctaccgtaggggatgagccagctctctcctctggctccaactctgtgcaagccccctccccatccgactgtgcagacagctggggactgcctggggtcgggtggggccagaacaaacacttccagaaagtccctggctcacatcctgggtgtctcccaacattctacagcattctagagtggggatttctggcccccctctattagcacagcttctccattttccagggatcctagtctgagaaaaggggaggaagcccttccccgaagccacgctacccagtcaatcaagacacgtccgcgtcgggtcccgccctctgggggaggattgacaaggtctgtgcttccagcctcccagacagctcctgcatccgtctgtgatagcgagggcttgggggaagacacgaaggcaggagaggcttacatcctctggatttccccgtcttatcccagaagacaaagccaggtgagggctggaagcgggctagggggatcaagctgcctccctcccttgtgtgccaggggtggtccccagaaggagctgatctgaacaggccggagagtaggaccggccgtcacacccccacacctccagcctcggccccactccttgggctcttaaggtcctgcctcaagaaccacttcctgagtcttagtgtatgtgtgtacacaaagaatgaaagaagtctctagagctaaaggaaggagatccgggctgggctgagaagcatcttccaggatcacggccttcccgcgggacacaccaagcccattccggatcttgctcttcctgaccatggctggcaggctgtggaggaggagcggagagcagaagaaaggagtattcatcaggttccttattgtgctgccactagatgccaggcatgtgctaggcttgggggctgcaaggagaggaagacagcggccctgccctctgctagcaggcagaaccgagttctggccacactgtgaagaaaggcagaagcctgcggtggcagctggttaagctcagagggagggaaagggagaggagaatggatttcacggagcagaaggatgtgctcaaggtgaccttggagaataaaggggagagctccagggacagagaagcagtcgactgtggaaaaaaaaggagcattttgtaaagtacatggcaggttggggttggctggctcaaagggcttgggacggatgtggtgagatgggctgaaggtggtctgaagatcaagattgagagactagatacataacaaccaactgcaatgtttggtccttcattgaatggttgaacaaaccagctgtgaaagacattttgggacatacagacatggactgagaattagacataagaaaattattttgttaactgttatcatggttaacaaaacggtcatataatatgattatgtagagaagttactctagtttttcctctttttttttctttattctcctatcagccaatgcatttgttacaggaaaggggtcccaatccagaccacaagagagggttcttggatctcatgcaagaaagattcagggcgagtcgcagtgcaaagtataagcaagtttattaagaaagtaaagtggtgaaacaacagctgctccatagacagagtaggatgttccccaaagtaagaggaggggctaggcgcagtggctcaccacacctgtaatcccagcattttgggaggcctaggcaggtg

SEQ ID NO: 916040 - DNA, 4001 bp, Homo sapiens
ctttattcccattaatgagggctactgttttatttatttattttttgagacggagtctcgctctgtcgtccaggctggagtgcagttgcgtgatctcggctcactgcaagctccgcctcccgggttcacgccattctcctgcctcagcctcctaagtagctgggactacaggcgcccgcccccacgcccggctaactttttgtatttttagtacagacggggtttcatcgtgttagccaggatggtctccatctcctgacctcgtgatccgcccacctcggcctcccaaagtgctgggattacaattgagggctattgttacccacagcttgacttatctcctaggtgacaaaacatttccctcaacagcacacttttgctttgatttcaggtcctgcacattaatggagaagttgaaaatcaactcaatttgctactaattgaatcacccaaggataacgtccaaggatgactagggcagcctaaatcagacattcaaaagaaagttgaaacagtatcaggaaaagttaaaaatttctgtattaggtccttctttcacctatgctctctatttattgagtagttattattattattattattattatttctttttggcggcacacctgtgccgtaagtaatggctcgcctgattacctgaaaatttgcatgctttgcatttgtaatccacactatattttatgttcttaaacacaggatggatttatgagaagtaactgatgtttttcggaagtaaactaatatagtagacacacgcttagaaaataatccctttccacaagattgttttagttctcctgtttcttacatatccctttgttaatagatcgctcttgctgacaagtagactaattcctaagtgctagtgctttagggtacctcattaactaaggagaaagagggataaatagaaaaactcaacaaattttacagaagtaaggtatagaaaaacaataggcaaaatcccagtaacaggaaataagctagatatgtggatagaatagacaaatagaagagaggaaaatttctaagatgattatattttgctgagagacaaaggaaaggaagaacaaattctaagttacatagtctttgaagccagagattggaaaggttaaatagaaggatgaaatagaggaaaagagtcctataaagaataccaaagcaggagattgcattttcgggaattcttttgtgacttttttttttagcaaattacaaatggacactgtaaattttcatctgctgatatagctattctctcaaagatggcaaacttgcccatttccagcaactagaggatgctgtcatgagaacacaggataaggtacactgaaagcagacactgaatgcaaaggaaggcaaacaatgtaattgcttatgtggaaaacagaatttttcataaagagagacaacacttcctggagaatgtacagatggatatgaaaaaaatgatggagaataactgggctagagcagaaagttttctaattaaatctaaacactgagatgatataaactaaagcaaagagaaagatctttaaagatcttctgaaattcatttttgcggctttctctcatctcaggtattctatcttcttatagataaaaaggggtttacctcttccctgaagaagaacctgtcttctctaaaagacaaagcctcacttccttccctaacaaccattagatatcacatacatagagattagcagtatatttctctaagattatatatcatatatagagagattaccagtatatcttgtataactactattaatgtcatatatagagataccagagagtaaataggcaatcagatctgacttactttcttgtccactctccggatgcaaagagctgttctctgctacgaaacaattttcagagctcatctttattctcaagattccctagttaatctcaggtcaagtcaagctacagtgaaagtctttgctggagctcttgttgagtctgtgaggctctgaggcatctcagagtttatactccctgatgatgtctccgcccccttcctcttgccgcctacttgcttgactacattgtttctctttaatttatgctccagtggaccagacaatgtatagtgtgttgttgtggtgaagtatgggttttccctgttgtctgaaatgtgctttctcacaactgtaaggtgtagcaggaggaaagtgggattttcccagactctgagacatcctgccttaaatttctagaaaacataaacagtttaggagacagcataatctaagtaaagaattaaaagttagaggttcctgtctttgagatgaagataatttggagaaggagagtgtagtattttccaggaatcccgtttatcgatttatgcatacatttaactgatatttactgaacaccccctatgcacctgacactgtctggggccccaggatttattgctgaacatgaattttaagatctctatgctcatggatctctctccagcttgaaagggttttatttagaaagctacgaattggtttttggaagtgtgtcattcgcttcttccctggtgactagatgtatcacgtagtaagaagtaagaatgcaggaaacagaaagcttgtggtctggaacttccttgctatgctctaaaattgtttatcttaaattatctgtttcatttgtttcctgctaattttcttgtcacattttactgtcatttagactgcttttatgtcacctcagtaacagctccttcaattctccccctgtgctctaggttattctcttcagatacctctgagacttcagtcttttgaggtatgattattatttaaaacatcgctgtggtatcagtctcactcagacaagtaatgacagtcaacgcaagatgaatgcagaaagctatgtatggtgatttaaggagggaaatcaaaataccactctgattaataatcttggtgccccaaattttattattaatatcacttatttagaataaagacgttaaattttatgcataggtgggttggaagttatcatctagagaagttagttggaccattagatgcatttgtctacctaagacacaaagaggtacatgttggccctaaaagctccctttgcttccatcctatttttcagtcaatttcttagtcccttttccacatagcagctagaaccattgttttataattaattcatatgattttggtgaagtgtttaactcctccccccactgcactttgaaaggcttcctatcaaatgtaccgtaaaatccaaagacctaatagttgagaatgctttatacataatatggcccctggttacctctcttatcatttttcctattattcagtatcctctctgacagaaacctcctccttaaaaatgccaagcatcctaccactacagggcttttactttttctctaaaagattctttttccatctccctgcatgtctcgctctccctttaaccgactcactcttcagctgccacctgctcagagaaattgtcagttgctattatatgtaaaatagaacctcacactctgtgcctgtacagattgctgtcaatatctgatattatatcatggtttattatctgtttcccttactagactgtaagctgcttgagggcaagggctttgacttgtctcctctgtgcctctaacacctgccgtagtaactggaatctagtatgtattccatgcccttactgaatgcgtgaatgaatgaaaaatatgtataaaactctaaaagttctaaaatatggagtgctatttattggggttcgtaggattgtttggttgagaagtgtatgaccttaggctgctacatgcaaagaaccaggtaatacataggaatggatgtgaggtcatttatataggtcatcaggcatggtcttgttgaggaggtcatatgtggaattaaataaaaatgggaggaaagagttaaccattgaaaatttgagaacagaaagaacaagaacaagaa

SEQ ID NO: 916041 - DNA, 4001 bp, Homo sapiens
tggcaacacaggaggaggggtgcccacggccagcagggtctttttaaagcaagtcaagggttgggaaggagcacacctatatgccgtcctcactggggtgtgtgttatggtgactgatgcactgggggaagtcagtctctgcaaattggaaaaactgttcaaccaccccttcagctctggggaggagtgaatcttagaagatttccctaaggaggcttgtggggacctcagtgaccagctccagggggaataagtgcatttgtttcttttctactttttttgagacagggctcactaggtcacccaggctaagtgcagtggtgcaatcatgactcaccgcagccttgacctcccaggctcatgccatcctctcatctcagcctcctgagtagctgcgatcacaggtgcatgccaacacgcccagctaattttttatttttttgtggagatgggggtctcactatgttacccaggctggtcttgaacctggatgaaagcgatcctcctgcctcagcctcccaaagtgctgggattacaggcatgagccactgtgcctggccaagtgcacttttttgttacaagactctggtggcatgcacctgtttctacatccatctatcttgagagtggcatagagactctcttcctgcctgcagagcggcaagtattgtcatgtgtgtgcagggaatgtggctatagaaacaaggacacaagggtttcctattccttgcttctgtcgcctctcagccttcccatttgtagaggctgagtggcctgcagcaggtgtctctggagctcctggccccgctggcctctccagatgaacgtccgctctgcgccctgcctggccttgggtgggccgcctgggctggcggggaggggagagggcaaggccaaggctctcctgggcgggcagctggctggcacctgatctctcccggaaatgcacacacaggactcatcccactagaggcgcagataggtatctgccccctcctctcccgaactctgagttctctccagtgaagatacttatcgtccttgaaagaaatcaagacaagctagtctttcagggagctaccagggagttcggcgctctcacggtggctcagaatcaaagtctgagggaacgggggcctgcgaggttcctcctcaagggtggaggggcccccgactctcagggactgggtcccggggccggacccgcggccgaggcacccctgccgctcctgcgtaaaagtgagagccgctcttggctgagctctcgccgtgcccgcaccctcccttcctggcgccccctactacctgggagaccccacccggtcacaagccatactgctcaccacagtcctccttggccttggcccaaagaggggtgctccgcttctccctgccttcctctctggcactcggagggacttgagctgggagcagacacacaccccagctcaaatcctaggcgagctaaagtgctcaggaccctcccgcacgcctcatctcaagagggcccggctccccacgccggctgggcggtgatgagcccccacccgaatgcgcccgtcgcggccgtcccgcccggctctggacccggccttggagccagctggcagccgcagggcgctctctcttcccgcccggtgcctgcccggtgcgggcagtgccagctgccggcactcgcggccgcggccagtgtccggggcccgcgaacaggtgggccctgagaggagcgcgcggcagtcgcgctcactcacccagaagatgaagttaaatccgaacagcaggtatttgatgcacttggtgcctcctttgaccggcatggtgagggctaacttagcctgggccgaacgggtgcgggactggggggcgcgcgcagctgggactggcgggacctggcgctggatacagatgcaggcggctgtaggctggtctccggctgcacttttaaaaagtgccactccttagggcgcgcgacccgctgcggtgcgcatgtgccgggaaaagccgcccccactccccccgccggccacgcctcccgccccaccggccccgcccgggccgcaccccccccgccccccgcccccgcccaggtcggcgagccccggccccagctgccccgcggagcccgaccctctccctgtttccccgcctagtcgccctaacccccacccgccacccactccttcttcaagccgtcttggggtctttgcaggcagccactccctgccacttttaccgcggacttacgtggaggcctcgcccttccggttcccccgcgtttggtctgggcgccggaccgggcgttctgctttgggagactcttccccgggtcgtcagggctaaaggccccttggccaaggcctgctgccagagtgaggggcccttctgctttgcgaggatttaaagggaagccgcctggcttaatttcgccctcgtctgtctccttgcaaaccttcgctcgctgaccatacttttcattgggcacagcatgtggggtaggaggaattagaagcgcgcagtctgggtgggatgacagatgggaggcttttggaagtaattagcaaatacctatcaccgaataataacacagctgagggctgggcagtccccaagcgcttcctgcacttgaggtttagttgccccagagggaaaaagggtctgtagacggcttctgttttctctctactcctccaccccaccctccctcctgcgtctttggacttgctcgctgctgccttgaactgctccagatgccgagctcggagcgcttctcctgagctcacaaactttctgtagctctccagattcaaggacctaagtcgaaattcctcgtcttgccctcaaggccctgtacagagcactgatctgacttctcccggacccagagcccaccccactcgctggccggcatgcgccctggctggctggcccccccccaacgtcacttgtaggaattctgtgggtctttaaacactcctttcctgattctctggagtggacgaggagagtcaccttcttttgaagtccccgaatccctttgtattattttcaaaatgaagtttcctttactgtcctttatgattacaaaagcaagatacagtcattacagaaacaaccgaaataccaagaagtgaaaggaacagacctcaaaattctgctcaccagaaacagccactgttagcacattgctgttatttgcctgtttattatcagtagacttgtctcattggttcaaaaacatttttcagtatctattagggtatttcattaggggtaggagctgaaaaacatggattagtccttgtttctgctcagggaccagtgtgggaggagacaggcagccagacaatggtttgagggtgataggtgcagttacggggagaggcttgggggctaagaggctaaggagaggcctctgacccagactgggagatgatgctgcagaaccacagggaaagttgccgccaagggagaatcctgggcaaaggctggggcaggggctgtccgggctctgggctggagcctggagtcacggggtagtttgtgggaaggtgagaaagagccttgtgctcctggactttgcactctgagcattaggggccaccgaaaggttcaagcaggggaatggttggatctgctgtgttttcagaggttctctgcctgtgttttaggtagttgggtgggggaaggccggaggggcaggtaggaagccccttgaggaccaggaccattgttggcatctccagtccttggctcagtgctttacgggattgcatggaacatggagatgttgtatttggggagacgcaatcaggtaatatgaggggagcagtggtagatgaaagttgagctgaggaccaggtgcaaatctgctaggaggctgtggagtagttcaggtgagagaagaatgaatgaaggcggggcaatgggataaagcctagagaaggcagggcaaaaccccatgaggtgtcaggccgggaaggggagggagagatcagaggcag

SEQ ID NO: 916042 - DNA, 4001 bp, Homo sapiens
acagttcactgcagccttgaccttgtgggctcaagcaatcctcccacttcagcctcctgagtagctgggatcacaggcccatgccaccgtgcttttgtgtgtgtgtgtgtgtgttatgtgtgtgtattttttctagagatggggttttgccatgttgcctaggctggtcttgaactcctgggctcaagcgatctgaccaccccggccttccaacgtgctgggattacaggcatgagccaccgcacccaggctgggaacaaaatattgagataagagtgagatgggtccgaagcaggaggatagaggcccctttaaggaaccctgagagaatggcttcatggaccctacccaagaataatagatgacagcttcatcagcattccctgggcccaacgcttacctccactgctggtcttcataggtgtccgtgcaataccaagagtaggagagcggggatctgagtcctgggcatgtttaagaccctccagttgctcccctgctggtaggcctggctgtggagagctctccacctgtcaagaccataggctagaacaagtctgggccctgactcttctctcctctcctccccatattccaggaaggaattgccaaggccctcagatatccagcctaccccacacagattgagattgcagaaaataaggctaggataagggtggggtcatgacggctctctcaaaatcaggttaggaagagacccaagaattcagacattctctgcctttcccacgctggcccagagtacctggatgggagtgcgcaggatgccagcactaggtgaacgggggtccgccactcgagccagatgcttgttgtgcggcggaggccgcgctggtgtgactgggacgctcttggctgagcccatctcaaccaggagttgcagggtgggggcaagggccagcccgggacgaggagggaatgcctgtgagaagtgactcaggtctcagcccttatctcttccacgtcggaccttcaaccctaaaccaccctgtcttcccagtttccagtgaagaaacttcctggcgagggaccagaggcctctgcggagttaatgactgctgcagctgacaaaatggctcgttctgggcctgctgagccctctaacttatttattaaattattcaaatcacttaccgggccccaattccacctctggatgcacaacagctcgtggctcaactcccgaagttaccagtttcaaacttcccgccacgccccctgccctgaccctattggctgagccgacgtagttcccataggccctccacgtaagacccgcctcgagccaaaggaagctgttggtctgggagaacgtctatcatggtgactgtaggtgtcaatggactgatgctaggcttgcccaggggtgacgcctccttgataagggtacttctgttcagtatcggcctgcgagccgtccgtggcaggctgaggagtgccagtcttcgctttcgagacgtctagtctcaagaacgaattattaaacaaaatagaatcatgagtgattacactattatgcgcacatccagctggagttgtgatggttttcctgaggcgagcgatagtagctttattggttgacagctgtatcagtcactcgacacaaccccctcaagctccgcctcactggataccccctttacaaataccaagacaactgtccctcgactttccgaccggacaggtccccaggaaactttctggaattgagaggcctaaaacaaccgtcagttcctgctcttcaatagaaggcacgcgaatggactctaagggtcccggagccggagcagctgcggagccgcagcagctgcaaccccgaagcccacctagctgctctacgtgcgctcccgccctggaggagtgggattggttctttcaaccatcaattgccttaggagcgcttctcattggcgtcagtcaagcgcggggcaggggcggagcaccggcaggcaggctccgtccaactgccattctcgcgcgtcgtctccgcggcgcatgcccctaacgagtggcgctcattggacgggaggggcaggggaggggactgggaacggtgggagccgccgtgtgtggagaagctgctgccggtgtcatggcggagctgagtgaggaggcgctgctgtcagtattaccgacgatccgggtccctaaggctggagaccgggtccacaaagacgagtgcgccttctccttcgacacgccggtaagcccattccccacgcccgcaacgagcacgacttccttccatcgccctggtcattccgctggggcctgcaaggcttgggctaccgcctccctgcgatgcaccatgggacttgtagtctcccacgctccactctgccgttgcctttcattaactgcggctgtcgtgtgactaccgtccccggaagccgccgcgctcacctctccggctccccgcttcgtggagcactgtgggcattgtagtcactcactgccttcgttgccgttctaagctaggggcgcagcccgaccgtcggactacatcccccaagtggacccttgagaaaacctggcagtcggccttgtctgccgcgcacggctctccgggttttgtagtctcgtgtaggagtgatggggacgactccccactgttctcggccggggttggagttggggggtggggaccgcagttcctaggcggttaatagtctgggagtggactctcaagaagtccgattctgagaaaggcagagagcctccaccccgtggttaaaacagacagggggcggggaggggaggaaagaggagaggaaagctctagtcgtttctcctttgaagtgagcaatggccgcagcccccacccttccccccgccccccagcctatcacagacagctgagataaccccttttaaagtattcctagagaggtggtttctttctcggaggatgctaaggcctctttcccatcccgctcccactcttggctagttacacaaagccacctcccacaccatgcttcacgttttgcaggctccacctggtacctcccttcctgcagttctgccttccctatgtcaccctcaagcggaggccctttggggcctgaactgagaaggcagcagcttggttgggatccgcccccctcaccacccctcccctcaagctgctgtgccctgcccagtgtattctgccagaaccagctcatggcctgaaaactgcaagtcagagtggaaagccttcattactgcatcaccagtactgagtagaacagcatgatgtgaggcccagttcaggatcatcactgtgatttgtggtttgcttggtttgctaggctttgatctgggcctcagacaatgtgctgcttctctgaagtctggctttggcagaggtaaaagagcactgcgcggagcagagctccggggttcccaatccttggtgaaatcagcatctttaatttccaacagaggagtttaatcacttcagagctcccacattcttcccaggagggaaaggtttttcttaaattaccagcaggtggtagaagtcagtgggtccctctttacacttttattcactcctgtctctctccttagtaactgctttgaataatccaaaaagggtttttgtaatcttctgaaactttccctttttcaccccaagtcaagagattttcagtgtgccctagttctttgctaaccaacttccagcatatttggttaccttcaaattgggctcatggtagaaagagcttagttgacctccccggtgagaaatgctctatttgttcatgaacttgcagtacacactgttcctaggaagtggtacagagcaatctatgggaccaagaactaccttagacagtgcactatttttcatatcacagcagagaaatgttcaaggccactgagacttttattcctggaagaggatgtctgttgttgctcaaagccttggatctgagggaagacccttattgtctccaatttcctcctccaccttctccatcactctttacaaa

SEQ ID NO: 916043 - DNA, 4001 bp, Homo sapiens
gtgatcttctcacacgaacgccttttaaaagaaatctttcaacaaagactcaaaaaagaaacagcaaagtttggggaaagaattgtctgtctttaggtcaagcatttcctgataagtgactgaaggtctggctgccaggaatacactttgctgaccctaggaatggccaagtctcaaaacaaaatttgcctcttctgtatcttgaaagtgacctgttaggacctgatgtcaatttgacgaagaggtgatagaacatgaccaacgaggtgtctttggtggacatattcatgtaaaggaggcgagagccacagatttcagctaaacgctttttgccacttttgcaaaagaaaagctaattgttaacggccatgtgacattatagatcccagaaaaggaaagggtgggaggaagagagagaagttcaaggcagttcagggtcagaacaagctcagacatcctgtcattaacaaatgttccccaagctgaaagcaaaatactgcttacccgaaaaggagtgggtgaaaagtagggggagaacgagggaaaaaccacaggagagtcaatgtggcagtgtgggggtgacaggagggagggaatctggagctatccagctgagttggggagcaaaagcatcgggcatagcatcgggcacaaaaatgctgagaaaagcaactgcgacggagacagcactaggcaccctcctccccccattttcccctccccatcggtttgctgggtttcccaccttccctctacctccgctcttgaccaacactccggggtgtgacccgccagcaggaggctgccctgatctttgtctctacccgctcccacgcgcgggctcctcctcctcctccgcgctccccacccgcgcacagcgccagcgtctccaaggagctgcaggcgccgcgaccgccgcctcctcgcccacctcccgcggacccgcgccccttccttcccctcccgggcagcgtcgcctgcgcctccagctccacccccgccgaggggacctttgtgtctcgggggactttctgcctctttcccctcctccgcctcgcgaggagaccggcctcccccgcagaccaaagcggcagcgagcaccggaggcggcggcgtctatatctgtcggcgcctcctgggaagcagctcgcagacactcacaccccacccgagccccggaaatccccgggcgacccaaggtcctcgctggaccggagaggtgacaggcgcacgctagccccccgcgccgcgcctcctcgctcaacttcccgaccgggcctgagccacccgcgcccccagtagcccccgcccccgcctctgtcccacgcagcctcccggccccgcggccgacccgacaccaggggaaagcgcggcgcggacgccagccgccaactcaccagcaagagcggggaccgcgggtcccgaggcgaggcgaagagaggcgcggggggaagctgctccgcggacgcccgcggcgaccggatgcaagtccgggtctcagcggccggcagacgtgaggcgcttccgagcgcaggcctccgccgccacagccgccttccggctctcgccgcgggtccggagcctcgggaggggccgcgggtgtctcacgcgttgccaagtccctcggtcaacatggctcccgcgccgacgagccgcgcggacggcccactaatcccctcggagcagccgggcgcgagcgcggcgggcgccgacggcgggctgagactgtctggccgggcgctggctccttctccgcggctctgcggcggcccgcggggagctcaggagactgcgggcggccgcgttcgctccttgcgtgtgcgtcgctttcacactcggcggctgcggattgacgcctccgcctgttccccggaggagagcgagtgcaagagaaaaaacacttttattgaaacgatccaaccagcggcggcggagaaaagcgaccggccgcgggagcttaccccacccccgcctgagcggctcgccgggggcagcgcgacccctgccggcggcggcggaggcgggggcggggccggcggccgggggcggggcctgcagggcggggcgggtgtccccgggaaactgcccgctccgaaatgcgggcgtcgggggagcggcggagggggccaggggaccccaccggaatgagtgcctgtccgcagcgactgggggagaaattatgtgaataattcagcccctccaacatccccctgcccctcaacttcccgctaccaaaccaaaactcgtgcttcagttatacaagtaattactgtacaaggtgtccatgccacagttctccactgactttctagagagtccatgtcaaaggacccacactgaaagatgttgatggctgcaacttttctcctttgttgtgtgtgggtacgtgggtactagtgccgcagtctctcacacacacggcatctattcatttaaactacagtacagtgttttgtatatattatcatgtgcccggcaatatgctgagtcctctaaggacggagagtctagctgggatgaaagatgatcaataactatcataaaaatctgaacgttatgagcggagaaatacaaggtgctatgaaaacagaaaggactactgttgcacgggttaggttttgttttcttgggggaggcgggccgcgagaggttggcccagtttctgcaactgtttttactttctcctttcccagaggctaaaagctagttcaggaatgaacagcagagtggcagtgaagacaaactaaagtaatactgacccacttttttccactaataaggataaaagcataaagttaaaacaaacttaaacccctagagggagataatgagaggattgaaagaagagagtagggaccggatgtagacaacataaacaagaaaaaaaaacccacataaaagtcctgtgaagtgagataaattttttttcccatgttaacacccggaagtagaagctgctttgaagtttcaaatcacattatgtgctaagaacttcggggaattatctttttggatttagggatgaatcctttcccccttaaaaatgctgcatgctgacatctttctcttattttgtttggcaaagttaaatgcatctacagttatatccaacgatcgtacgtgtcaatcaggcttttcccatgcctctaaaattaccaggacccgtaaattagcaacaattatgctctacgcgtatttaacacttgtttaccaaccaagaatgcaaatatacataacaagctttccgttagaacaagtgcgctttgtttaaaagcactgttaatgaggctttttagatttgtccaagtcaaacttggaactttataatatagcaagatgtagcatcattttcagagttctttttaagttaaagagaaacactgatatttatacaaggcctatttatatgaaaggattttcatatacttgcctcatctaaattagtactttagtaaatatcaaaaaatcaccaaaaaagggagtctatgaaatggcattctgagtttcagcattaatacttataccttcatatcattagattaacattactccatgagaaataaaaagattattctgtctcatccaaagcaccctctcctctttctacatctttcattagcataacaaagaattcgtaattgggaggctgaggtgggaggatccattaagcctgggaggcggagtttgcggtgagctgagattctgccactgcacgccaacctgggtgacagagtgagacaccgtctcaaaaagaaaaaaaaaagacgaattcataatgaaaacttaggtgattatttgattgattggtttgttatttcttttttttttttaagacagaattttgctcttgttgcccaggctggagtgcagttgcgtggtctcagctgactacaacatccgcctcccaggttcaagcgattctcctgcctcagcctcccaagtagctgggattacaggcatccgccaccacgcccggctaattttttgcatttttagtacag

SEQ ID NO: 916044 - DNA, 4001 bp, Homo sapiens
ggagaaagagaggactgtgtttctccattacagtgagcagactgggtttgctctgtgcccctaaaactctactaaagcctttattatgttggattatagttacatatttacaagctatttctcccaatggactgtcagcccagagaggataaggaccaagtcttactcaattttccatcccttttctacatcctgtgcattgaaaaaatgtttgttaatagattgaaagtagctctgggagtgaagaatccagccctaaaatagacaatagggactcactagctaggtcttccaccaaatggaagggctttttggaggaatttaccaagtgctctcaaatcccgtttatctgagtttcatctgacctcccacctgagttgctaggttgactcactagagtttcaactttgattgttcagtccaaccctagggttaatgaatataatgagcagggaaggagacacaaaaagaaggggagtgtgtgtgtataggagatgagggctcagaaggaggccaaaatcataaaatatcaccctgaattgcctgccaccagtcccccaagacatgcccatgatgagaggagctgatgagaagcattaccttgatgaggggaagaggaatgccagtgagagcagaggcatccatgaatttcttgagatcttggtgcagaaattcaaaaaccaggtagagtttattttctgtgtgaatgacatccagcagcctagagaaggaaagtttgaggaaatggaggtgtgtgagagagagaaatgcccacactgtacagacagaacttatcctcctttccagctggatcacctctcagacgcatacttacttgacaatattaggatggttaagctccttaagcagagagatctctcggatggcagtactgggcacaccctcagtctcacttggagaggttgggaaagcagagatgggaatatggttacaaatattcctttcccccccacctagtcatttctttcccccaaggagacaccacccagcaccccctaggaaagtgagagaagagaaagggtgatggtaagagctaattcttgggtagtcagggtgtggtttttggatatattaaggccattatctcctcttttcccaggggtaggtaagtaaagccgcctggtgaaggtgaagcagggagactgtaatggaggggaaaaaatgcaggagtagcccccagcctccccagaggggccagtgaggttcaactgccattctttggaaagaggagagaattctaaggtgagggtggggcagtgaagagggctcttcattcagaaaggcgattctcgccggttcccacataactccactccatggagagtcttggacctcatctcagagacctcctttctctccccgagtctgtagtcgcacatttgggggcacgatccggctcagtttgggaagaaagttttccatggattccacaccaccctatactctccccagggagtataagtatactcttcaccttctactggcccccaacccacctctccacttctaaagaagtccctccctgctctcttccggtccctggacggctacccgcccgtggggggttgggggggacaatcaaggaggtccccagttaggagtcccgggtacagaggccactcacgtgtccaggcggattttcttaagcgccaccacctctcccgtcaacttgtttctggctttgtacacaactccgtacgtgccctctccgatcttttccaccttttggaagttctccatgaagcgccagcgagtcgggtcagcccggccctggagcgggggcctgggaaccctgcagaaggcggaccctggctctcgggggccgaggagggggaaacagggcccagtaccgtggccccgggtcgggatggaacgcagtatacctctcgctcttgtcaatttggccaacttgaaacaatgttgccgcctcccaccgagttcccgaccgccaccagaggccccgcccctgcttcccgcgtttccctggctccgcccccaggcctttctattggtcaacgtcagagccggggggcgagcccagcgctcctccccgcaaatgatcccgccccaggcaagtttggttcttgggggctagacaagtttcttccccggtggggcggctgaacactcttcccaagtacctgctttgggtccaagtttcctacctatgtctctagtctgtagggatttcttgatttctaactcactattttcaccaatcctggggaaaatatgtatcgacctaaggttaaattccacctggcccaggagcctcctttggaaaccaggaagccgggaatctcgttgcaaaggaatcctgggcctcagaggagtcgttgcctctgcctcatagcataccccgacactgtctctgttttgggatgcagggttctgtttctgtctttttgagaagttcctggtttaattcactctcccatgataaactgttgtgtctggtatgtgttacgcagctgcctttcagttagctcttgcccgggagtgcatcaagatgagagtgacccagtgaaaccagaaactgtcattgagtagcaggatgggaaagcaatgtctagggaccaggatccctttgtcagtttttcctttttcctctcctccggcccctcccaggccttctctgagggagaagaggaagggctatgcaaatgagcacccttttcttatataggggcctatcccagtccccccagtgcctttggttgctggagggaagaacacaatggatctggtgctaaaaagatgccttcttcatttggctgtgataggtgctttgctggctgtgggggctacaaaaggtatgtgtggatatgtggacatgagcaggtgtgaacttggggatgaattccccctgctctggtttctgtcctcctaatgggagatagcggcaatatttcaggcgtctcccactcatttgatttagtgaggatgtgggcacctgggctccctccctacatggagatttgggattttgcctgaaaataatctcatatgcttggaggggcagaaggatagaaggtctctgtggcactgattctgaggcttccttggcagtgagctggagcacgggctccaaaggggtgaaatgtgcaggagactcttttaggaaacgtctcttggggtaggagatttaaagtggggagtcagagaatgtggtattgggtaagaacactaaggagatacaatcctctcctcttgggatgggtacgggtgaacacagcccagaccttttgttctggggctggagagataggcagaggggtctcagctgagcatcacatgaaagggctctgggggattgggcctcgtgacaggagcaaggggcgggggtggggtggtgagagggtctggaatgtcccgtgctgctctgaggagagttggaagtggagaaagaatggggtatcttatgacttctcttgttctagtggtgggatgctcaatagatgattccagatcctcccccagcagaatcaactagggttacagcacacattagaaagggaatgaggccgggcgccgtggctcacgcctgtaatcccagcactttgggaggctgaagcaggtggatcacgaggtcaggagttcgagaccagcctggccaatatggtgaaacccccgtctctactaaaagtacaaaaattagctgggcatggtggcacatgcctgtagtcccagctactcagaaggctgaggctggagaatcacttgaacccagaaggcagaggttgcagtgagccaagatcacaccaatgcactccagcctgggtgacagagcgagtctccgtctcaaaaaaaaaaaaaaaaagaaaggggatgaggcccggcacagtaactcatgcctgtaatcctagcactttgagaggctgagacgggtggatcacttgaggtcagaccagcctggccaatatggtgaaactccatctctactaaaaatacaaaaattagctgggcatggtggtacgcac

SEQ ID NO: 916045 - DNA, 4001 bp, Homo sapiens
agtgggcgccgcagacttggcctcggggacagacagctggtgccaggctggccaaacccaccagctgctcgcttggtgtgggtgaggggaggggcagaggaggaaggaagttcagggcctcaagctgggggagccgggaggagcactggagaaccctggctccaggcccctcgatttagagaaatggacctgaaggggtggccccagggcacacagcatagaggagaccaaagcagggagccagctaccccggcacctgcccctctctccgagaacggggaccgttccgagctgtctcctgagtctcaggccagccctggatgctgccactgcagcccagggttatgctccagcttgggctggaactgcaaacgtggacttggatcctgaactgggcagagcaccgtgccactccgagcctcagtttccacgcctcccacgtggggatgatgagacacatgcggatgatgagacacgtgcgctataggggcgggttgcttgggagggggacgcacaacgcccacgatatctggcacgtccatggccactgcaggaattgggcagggtgatgtcccccagagccccctaactacatcagccaaaccccagtttcctgagcttctgatgtggcagcaagcatggcatggcgaacacaggctctgccggcacagacctgggttctgatcctggtcactacacctctctggctccagggccagtcgctgggggtagcatcgcgcacagcaccccaggcgtttgcaagatcccagcgccctggcaggaggggtgctggccacttcccacgcaccctcgcattccctcggtgtgcccccgtcctcttccccaactgctctgcccactgctcctcacctccccttttctgtcctccccactggacttcgtgccagccccagctgtgccactcctggctgtgtgacctcagacaggctccccgccctccagtcctcagtttctccatttgttagaggcagtgcttcccaagagaaggtctatgggctccagttcctactatttgatgatactggggttaggttttgcagggctgagagggaggaggaaggagaaatcgtcccattttggctgggggacgaggagcaatagctcggtgaccccagtgctctgtccaggccactcccttgttcgggggcgggggggtgtctagtcctggagagagatggcggaagggctccgagttccactcctggtcactccttcctgcagacacagggaccaggacacagggaccacgtcagcgaaggccgtctcggcgcatctcagacaatgagcgcagtgtgcaggagcgaggggttggcagaggccaggaagctcctggggccaggcgcggctccccacccccacgccagacaaagagcgcggggcctggggagctggcggccttcccgccacttggggcgcctggggggctctggggcgggggaggcgggggctttgtctaactccgccactgccaccaccggccaggccgcggcttggcaacccgtgaacaggaggcagggctgcagggcgtgagggatgatgacaaggaagccggaggagcagcggcggcagcggagagtccatcttggatgcaaatggcaggaggggagctggggttctgcaaaggggcccgtggggggttgggaggggcaccaaaaagcccagatctggggatctcggcactcctggaattctccacaggacaaagaagaaaagctgagtacaggtccagccagcccagaacaggacttcaggggtccccgtgagtgccgctgtccctgtgaccccaaaccccgagggtcccagtttagggccccggccccaatgacaccagggtaagcctgagctcagccttgcccaggctggcaacaccagcccctgccctccccacaggccagaggaagaaggctgctggcagtcctacctggcaacaaagcccgtctttgtaaggtctgcggaccccagaggaggtgagaatgtttgagaaaaaaacagtggctgtttgctctttgggactccgagcccacaagtgagcaattcaactctccctccgcaccctgacgcttaaccctttcctgcccctacacctcagtgtccaagattttttttaggtatcgtttttatgggtcccacttccgatttggggggttacgaggtcaacgtttgcaaacaaggcccaaaactcgagcaggagagccagcgtggcaccggtgaccaacggggccactcctctccccgtcgagtccttccccccatcccgccccgcaacacaaccgccttttgggaagtctgtttccgaccaagtgtcagagaagaagggccccagtgaggtcacaaagcccggcacctacgaatccctcaatgttgtgcccactccccatggctccctcggtcccctgggctcagcccgaagctgcctgacaacttctggaggagtttcctgggagcgcccggctgcggccgcagccccaggaagcttgaggggagcccctcccggcttctgcatcgagggccttccagggccagcccttgggggctcccagatggggcgtccacgtgacccactgcccccacgcccgcgcgcgggccccagcagccccagagctgcgccaacttcgttcactccgcgctcaccttacgggggtccccgcgtgaccgcatggggtagcccctgctcccacgctcccggccgaggcccccgggcctccgagtacgctgcccgccggcgaccccatcctggtcccagtcccggcggccccgcgacctcagggcccccggcagcccggcagccccgcagccccgcagccccgcagccctccatccgcgcccgcccgcgcgggtcctggccctgcccgcagcgccccccgcccgggctgcttcacgaccccgctccccagggcggcggggccccgcgccccgctcccggcgcggcccgggccgctcccgactcccgccggcaggggccctcgccgagccgcccagaagccggaggaaaaaggagccgagaacaagcctcccccgccctcgccctcgcccgccgcgctccctgcgatccgcagccgccggcgcgggggtcaccccgggccgcccgccccgcacccccagccgaggccctcggcgtgcggggcgcaccagagaactttcgcggcgcgggctcgggaatcatggcggcggcagcgctgccccgggccgggaccctgagccccccgcccccggcctccgcgggcgccccgggcatccccgggccggggccgggcgcgcggacccccaacttggcggcgcttggggcgcgtcgcacgcggctcactcaccggcgttgagggcggcggcgggcatgtgcgcggccaagttcggtttgtaagacatccccccgggcggcgggcgcgccgggcgcggcggggccaggccgcgagggcggcggcggcggcggcgaggccgggcggtagcgctgcagccccgcgcccgtccgagcgcccgccgagcgcccgcgcactttttgttgtcggcggctcgggccgcgccggcaaatatggccgtccgcgccctgccgccgccgcagtctcacccaggccccgggtgcggcgcaggggcggccgcaaactttccgcggagccggcggggcggccggggccgggagggggcggcccggcgtcagggggcggctccgcctgcggccgcgccccgcgcctccgggtgcgctcggcgcccgcaacttgccaaagtttggggggctggggtcccggcggcgcctgaggcccgcgcgcgtccgggcggctgccccgcgcccggcgccccgggggtgtgctgggggccggtcccgcggcggctgcgggaggccagggcgaaccggaatccgaagagcactttcttccccttgatggtgggggcagggatggaaaattacctggagaaaatggtggcgagtggtgtatttaagcacgtagatcattccagacgcccaggtctggccaagccccaggatt

SEQ ID NO: 916046 - DNA, 4001 bp, Homo sapiens
acgggcctcccgcctgtcctggcgccgccgtcgcatggccagaacgtggcactgccaactcccggctgcccctctgcctggcctcccacagccaccgcttcttcagccggtcccgctcacaggcccacacctgcttctcctcctggggcagggcagcctggtggggcatggccggggagccgcccacttggcgaggaacaggctccatagcgacctcagaacactggtgctggggcccagccagggagagcatcttcccgctgggaccttccccggggcggctcatcccttggagatgtagggtgcagctgagatggtggcggccccattcctgctgttcgccagcctgggctgggggtactaggatcacccttgggctgatgaggagcccgggtcttgggcagttaccaagtggggggtcacagtctggaaagtggtggaaccagggagcggcctcgcccaggccacactctcaaatactggccctcgacaaaaggcagctgggctctcaagacagggccacctcctctctgctgggcccgcgcccgtggagagcaagtgggaactgaccctatcttctgtcccagcttggagagccagcatcaaggtcaggcctcacttgcccaagaaagaggagtgaggaggcccactggaggaacgcgtggggtgggagcctcagcacagcttgggctgctgccccttcctggtgctctcctgtcccctccacctcacacgtccccgcgaagcacagtccccagtgccctccactctgatgtgttctgagcaggagcgcagccagggccttgggctgagaaagctccgtcccatcctttctgctccttcgtctcttccaccaacttctctcctctgatggtgggaagcatgtctccccctggccctcccaccatgccatcacccccattgacatacctgggtgtagcctagggacggtggcccgtagtcactgagcagctggcggtactgtgaagacgttgccatgctggtggaaggcgagtggacactcccagctgtggggtggggagagagaggccaggagtcagctcagccagttgtaccaaggcaaggactccgggtcctgcaacagcccttgcccaggacccacaccaccaactgtagcaggatggagaaccctgctctccacctccggtttgaccagcatataagatggataatgaaatgtagctacaaggcacctgaccatccccagctctgcagcagccgctggtcctcacagagctccatcccatccaaccagaaccttccaagcagcagggctgctcccaaagataaaattattgccactcctggcctgaactctgcccatcccctctccctgtgtcctggtccccagaggctgagaacctagaggccacatcacaccacagcgccacataggctggtcgaaaccaggctgagcttccaagcctttttgcttctatgcgctcaaatctctgctgtgctcaatgacagggaagacaggaaggccttggagtatttgagacccaaccctggctggagacaggcacgctggacatcaaatcagaaatctagagaacaccatggcctctgtgtgccccagataaagcccctcaacccctctgtgcctgtctccccctccccaaagaggggaccagactcttagcagtctatgccccaagggctctgtatcccaagacaggagggttgaggccccacatatgggatgcaacattggggcctgtccagagctgcagtcagtgaccaagcagggcccagcccagaacgcagcctcctggatctggcaggggagtccgtggctaggagcacgcggccccgcaatggcgtcccagtggccattagcgggtaaaggatatcctgcagaatgacaaacagcggtaaccatggagaatttacctagtcctcctcggcagctgcccgcctgccgcccccagagccacacggtctctctctcacacacacagtgggcgccgcagacttggcctcggggacagacagctggtgccaggctggccaaacccaccagctgctcgcttggtgtgggtgaggggaggggcagaggaggaaggaagttcagggcctcaagctgggggagccgggaggagcactggagaaccctggctccaggcccctcgatttagagaaatggacctgaaggggtggccccagggcacacagcatagaggagaccaaagcagggagccagctaccccggcacctgcccctctctccgagaacggggaccgttccgagctgtctcctgagtctcaggccagccctggatgctgccactgcagcccagggttatgctccagcttgggctggaactgcaaacgtggacttggatcctgaactgggcagagcaccgtgccactccgagcctcagtttccacgcctcccacgtggggatgatgagacacatgcggatgatgagacacgtgcgctataggggcgggttgcttgggagggggacgcacaacgcccacgatatctggcacgtccatggccactgcaggaattgggcagggtgatgtcccccagagccccctaactacatcagccaaaccccagtttcctgagcttctgatgtggcagcaagcatggcatggcgaacacaggctctgccggcacagacctgggttctgatcctggtcactacacctctctggctccagggccagtcgctgggggtagcatcgcgcacagcaccccaggcgtttgcaagatcccagcgccctggcaggaggggtgctggccacttcccacgcaccctcgcattccctcggtgtgcccccgtcctcttccccaactgctctgcccactgctcctcacctccccttttctgtcctccccactggacttcgtgccagccccagctgtgccactcctggctgtgtgacctcagacaggctccccgccctccagtcctcagtttctccatttgttagaggcagtgcttcccaagagaaggtctatgggctccagttcctactatttgatgatactggggttaggttttgcagggctgagagggaggaggaaggagaaatcgtcccattttggctgggggacgaggagcaatagctcggtgaccccagtgctctgtccaggccactcccttgttcgggggcgggggggtgtctagtcctggagagagatggcggaagggctccgagttccactcctggtcactccttcctgcagacacagggaccaggacacagggaccacgtcagcgaaggccgtctcggcgcatctcagacaatgagcgcagtgtgcaggagcgaggggttggcagaggccaggaagctcctggggccaggcgcggctccccacccccacgccagacaaagagcgcggggcctggggagctggcggccttcccgccacttggggcgcctggggggctctggggcgggggaggcgggggctttgtctaactccgccactgccaccaccggccaggccgcggcttggcaacccgtgaacaggaggcagggctgcagggcgtgagggatgatgacaaggaagccggaggagcagcggcggcagcggagagtccatcttggatgcaaatggcaggaggggagctggggttctgcaaaggggcccgtggggggttgggaggggcaccaaaaagcccagatctggggatctcggcactcctggaattctccacaggacaaagaagaaaagctgagtacaggtccagccagcccagaacaggacttcaggggtccccgtgagtgccgctgtccctgtgaccccaaaccccgagggtcccagtttagggccccggccccaatgacaccagggtaagcctgagctcagccttgcccaggctggcaacaccagcccctgccctccccacaggccagaggaagaaggctgctggcagtcctacctggcaacaaagcccgtctttgtaaggtctgcggaccccagaggaggtgagaatgtttgagaaaaaaacagtggctgtt

SEQ ID NO: 916047 - DNA, 4001 bp, Homo sapiens
cacaggccagaggaagaaggctgctggcagtcctacctggcaacaaagcccgtctttgtaaggtctgcggaccccagaggaggtgagaatgtttgagaaaaaaacagtggctgtttgctctttgggactccgagcccacaagtgagcaattcaactctccctccgcaccctgacgcttaaccctttcctgcccctacacctcagtgtccaagattttttttaggtatcgtttttatgggtcccacttccgatttggggggttacgaggtcaacgtttgcaaacaaggcccaaaactcgagcaggagagccagcgtggcaccggtgaccaacggggccactcctctccccgtcgagtccttccccccatcccgccccgcaacacaaccgccttttgggaagtctgtttccgaccaagtgtcagagaagaagggccccagtgaggtcacaaagcccggcacctacgaatccctcaatgttgtgcccactccccatggctccctcggtcccctgggctcagcccgaagctgcctgacaacttctggaggagtttcctgggagcgcccggctgcggccgcagccccaggaagcttgaggggagcccctcccggcttctgcatcgagggccttccagggccagcccttgggggctcccagatggggcgtccacgtgacccactgcccccacgcccgcgcgcgggccccagcagccccagagctgcgccaacttcgttcactccgcgctcaccttacgggggtccccgcgtgaccgcatggggtagcccctgctcccacgctcccggccgaggcccccgggcctccgagtacgctgcccgccggcgaccccatcctggtcccagtcccggcggccccgcgacctcagggcccccggcagcccggcagccccgcagccccgcagccccgcagccctccatccgcgcccgcccgcgcgggtcctggccctgcccgcagcgccccccgcccgggctgcttcacgaccccgctccccagggcggcggggccccgcgccccgctcccggcgcggcccgggccgctcccgactcccgccggcaggggccctcgccgagccgcccagaagccggaggaaaaaggagccgagaacaagcctcccccgccctcgccctcgcccgccgcgctccctgcgatccgcagccgccggcgcgggggtcaccccgggccgcccgccccgcacccccagccgaggccctcggcgtgcggggcgcaccagagaactttcgcggcgcgggctcgggaatcatggcggcggcagcgctgccccgggccgggaccctgagccccccgcccccggcctccgcgggcgccccgggcatccccgggccggggccgggcgcgcggacccccaacttggcggcgcttggggcgcgtcgcacgcggctcactcaccggcgttgagggcggcggcgggcatgtgcgcggccaagttcggtttgtaagacatccccccgggcggcgggcgcgccgggcgcggcggggccaggccgcgagggcggcggcggcggcggcgaggccgggcggtagcgctgcagccccgcgcccgtccgagcgcccgccgagcgcccgcgcactttttgttgtcggcggctcgggccgcgccggcaaatatggccgtccgcgccctgccgccgccgcagtctcacccaggccccgggtgcggcgcaggggcggccgcaaactttccgcggagccggcggggcggccggggccgggagggggcggcccggcgtcagggggcggctccgcctgcggccgcgccccgcgcctccgggtgcgctcggcgcccgcaacttgccaaagtttggggggctggggtcccggcggcgcctgaggcccgcgcgcgtccgggcggctgccccgcgcccggcgccccgggggtgtgctgggggccggtcccgcggcggctgcgggaggccagggcgaaccggaatccgaagagcactttcttccccttgatggtgggggcagggatggaaaattacctggagaaaatggtggcgagtggtgtatttaagcacgtagatcattccagacgcccaggtctggccaagccccaggattagaataaccgatgcttgacattgatttcaaataaatttcatgtctctgtctgtatgaagtggtttttaaccctttggggatccaagactcctttgagactgacaaaagcttagaggccttctccacccctcacccccctccccggaaaactcatccctgaatcgcacaatttcgtgcgtagactcactccagtatttaagggaagcacctactatgcgccactcactgttccaagcgctgaggatacaagaattgaacttggcaaagtttctaccccctggagtttacgggacaattttagatcctccttcgaccccacccccagcccatccttggatccgattgaaatgtaaccatccagtgtattttggatttggattagatgaataacctgaaggttgtggggttttttggggttttttttttttttaatcttggagttctgccgaagtagtaaagctcgttaaaatacataagatgcccacccttttctgttgtttttaatcgtcatggtttgcagatttaattagacacaggcgtgcaagcatcatctccggatctgatgacaaaggcacccacctagggatgcccacccaggcctgcttcttcctttaggaccaaaggcgcaggcgacgacaccccctccccagcttaacccccatccttgagatcagctgtaggccagcactagcgaagaatgctcagtgaaaccttattccatgaataaattaatgccacccatgtggctggtcccgggcgcccagtcctttagagcagcgcagtccaatggaaatagaatgccagccacatagctaattttcaatttttcagtagtcacatttgagaaagtcaaaaaacactggtgaaattgattttaacatgttttatttaatacaatagctccagaacagcgtgatttcactatataatgaattgaaaggaattattaataagacactttacattctcttatcatacgaagtcttcgcaatccagtgtgtgttttatacttacaacgcattttaattcagactagccacgtttcagcgctcagtagccaccatagctaggggtcaccgtattgaacagtgcagggctgcagctactagcggagggctcctgcgacggacacaccgggtactgactctgactcccccacccactggctgtttgactaggcctccatttcttcggggcaagaatccagatctcagtggcaggcccggtcctttctatgagtgctctgaaccgatctatttccatattgttatttaagaaccggggtctccctctgtcacccaggctggagtgcagtggcttgatcgtagctcactgtagtcttgaactattgggctcaagtgatcctcccgcctccacctccatctcaaagcactgggataacaggcgtcagccaatagcgttgtattttttccattgtccccactcctcgctctaagtccatggcatcattttaaaactgttggccgagcacagtggctaacgcctgtaaccccaacactttgggaggccgaggcgggcagatcacgaggtcgggagatcgagactagcctggccaacatggcaaaaacccgtctctactaaaaatagaaaaaattagcggggcgtggtggcaggcgcctgtaatcccagctactcgggaggctgagacaggagaattgcttgaaaccgggaggaggttgcagtgagccaagatcctgccacttgcactccagcctgggtgacagagcaagattccacctcagaaaaaaaaaatttcagctcacgcctgtaatcccagcactttgggagggcgaggcaggcggatcacctgaggtcaggagatccagactagcttggccaacatagtgaaaccccatcttaactaaaattacaaaaagtaggcggg

SEQ ID NO: 916048 - DNA, 4001 bp, Homo sapiens
tgtcagctagttgggaagctgagatgggaggatcacttgagcccaggaggttgaagctgcagtgagctgtgatcatgccattgcaatccagcctgggcaacacagcaagccctggtctcaaaaaaaaagaatgggcaaggtatggatgtggtttatgaacaagcgatttggggaattcaaggtagtccagggtatgtgggtcccatactttcgacgaaacatctctgcaaagatacagccaacactccacatgtccacaggtgttgcatatgtggactgcagaagaacttcgggagctcggtaccagagtgtaacaacctaaagggaataggaagaatggatggggaccccatgggttaccatgaaacacaacttgcttgactgaacacatgaagcacatgacttctcaattgctacgggcaatcactctcctactcccaaccagaacccattttggtaccatctttctactgaccacgggtgtaagtgccatctggtagctgtagattctggccaggccaaagtcagccagcttgactgttccaccacttgtcaccagaatgttctctggcttcagatctcggtgaacgatgcaattggcatgaaggaaatctaggcctcttagaaactggcgcatcagatcctagtttcaaaggggaggtacagatgcactggaaactaggcaccatacctgaaatcccagaaggttctactacaaaggtcccaatccacctctcaatgcctaccaaccccactcaccttgatcgtttcggctggcaagcctggtgggggtgccttgtccagatatgtccttaggtcctggtctacatgctcaaacaccagggttaccttgatctcccggtcagttcgggatgtggcacagacgtccatcagcctgaccagagtaaatgctcacttttcaatcccctttaacccaacatggcctctcattatttcctcagggtccccacttctctacagatcatcacaccccacctataggctgtcttttccctttactccccacgcccaaccctccaccaccttctcaccggacaacattgggatgctcaaaagcctccagtcgcctcagtaaagccacctcacgaactgtgctgatgggaaggcctcctccacctcctcctccattggggactctcacactcttgagggccacaaagtggccactgtggggatcacgggccttgtacactgtcccataggcaccgacaccaatttcagccactggctcatatcgagaggtagccattctcagatcaagggagaccctacaatcacagactcctatcaccaaaagtcgcttacagagttaggatggtatgagcctgcagcaacaaagggactcccaaaaaaaaagcgcaaagaacaccaccagcatcccatcccccgctcccagtcttccttggggccggccccagagataacacaatgactcaataccaacccctccagccacgtgaggccctgcaatagaaaacgctttttcctttgggacaatcgcgccccgcacaaagatcacacatgacacatgccttgcatcgaagatcctacacctcagtccctaaaattatactttcccatgaccacaaaggccccacttcccgcccttgagcgacccttccataaccagctcgcgaaacgaacgcgtggaaagctgtgaggggggcgggcactggttctcattcctgggaagggactgcacttacctcacgccagcccggggtgctgtgggggcggcccgttatcggggccccggagccggttcctacggccccatacacccgagctcggtccggagcagctggacgcagagggcccgaccatagacacaggccgcaagctagagaggccccctcacccccaccctcaccatgtgaccagctgccaaagaggcgcgcggaaactgggagggcggggcgaacgccggacgttctgggcacgtgaccgccacccatgcgctgaggggcggacaggaggtgcttcgactgggaggagggcgaagagtgtaagggggcggaggggcgatggcagccacgtgatctgttgctatcacacgtgaccgcttgacattgctctgaggagcagaggtgtggctacgcggcgggcacgtgactggctgccacaacccccgctgcagggggggagcggtgagggggacaagagagggtggagcccgaggcggtgccatggcaacctaggccacccagagcccaactcccggctgaaggattgtctcactaccggtctgaaggctgaactccagtctcactaccggtctttcagcctgtctgcattggggagggggtgggagttggggtaccagaggtgatgctgtcaccttttcgctccaccatgagaaaacatactctcatttgtgtcattgtttcattcattaattctacaacattttactgagtgcttgcttccagtgtgtatgtgggtttttattttgtttttggtgtctgtcactggccctttaaagtagtggtacgactatctataaagatgtagccaacaatggggtcttctacaatagggagtaaacaatgcccatttgagggcaaaactacgattaaaggatgacggaaggcagattaatacagtaatccaacaggctcagtgacaaggtaatcctctcacttttccaacttccaaacctccctgggagtgttaatgcaaagacctgaggccatctggcagagaagttattgatgagcaggagacaggaatacttgaccttttaagttttttttttttttccagtaggaaggttctatgattatgtgatatttgtatgtgtgcatatatgcttctatgtatatatgtatgtatatgatattatttatcacatcatatataagacggatacaggattgcacatgtgcaagaaagttaccaccacaccccctgcaccctccagaccaccacaatgaatgaaaatgacatgcccccttctgcaaaccttgtgactactcatttggagttattgtgcttccctctttttccctagtgccgctttcttagcacttagcactgtccagaacacacttgttcccaaatggcctctgcccagacacctaggtagacacaagtagatttctcctactttgttttattggctccaaggtctttatctcccagccctttgggggtatgggagtaaaggaggaaagcggttagtgtctcatttgtgagaatttgtctaaaatctaaagccattttattaccctatttgccactccttccactctaacttctgttttccttaaccatctggctgagaatataagagttcaaactagaagatgaatataaaccatgacttagagcaaaatagaatacatattaatacagatgcctcctctttccatcctgatacttgtagccctgggcccctcctggcaagggcagctggaacactagtaagaaaaacctcaaggactgaactgactaaggggctcaagaggtgaatgttttattggctaccttgctaggggtgggtgctttgtaagccttctggaaggctaagataattgtctgtgagtttttcaaactcccttcccacaccagcattccccacttcagcctcaccttccacataagaccttcacagcttactgtctttgcaacagaagacgtcctctctgtctgcttgggtcccagcccctttttctgattcattcattagtccatccaaaacatttgaatacttcatgggaacattactgtctctccatcactttctattgaggaaccttaatttggcagtctgtcccaggctctgtcccctcccttcttctgttaattactctttcactaattaaattttttcccagtatgtttgacccaatgagctcccctggaatcccttttccctcagctttgcaaaggggaggagagggagaatgtaagtgtaagaaagaaaaaaatgtgatgggggtagaacttggcctcagagggaagtctccataaaaggaaag

SEQ ID NO: 916049 - DNA, 4001 bp, Homo sapiens
ttcggatgggcaaagaacctattgctcccaacacgttttagtgggactcacagggaaacgaccttcctacccgatggggcctgggttacaagtagctgctctggtcaacagtttgaagagaaagtatctctgggcatagaaactctgaggaattaccgtatccccagccttccccattgctacttttttgacctcacgaagtataaacaaaacaaaaccccataagcttttaatttgccagcaaccagtaagatcaggtatcgtgaggtctgaaggccccgggttccagtgcgtgctcctttagtgatcaacccaccgagctgtttacgtttgacgtcttctgaggccaggcttcttgggcgtctgctccacagaaccggcatttggggaaccgtctgaaacattttcttctgttctgttggctcttttgttttgagtagaagaatctaagcgcaggggaaatttttaaaaagaacacacaatctttattagaaaaaacaatggctggcagaagttggccccatagtcaggggatgaaaaacccactacctccacccacaatcctggatccgtcatccccagtggcttttaagggcacaaaatgaggttgttttcaaaaaacagaaagtgcattctccgccccagagctctttccctagccaggaggcggaccgttgataaacatcccaactttgtcacatacctaggagttgctagtgagagggaccgcgatgtattaagttagggaaattatcggatcttaccatctccagtttctgacttaaaagtcacaaacagacaagcagtgggccaggtagcactgaacacctaagaccaataaagttagctctcccaaagctaaatcagaatacgccgaaaagcaagctaaggttaacaccctccagcaggcaaagcggggccccaaacacattctatggttgggaaagggtcattaccgtcggttgcaggtcgcttccttattcctgcgcattgctccgctaaccccgtctggctgtccgacggatcagtctttgggtccaccaaatgcgtgtcctcagagttagccggagccccaattaaaggcgccgccgggcggctcccgctgacatcctggctctcctgcgccggcaccttgcaggcacctttggggggccgcgggggtctgtagtagaactcgggcaagctgcccttctccacctcttgccactcgtacttgccctctaggggtttgtgattctgaaaatcgaaattccacttgcgctggctcgcctcttccatgtctctgcagtgcttctccaagtcccgggttaactcttcgtggtccaccgggccgaagaggttcctgcaggccgagggcttggggtgctccgcctgcctggcgtccatccgctccaggctagggctcccgttagacactcgcacgtttgacatctttctcccgggtctgcacgaccgcctctctcgcactctcaaaaaaacaaaaccgaacaaaacaaagcgcccctacgcagcccgaacccctctcggaagcccagcgactgccctcggagccaaaagacacagaccccgacgagccacggcccgagctctaggagcgcgcaggggctgcggggaagccccggcccggccgccgagtctccgctgatcaaatggactggcgagcgggagggcggagaggagaggggaccaggcaagcggagagggtggcaaagcccgtccgagtctgggcgggtgcaagcccgcgggtcccgcgaacccagccgctctccaaaccttgccggcgtcggagtcgcagagccgtgagcaagcggggacaggggagggggagaaaaacaccccgaaaagacgagccccctttttttagtggcccaatatggcggtggaagggaggctgacgaagaagaaaatgattgacacggcgagtctatttaaacagaggaggagatccattggttgcggcggcgggagccgccccgccgaggctggcgagcgcggccttaaggtggccccggcgcggttccgccacctcccctcgttcccgagcgcgccgcctccccgagcgccgccgggagattggctggtcgcgtgactgctggaggggtactgctgccaacaaacctgctctggctggcctcggagaaattaaaattaagacaaacaaactagccaaacggccgggaacctggggcggggcctgaggttcggggcccggcgctgcgttggcgggttcgccgcggcgcctaagccccgacctccctcccgctcctcgcccgggaagccgggacctggaccagaggaccgcgaaggtcgccggcagctcgctaggagccggggtggcgagctgcccccagctcggccctccccagcggcccccacctcgtggtctgcgggggaggccgcggagcgtttgctgggggggctgggcgcccccccgccggcgtgcctttgctgggggctggtggaggcagtgggcaatggttcgctcagccttaacccagaagtttctgccatccctggggaggctgggggcctagggaagaagccaaagcgaacgtctttcttttagaaattagccaggagtagacgcggcacttatcatgaactcaagctctccctcaatgaaaataagaaaggaactcaagattaaaaaaaaaaaacaaaaaactctagtctctcaagtcccttaataaactttgtagctgtctcagacacgtttagttttgaaaaacgagggtacacccctggcccaggatcttccttcccaagcacagttaaggccatggacattggctgcgtgtgggaactcgtccctttctacttttctgttctttcccgggattgtagcagtttcctctacctgagtccagccgccaaatacaacagctccttccttcctccacccttctctctcaccagatttcactgctccaacaaactcagaacaatattcagatgctagtgaatgctttcagagggctgaagggtgaaaatactcccctcggggtcaaactccagatgatgaaatgatttttaaaacaccacaaccatgtcctaacgtccgatactagtattccagcgtttctcttctcccttttgcagctggaaatttctctctcagtgtgggcttgagcaccgtggtggaaggtaaagtaggacgatgagcagggctgccctgagacaaagctcagtggatcttcaactgcctccccacccccatgcccggtacccatcatcttggtttgagccaaagttaatgcattttactggaaaccaaccttccgttctaatattacacagcagcaaagttttcttaagcacctatgctacagatgagcttgatgtgtagcttgttttcttagccacatcttgtccactttgtgtgcctacctcatctcatacgctccagaatgtgacagctggaagggaccctcgggaccctgtggtttaaccctctcctttttaccacggaggaaatcgagactcagagaggtttcctgtccagggacatgcattcggttggtaccggagtcaggactagatgcaagtctcctaacactcaggttggttcattttctgttcctttccttcctaatggttctcactggttcagggttttgtctgagtttgattgtgctgtagtctgcaggtcctgctgtcttacaagtgactgaaaatggctccttcccaggccctgggttgcctgcagatgtttccttgatgtggcctgtggtcactgatatttaaatgcagctgtcttgagcctgtggtatcaccatccactagttcaactaaaattgaaggacaggggttgatacccagagaacagtaaagggggcagtgcccagaactagttttcaagtcaggacttcctacctaactgacagaaaagaattcacctaggatcaagcaagaggtctcatcctctttagtttttctacttttaaggctgtcaatttattggactgcagactgggggaaaaggaacaggaaaattagggtag

SEQ ID NO: 916050 - DNA, 4001 bp, Homo sapiens
actccatcgccccctctcctcccccaaaaaagaggaactataggcaaagatttgctccatcacctaagcccaacaggcttaggtctccagagctgtacctttagtgttttcaagacatctcctgtctccccacttcagggactacttagaaataccaatgggaggccaggcgctgtggctcatgcctgtaatcccagcactttgggaggctgaggcgggtggatcacctgaggtcaggagtttgagaccagcctggccaacatggtgaaaccccgtctctactaaaaatacaaaaattagctgggcatggtgacaggcgcctgtaatcccagctactcaggaggctgacgcaggagaactgcttgaacccaggaggcagagtttgcagtgagccgagatcatgccattgcactctagcctgggcaatgagagcaaaactccatctcaaaaaaaaaaaaataccaataggatgtttgtttttatcagttcatgtctcttcttctagcacctcatgttatgtaatagctctactcctgaaaactggggctcagacttttataagctaaaactctgattgcagtgatatcttctcaaagtgtggatcttcatcagttaatttgccaggtttacatatttagatcacttaaatcagggcccagctgccctgttagcaaagtggaaactctaaatagccaactaagcagcatgctgtacgtgtgtgtgtgtgtgtgtgcgcgcacatgcgtgcaagcattgtgacacacacagtgtggagtggtgtgcgtgtgagtttcaaggtatgtggagtccaaggtgactgtctggcacccagtctttcttgcgtggcacaagtgctgtcgctgagaatataaatgtatcttgtgtttgggtgtgtgccttgaagagggactgtggttggtgtataaatcccctcctccaagccttttgcatttagaaaaccacctaagcctgatcccatccatctttaaaatcgagaacctagacaattggagagctgcttgttgatagggacatgcacaaatacacatgataccttatgtcatgcactgagctcttatttgggtggaagtctggggctgggaaggaacacccacctgagagggccaggaattcctcccggcctcagtccctccgactacgcgggcattggtttccggaaggtcctgggtgctgtgtcctttgtggggcagaagaaaagtgagtgatgactaagcatggggtcagccaggggtaggggtggggggtggcgattgtgctttgaggaatgttagccttgtctgcaaattcacagttcctctctaacgaatgaggggcccagctgtgagttctctgagccccttttgaaaacaggggtgcctgggtgccttctgtttcccccaggtgttcccagaactccggcatgctatgaaggacctctctcaaaccaccaggctaggccccagaggctccttgtggtctcctctttgctcaagatcaccctttggcctgaagagacccccccccactctttgacccccaccagccccctaatgctttggcaagattctccagggttcagggcctgcagtgcacaccccagccaggcacctgctgaggaagtcctcctgtcaatgggggtggtggggaagcccagggacccaccccactaccagatggggcttctctctgctttgtggcccagggacctgccacccagaggggcctgaatagccagtggccctgaccttttctatcttggcctccaggagagtaaaggacgctctgcaggcagagcgtcccacctgccctgggacagggtgctggcctggacttagggaaaatttgctgaccttcctgcccaagtccccctccctatagacctcaggccacatgatccacttaccataaaggaccagggttgcgactggaccatatccacttaccataaaggaccagcatgttgccgatggagtagaccactgccttcttgcttggaccaagccctctttatactcctcttagcagcaaagctgactgtcttcttgccaactggcagggctgagggtgcaaggcagggaaaatcacaagtgacatggaaatacaaatgaaaatatttcttttcaagtaaactaatgtatctgttattcaaagacagaacaaggccagggctgaattaatcatctgcttttaattgaaaagcatccaacaaactctttttcagaaataagatggagaaccagggctggtttttctctaagggagcaccccttgtcatccatcactctctcgttgtcctcagtggcaccataaatgcagagacttgccctgtgcactagcagctggaggccagggggatagtggaagaggggggagtggttagcaagggcaaggaagacacagcaactctctctgcccaaagagggagatggcacatgcccccaggatgcaggcataggtgtaaatgcagacacaaaagccaaatagatgcagtggagataattctgggggaggaaagtactgagaaacaggcttgggccctctcagatggagagccaagaaggggctcccagaggagaatatgaggcagggtagaggaggggatccttgggatgtgaagacagtctgagggctatgagggtagatggagggtggagggcagagggagaacgagggtaggagccgaggttcctgcaggagatgaaaggctttgttcatcacagttcgtagaggagagagaagggagttgcggccgggcgcggtggtttacgcctgtaatcccagcactttgggaggctgaggcgggcggatcacaagatcaagagatcgagaccatcctggccaacatggcgaaaccccgtctactaaaaatacaaaaattggccgggcgcggtggctcatgcctgtaatcccagcactttgggagtcggaggcgggcggatcacgaggtcaggagattgagactactctggctaacacagtgaaaccccgtctctactaaaaaaatacaaaaaattagctgggcgtggtggcaggcgcctgtagtcccagctcctcgggaggcgcaggcaggagaatggcgtgagcccgggaggcggagcttgcagtgagccgagatcgcgccactgcactccaacctgggcgacagagcgagactccatctaaaaaaaaacaaaaacaaaatacaaaaattagctgggcatggtggtgcgcttctgcagtcccagctaatctggaggctgaggcaggagaatcgcttcaacctgggaagcggaggttgctgcactccagcctggagacagagcaagactctgtctcaaaataaataaataaataaataaataaataaataaataaataaataaatagagagagaaaagagttgcaatgtgccttgaggtgggcagaggacccttgggttggccacaaaatgatcagagccactgcaggctccagagcagaggactgtgggtgcagcagtcatggtagcaacgcatggggtttggaattaggcagggagaagccaggaacctagacagaagcaggaccatcacctgcccacccagggcttttgttgcctaaacactccagaatccaagcttcatggctgcaggggtgggagaaacctggaaaatgctctttgaaggaatctgcacagtcactttttcagtgtctagagctgttcagaggagttgcactttgatgctcagataacctgaagagcttgctctccagcctgccctccagcattctggcacactcagggaagaggggtgagctgcgctagggaacccggggcctctttggtcattctcctcccgcttccctgcttcctctggcctctagccccaggatgaggagtccaagaggaggcttgagggcctcctgaaggttacctctttacatcacagcagggccagatcacctgaggtcaggagttccagaccagcctggccaacatggtgaaatcccgtctctactgaaaatacaaaaattagccaggc

SEQ ID NO: 916051 - DNA, 4001 bp, Homo sapiens
aatccataatttcaggtttaaactccgctataatgtgatgtctacaaagctccaatttccttcagtttgtcctacataatatactcagttttgccttcttaaggtgtatttttgtacctatcaattgtgtttcgaaaacctttactgccttctcaattgctgatagcataaaatacacctttaaggccctcaacaacctatctcaaagtacttacccaagatttgttttctctacagtctgctacaaacttgctgcaccttgtttcctcaaatataaagaataaacatatttcctgttctcagtatttatttatggtaaccaacagctctagaattcccttactatcttaccactgcattgccttccacttatctaacactactcctcagtattgatcctttgtgaagtcttctgacatctcttaaatcatttcccctcttaacaaatccctatagcagtcattgtctgcatttgtcatttggacctcaagatatatttccttatgttacttttcaacatactcattctatttcccctacacacccttttagaaactttaagtagaaactagcaatgttttatacactaaaatacttaattcacatttaaatatattgcattttttagtggtgatgtagatattaccaggtattttcacaaagattaccttatataagaacagatttttatagttccactaatagccaaacctatagttaaaacctactacatacaaaccttcattagtgactgagtaattctgaaaaggtgtatcacattttcttgcttttcactttttagctcatttacttccacctaagtaaacagaaaagcaactgttttatattttataaccttcaagcaaaatataagaacacttccagattgtgacaattatagttgtccctgaaaaaaataaattcatattttattaataaattaatcataagttaatgtatatatctattattattgaccaattaagcaccttggataaggaaatcaataaattatctgccagttcttcttgacggggcaggtcatctgggtcaactttcattatttctttccagtttatattaggtggcatcttgaattctttcactgtgctccacctctgtaacaaaacaggtgtatattagcattttcaaggtacacagtattattggttttctagcaccttacattttttgcagattatttcattataactttctgatgttagcaaaacagacaattgggccacaaaatagacaagtgggcaaaatagccttgatcaaaaatagcagtcggcacaaactgtcagagtgtcccggctaaataaaatgtgacggcttccttgctaacactaatctaagttaatacttaagatttctggatcccttcctccacacccctacccacaatgcgcgcgaacaccctaatcctggcaagcgcgagggtctgtggaaggccgacaatcatccctgatttggagaaacagaattggggctgaaaaaaaacgcagaaattaacatttggaatgagtgaagttgtgcggcggaaactggaaccgaagcaaggcagtattagggacccgaggctggaagggcggggtagctatgctgtggcacacgggccctcaggctaaagaacctgagcgtggagtgactcgctaatcctgcttacaaggatccacccacctagaccaagcctggcaaccagcggaggcctctcactaccgcaaccaccaagctggacccggccgcgggccctgacagatccctatcgcggttccacgcggactctgggtccagccaaatggtcccgagcaagccaaagcggcagcggctgctaggcgacaccatccccaactccgccaaggccagaataagatcccggatgccaggagagcctacagttcacgaccgtgggtgatgctttacgtttagattctccgccggagtcccagagctcggtgttcaggatgatgagaaggcgtggaacgaggacttcaaatcccagagtgcagttctgcctgaggcttctgcatgctgggaactgaagtccctgagaagaggaggtaaggcgctcccggcatgcaacgcgtaagactgcgacggtaccggggcggcggggaaggaccgagaggcgggaggagcagcggctcaggcgcctgcaaactggtggcctgaacgaggtagaccatgactgtggtttcagtggcgtcactcgctgggctgctcttcctgaggttttcctaagccatcccctggcggaaccgcccccaggtgaggtcgagctgtcggtcagcatattgggaggaattgaggggagcagtcctgggttagagaagcttctgctattggggccgtagggcctggtcccattctgaaaaagtgggaacaccctgccttctcttcaggcgtttgcaagcggcgtccagggtagtgccttctgtaagaaggaaaaaacaaaaagttttagccttgtttagtatcagaatctgtcttgatagttagagtgagagccgcgcagccgtgatcctcgtttgggggcgagcgaagaattgacaagaggtctcggcatcccgaccccgcccgccttacctgtagcaccattcctttcgcggatcgtggggcttgatggttgtggagctagtataaagtcaaggctctagagaggagaggttagtacttgtccggaccactgccgggggtggagagagaagggatccaaggactcacctgtactattgttgccacttgcttggttacctagggtgcccttccatgaaagcgccttctctggtgtttaccactcttactcgtgcaagttttgctcatcctgctcgtctgctcacaatcatgctggagtatgatacatctctacctaactttcctaagaagctgtagacttaaatctaaatgacatttccaactatctggaccagtgctttgtctttttttttttttaaacgctgctttaaaaaaaaaattactgtacttgacagtaaattttcctttcgaaaataagtaatgagtttctttttaaacccccaatttgggtaaaataagtagctcagtacaaaataaaaagatactgattttgtgagatgaattttaaagacattagttagatttataggaatgacaattttactacttttctgaaagattatatgccaaatactattcattatcttgtttattcttccttacaatccagtgaaataggtgcttacattgtcctcattttccatctgagttaagaaactgaggcttggagaagctaagtaacttaaatagtgtgattgaacacagatctctctggctggaggacatattcttaacttctatacacctcctcagacattctgggaaaccaatatttgtgaagtgcttgttcctcaatcttgctatttttattaaatgttatattttaattttgtaagtgtttactcaataatttgaattaaacattcttcatgttcagtgttcttaattcataatttaacatgggatggtgtttctggaaaggtgttctgatctggaccccaggagagggctcctggatctcgccaagaaagaattggaggtgcatacacccccattggaggtggtagactaaggattgttatagttatttcttgattatatgctaaacaaggggtgggttattcatgagttttctgggaagagggtaggccattcctagatctgagtgttcctcccctttttagactatatagagtaacttcttcacattgccatggcatctgtaaactgtcatagcactggtgggagtgtcttttaggatgctaatgcattataattagtgtataatgagcagtgagaacgagcagacgtcccacctttctcgccatcttggatttggtgggatttggctggcttctttactgcatgctgttttatcagcaaagtctttatgatcagtatcttgtgcccacctcctatctcatcctgtgacttagaatgactgacagacatcctgagaatgc

SEQ ID NO: 916052 - DNA, 4001 bp, Homo sapiens
gagttcgtgaccagcctgggcaatatggtgaaaccccatctctactaaaaatacaaaaattagcagggcatggtggcatgcacctgtaaccccagctactcgggaggctgagaggagagaatcacttgaaactgggaggcggaagttgcagtgagctgagatcccaccactgcactccagcctgagcgacaagaatgaaactctgtctcaaaaaaagaaaaaaaaaaaaactacctgtgaataatcagtgtttcattctcccagtgctgcatggaattctaaattgtatttcactattatttgagaatgttctaaatacagtccgcgcacttcatctgatctggaaagaaaacactcaaagtaaggggaatacccagcatactctgtcctaaataaccaaaggacaactcaaaaccatttgcaactctcaggagagtcctgtgtgacacttataatttaaagcattctggcctggtgcggtggctcacacctgtaatcccagcactttgggaggccgaggtgggcggatcacctgaggtcgggagtttgagaccagcctggccaacatggtgaaaccccatctctactaaaataaaaaaattagccgggcatggtggcacgcacctgtaatcccagctactcgggaggctgaggcaggagaatcgcttgaacccaggaggcggaggttgcagtgagccgagatcgcgctactgcactccagcctgggcgacagagtgagactcagtcataaataaataaataaagcattctaacaattctgaacaaactgagtttgaaatcaaacctcaatacaaaaggtgagtattaattctaaccacttacaggctaaattcataaatatggaaaattctaaatccaggtaactgtaggatagatacctttaattgtgttttagttaaatgtcagacttgtttacagacatgttgcttggtaacagaagcactgctttaacaacccactctgttttagagctgcttaaagtctgaacagattatgaagtatatatcatatacacgaaattcagacaagtctttccttatcctagagatctgtaagatttgaaagagcttcctcatttcagctaactaaaggctttacaaatacttagcagtggatattcttaagagcaaaatgcccattgattatggtcaaaagttggacactgaggattaaccaaagtatttaaacccagcatatgctaacatattttaggtgtttatctcagtaatgacagtcgacatcactgttcattcaaattgtcttcaaagccaaggaaaatggtagcatagctttttcatcgtaaattaagctggaggtacttaaacgtctggccaattaccaaactggctacacaaccaccaagccagagtgcatccaaaagctccatgaagagtttcacgtgcgtctctctgcctacttttctagcacgagcttccactactttaacaggaaaataaaaaaaggattcaagggcagtttgtggagggacaaaatgagtattccaaaatacaaacaagacaccgtccccagaaagagaggttacataccagacgcacgcacgctccttgcaacccgcacacggaaaacttaagtgaccgcagttctggccgcgctcgccaccggggacacctccacagctccaaccacaggcacccactcaactccgcttacggaggcattgggactaagggttacggtcctacagcggggtgtcggcccagcgagaggaagagggccgaacggacccctcgggctcccgtccctagggaaatgtgaagtatcccgggagaggtccgagggcggcggcggcggcggtgaaaagccccactcctccgcgtggaccgggatcctcaggggtgcggcgccaccccacgtgctgacgtatggcccagaagccgcctcatcgcaccgccccaccagcctggaggagcgggctctgtcccttggcccagcggcacgcgaagcaggaagtcccaccccccacgccgacgtcacccacgccaccgacgccggttgctgccggagccgttagagggaggagacaaacgaaccgaggcgggagcggccacgggtgacagcggcagcggcggggccgggctgcgctcccgaaggcgttcctggagggccctgggatggactcagagatccccagagccccaggggacggaaaatctagccccgggcacttgccttggagtctgagtgatgcgcgtcgttggagcgcgaagccggtctccctagcctccgcccgacacagcgtctccaggggttttcctccttttcgcgcctctccttccctcttccccacaccatttgagagcctcaaatggtagtcctgccgccacctctctcccttcgccagcctgccatcgtccccatgggtgcagatatgcgctcccgaagccgcctgcctgccgcgtctgcctcgggcatcagcccacgagtggggagtcggctcagcttgccacgagggaacctcgggttaggaccaatcgcccgggagagagccctcctcgcccccgcacctcctgctccaagtctcctgtcctggttatcccaagttcagggcccacctggggtcacatggggaactacttgtcttaaggctgtaaacaatagttggaagaggagttgctagcttttgagaacttccatgatcatccaaagtctgaaacaaagtaggcggtcagcctttcaaaatacgtgttggaagaaacagacaccttcccatccccagcgtttgttcagtgccttggttgggctttgattctcactgctttgtgaagtacagcttatttttacccccaagattatgattttcaggctgtagttattattggacaactgagaggtgattttgttgttgttgaaatgagggaaaacgggccattagaaaggaccgtgtctcttaagaggagggaaaaaaaggacagcgagttggtaatggaatgttgctggatggattacatagatgagacatgggagatagaatagagaatccagaaattctcatgtatgtgtgcgtgtttagtataataacagtagctcacatttgctgagcatttgtgtggcaagtactggagtactttttcaggttatcttatttaactctaacatttctgtaaggtaggtgcaattgttatctccatttcacagagttgcccaaaaccattacttttaaacgctggagccagacaactccagaaatctctgtggtagccagtaaactatacatgacaaattattggtcagtaggaaaaagatcattcgggaaatggcggtggctcacgcctgtaatcccagcacgctgggaggccaaggcaggtggatcacctgaggtcaggagttcgagacgaccctggccaacatggtgaaatcccatctattaaaaatacaaaaagccaagaaaaacaaatattcaattaacaaacggaaagttgtcccacttccaaacagttgttttttgtctatcattgttgataggggtgtgggatacaattactgtcaggcatttttggtgtgaaggtgaaattggtacaaccctatttaccaaaatttaacatatgcattagcctttgccccacagctgtctcatttccgaggcatataccctaaggaaaataagggattcataaggatactatttgccaccttttttaaaaataatgcttctagaaacaagtgtccatcactaggacactagttaagaaaattatgattggtacatgcaatggaatactcttgacccattaaaaactgatggaaagttctttatttgcattaaagtatgtccaaaaaatatagtttcccctcaggaaaaaaaaagcagaatgtagtttagcaagtacagtgctgtcctaatgtgaatatatgtgtgtacatatgttaatataagtgtacaaaaatatctggaagaaggtcagtcaaaatacaagtgttttacattttgtcttttggactttttatctggttggtgtttt

SEQ ID NO: 916053 - DNA, 4001 bp, Homo sapiens
atttttgcacttgaacgtctggcagagcattttgatgatgatgatgcacaaatactacgaataaatggatgcgtgactagctaaatagaacacaagattttgaaagacttgagtcaaaaacagtaggcaaatcaaagaagcaatcccaaacagatgctatctttcagaaattaacagattatttcacctgcaacatattcccatcctagaaagggcattcctgcattacaatcatttatgcttggataaaggcaaaacgaacagatgtccaagaaccaccctcattacctgaggcctatggcagaaacatgtctcctttcttggagtctgagtagacttgatcaaaatcacccacaggtataaattcacattataatatcacacaccaaagcctcagtgaatatctttatcttggacaaacatatgatccattcacttaaaggtgaaatcatgtggttgaacaaagtatactgcaattctgctaaactcatttagaagctggctcaaggccgggtgcggtggctcacgcctgtaatcccagcactttgggaggcagaggcgggcggatcacttgaggtcaggagttacagaccagcctggccaacatggcgaaaccccgtctctactaaaaatacaaaaagtagccgggcgtggtggcgcgtgcctgtaattccagctactcgggaggctgaggcaggagaatcgcttcaacaggggaggcggaggtcgcggtaagccgagatcgtgccattgcacgccagcctgggcaacaagagcgaaactctgtctcaaaaaaaaaaaaaaaaaaaagaaaagaaaaaagaatctggctcaatatagctgtcctctgataaagccctgtggctctcctccatcccttcgaacacactcctccttccatttcaggccccaaggcctgttctgcaactaatctgacatctttccattactttggaagcctagggctccaccacaccctatcccaaccagatttctaccctcctaccaacaaacgtgcatgagttgacataccaaaccaactcttagggccaaactaatcctgttccccccaattctcggaaactcaagcgtcctaacaaatcttaagagtctgatgagtccattcctttcccttggaacgtctggcccttgcgttgacccctcggcttccatggtcacaactagctctggttctcctggccccttcctatccctctcttcggggcctctgccagagctcacactgaacctgtttcctcatctgtaggacccttggaggttgggaggaggcctatatgacccccccaatccaactccggatctaacattgaaggggcccagcattcccctagaccctcactctttctcttgcccacgccccaaactccttctccatctaggctaccacctcgcccacgcgcctagcatcacccgccgcggcccaagctcccccagcccctgcttccgggctttccttgcagttctgcttccggccctcggcccttcccacagcggggcgcccccggcccgcgcccggcccccgagccgctcgctcccgggctctcaccgctcgaagagcagcctcacgaagaagatgcccgccgccagcgggaacaccgagaggatgtgccggccgcgggggtaaccgtagccgtcggccggcccctccagatcagcccagctcacgttctcgggtagccagaagcgctcgctccacagccagccccacagcaagcttaggggtccctgcgctgctgtcgccatcttacgcccaccccgaagccaccgccgccacaagcgtcagctgccgccacagccaacggaacccgcggggaggcggccccagggcggggcccggccggcggccacccccttccggccccttctggtcactgccacggatccgcccgcctccctggcagggccgggcctcttcaccgcccatctctcctcccggcccacttccctcactgcaacccggggaccgcctccggggatccacgccccttcccgagcctctgactcgcccagcccggccctgggaccacgcctcgggcggccctgggcccgccctcttttgctgctggtctaggccacgcttctactcctccctcactcttccatccagctacggccacaccccttatttcaggcctagctcctttacggggacattctcctttctcagcctgttggaatcgaatccgttccggctcccacccaggcggtacctctgtctccactcccggaggccagatcgatctctcaggtcagggcttctcttggatgtcagctggtcctgcccactactgtccgccactagagttcttttcgctcccaaccttttcttcccttcgtgccccgtgacctcagcctactttcactgctttatcccttaaaaattagtcacttttcctcagaaaaaatggacttaacagtttacaaaaggccgggcgcggtggctcacgcctgtaatcccagcactttcagaggccgaggctggcggatcacctgaggtcaggagttcgagaccagcctggccaacatggcaaaaccccgtctctactaaaaatacaaaaattagctgggcctggtggcgctgtgcctgtaatcccagctactcggaaagctgggacaggagaatcgcttgaacctgggaggcggaggtcgcagtgagccgaaatcgcgccattgcactccagcctgggcgacagaccaaagactccgtcccaaaataaaaataaaaaaagtttacaaaaatccttttattcttctcttggggaaaaggaaatggaagaaaaacaaagtgaaaagggaagcactcaaaaagtatacgtaaaggcaggccgggtgtggtggctcacgcctgtaatcccagcacgttggaaggccaaggcggaagaatcacctgaggtaaggagttcgagaccaggctggccatggtgaaaccccgtccctactaaaaatacaaaaattacccgggtgtggtggtgcatgcctgtaatcctagctactcgggaggctgaggcaggagaattgcttgaggcggagatcacagtgagccgagaccacgccattgccctccagcctaggcaacagagcgtctcaaaacaaaaacaaacaaaaaaaggccgggcgcggctcacgcctgtaatcccaacactttgggaggccgaggcgggcggatcatgaggtcaggagatcgagaccatcctggctaacacggtgaaaccccatctctattaaaatacaaaaaattagccaggcatggtggcgggcgcctgtagtcccagctacttgggaggctcaggcaggagaatggcgtgaacccgggaggcggagcttgcagtgagcccagattgcgccactacactccagcctgggcgacaaagtgagactcgtctcaaaaaaaaaaaaaaaaaaagtatatctaaaggacctaaaggcaaaacaaaataaatagccaatgtttgatgaggtttcctgtgtgccaggcactgcatggaacattttacacaggttatttcactccttcaccctataaagttgatcttgttatccccactggataagtaaactgaggtccagtgaggccaaacaacttgcccaaagttatgtaggtaagaagtggtagctagtgttaagtcaagtttaatctaaagctgcctccttacatatttaagttcggcctaaaggttttctgtacattgtgaactgtaacaagtggaggtgtaaatcgaacgtagaccacaccagtgccaatcactgaattttggccaatcaaatgtagccaactgttccaaccacgttcaaatgagacaaacgctgatctgtaaccaatctggttgtttctgtacctcactttcattttgctgtccataaatcttccaccacgtgaatatgctgggtctctgtggatatgctgggtctctctgaatctgctgtgattcaggggctgcccaatttgagaatcatacattgctcaaactcctttaggctgg

SEQ ID NO: 916054 - DNA, 4001 bp, Homo sapiens
tcagacagggtggttacaaccatacgggtttggccagttcatgaagccaccccaaaacacagatagcgtaacccctagcacacctacacagacacttcacactgccagcctaaaccgcaggctacctcatagagacagaagccactaggaaaaaagccaaaactatgtccactcaccaggaggaggagtgccctcccttcttttgcccctcttcactaggctattacatcctccccgagcccccatcacttccccactcaaaacattccagcaatctgcctggctgctttaagcactccagatcctgctgaggagcgcgattcaaacttcacacagttcagacagcacagaaaaccggtaaccgatcagaagctaaaaataatcagatagagtgtaaccagcactccctctttcctttccacagcagcaaccacaggatcctactagcacagatgcccggctggtctttcaaacagaatcctcaacgcccccctccaccaccaccaccacaagcctccaggggtcccagctacctgcattcctccgaggacccacataccaggtaatgcctgccagcccagagagctccctcaactgggaactgcagagcattcctcaagacagagtgcagcaagctggcatctccgtgcccaggaggcacatggcttccacccccctcacaccagagctccgcagaagggaaccactcccttcggataccctccacctccggctctgcacagagacagcggagcaacacagccctgcctcaccagaggagtcactcgggagagccccagatgtctccttcccgccatgggcccttggggaagatgttacctgggtggggtgggggcaggctgttgttcaaaagtgcatccatatcctcctcctcactgcccgccgagcagggggacggggagcccaggcccgacgccatccccttccgctcccggccagggaattggcccagctgctcctgccggcggcctgaggacctctacactggcccgagtcactgtgcgggggaggggggagaaacacagaacagtcagtgacgcgcactgtccccctcccccacacccacccgctctttccgccccccaccccagccaccctagcagggcacccgaaccgctcaggctgaacttagttccacactcctcgggggcagcccggaagccggctccccggcaggcgcccccacggagcgagggagcgacgcctccgagggcaggctggtgcaagcgcggggaggggagacgcggggctggaccgagcggggtgtgacgggggagggggtccgagtggcagcggcgcgggggggccaggggaggccgcaggcggcgaggcgctcggggacacaaggtcacttgggggtgggggggcgcctccctgcgcccggggaggggccagtccccagacagggcagctctccaaaggctgtcctctgggacaactcaggttctcctcaagagctgcggggacgagggggcgtggaggctcgggcgctgcggggggccggaggcagggacgcggggggcgaaagcgtcccaccgggaagggggccgggccacgtgtcccggggggcaagtgatcaaagggcgagggggtgggcgccgggcattgtgggagaccaagccggaggcggggggtcgcggggagcaagactccggcagggttagggcgggggctggggaggaggccgggcgccctgcagggccaggaaaggaagggtcggctcctctgggcaaggggcggtccgcgggtccggagacgcctgaggaaggggcgggtgacgggatgaccctcggggctggtagggccgtgaggggcgtctctttgggaaccccgcgctctcctcaccccggagccgccgcaggtcgcgctgggtccggctcggtgtcactcccgctccggctcctcctcgccgcggccgaaggggggaaaatggctccggctccagcgtcgcctcttaaagggcctgaaacaccggccgggaaatcccaccgcacaggccccgcccccccacggacagcccataataacctcaaccaactccaaccccccccttccactaccgccaccctcctccccaggtctcccgggcaacccccgccccctcgtcgctcaggcaaccactggccacgcccccttcgcagcgggcgcgcgcgcgtcacctgggcaaccgcccacctcctggccatcccataatacacacggacacccccccccccaacacacacacacacacacacacacacacacacacacacacacacaacacacacacaccctgcccccccacatttcatacacatatgccagagactgctgacatctcaaaatattgcagaccttttgcaactaaccctcttagacatcccataatagacatcctttgccaacttcttcttcactcttggacctaatgctaacatcccataataattcatcacccctccctccccatggccatcccataataagcacccctcgcagcacttatgcctcatatcccataatattcagccccatcccccacagacatcccataataaccatccttcatccacccccagtttgatatcccataatagtcagaaactcacccccccccatactacaacaacggacactcggcctcctcccacacacatcccgtaataatcagtctcccactttctatactgacatcccataataactaaccccctagagctgccctcagtccctgcaggccagggtctagaggctcacatcacccccagccttccctcttctagctccacagcctatagtaagtacccctcctctatcaaaaagataacccataatgatcaacagccctactgtcgccccacagatggacatctaatctcttttcctctaacactggaaagctatcccataataattttactctcctacccacatcctgacatcccataataattgcaaggagcccgtggtcaaccaaacataccataatactcccaacacaacccagtgtcacatcccataatgcttcatctccactctaccacccctatacccttcgagccaggcatcccataatattcatattcttcccacccccatctccaggcgctgtcagtctattctaacacccagagcagggagggccaggcaggctacccacgcttccttgtccccgcccccacttgcacacaccttaatccctttctgggccaaagtagtatcctggcaaaaagcctcctgatgtctgggaccccagcttccctcataccatcatttccagacactcgggggctgggagcccacctagggccccacccagtcccaccaaaatctaggtattttccagatgcttacctccagctcctaagttttgaggaacaccaaccaaccaaaataccaagctgacagatgaaacatttacatgaagtctaattcaccctacagcatcccataataattaccaactcccatccaaagactatctctcaacattctagcaatcctccccctcaccacatccccaggtcagggatctttcaccaacacccccaggccattcctggggatggacatcccatcacgatgtgaactcaggttcctgctctatacacaccaagagtgaaggcctgccctcccgctactcaccactactcatgttcattcaacctgtgttgacagagtacctagcaaggccgagctccgcaccatggagaatcaaggaagaccagggggcctcccttcaaaaagcataagcaaccaagcaaactatgatacacgacagaatggtgccaagggagaactgctgagcactgtttcccaatttcctgttacagaaaataaaatcccactggttccaagagagaacatatcccaataagatttatcgtggtccttctagaggctggaagatgatacttaaaggatttatgggtatagaccatagtcaacatgatctcctatctgttccctacttactaggggatttttcttggaaagca

SEQ ID NO: 916055 - DNA, 4001 bp, Homo sapiens
taagaccaggcacaagaacgcccctcccattcccccttgggaatgcaacatcagcctggatttcaccagaaagaatcattttcttaaggacttttccccaccaatccccaagtcaacccccaacccccatcagctacatctcaccacccccataaaagctggaagtggagacaaagacaacccatggaggcaaaggggacatccttccatgcacatggagccccccaaacttctcaggcaaataatatgctgaaatggcaaaccgcaaacttactgagatatagagaagatttaggaaagggacaggaatggggtgtggcaagtggaaaaagtgggtcatgctacagctcaggacagagttcacagctcctgcgcagctcccggtcaacatgaaaggcagccccagcccaagtggccaatgggaggccaagacgtggaacccagaatgtttaggcagcactactgtttctcatgcccctctcagaaggacagggtccccttaccagcaccacaactccgccctcaccttgggcaagggcatggaaatctgccccctactctacacaaggatgaaaccaagtttctcatcccaacagcccagactccatgacaacactaacccctctcctaaatggcctcaggttgaagtgaagaattccaacttaaaaagtgccaaatgtgaaagcatctctcccagaccacctcaacttccactgaagctaagaagagagaaggcagaagtgaatgatgctggatgagaaacaaaaacaggatcagcaggctccagaatgagaagaaaactagaagcagaaggaatgaagaaatgacatgtagaaaaaaaaattaaactagaaaacatgaaggtcaaggagatgagtaggtgacacagctaggggctctgaaaaaggacacagaagagaaagacatctgcttaggggcatgacatcaaccatcatttgaggatagacaacagttcccccaatcagacagggtggttacaaccatacgggtttggccagttcatgaagccaccccaaaacacagatagcgtaacccctagcacacctacacagacacttcacactgccagcctaaaccgcaggctacctcatagagacagaagccactaggaaaaaagccaaaactatgtccactcaccaggaggaggagtgccctcccttcttttgcccctcttcactaggctattacatcctccccgagcccccatcacttccccactcaaaacattccagcaatctgcctggctgctttaagcactccagatcctgctgaggagcgcgattcaaacttcacacagttcagacagcacagaaaaccggtaaccgatcagaagctaaaaataatcagatagagtgtaaccagcactccctctttcctttccacagcagcaaccacaggatcctactagcacagatgcccggctggtctttcaaacagaatcctcaacgcccccctccaccaccaccaccacaagcctccaggggtcccagctacctgcattcctccgaggacccacataccaggtaatgcctgccagcccagagagctccctcaactgggaactgcagagcattcctcaagacagagtgcagcaagctggcatctccgtgcccaggaggcacatggcttccacccccctcacaccagagctccgcagaagggaaccactcccttcggataccctccacctccggctctgcacagagacagcggagcaacacagccctgcctcaccagaggagtcactcgggagagccccagatgtctccttcccgccatgggcccttggggaagatgttacctgggtggggtgggggcaggctgttgttcaaaagtgcatccatatcctcctcctcactgcccgccgagcagggggacggggagcccaggcccgacgccatccccttccgctcccggccagggaattggcccagctgctcctgccggcggcctgaggacctctacactggcccgagtcactgtgcgggggaggggggagaaacacagaacagtcagtgacgcgcactgtccccctcccccacacccacccgctctttccgccccccaccccagccaccctagcagggcacccgaaccgctcaggctgaacttagttccacactcctcgggggcagcccggaagccggctccccggcaggcgcccccacggagcgagggagcgacgcctccgagggcaggctggtgcaagcgcggggaggggagacgcggggctggaccgagcggggtgtgacgggggagggggtccgagtggcagcggcgcgggggggccaggggaggccgcaggcggcgaggcgctcggggacacaaggtcacttgggggtgggggggcgcctccctgcgcccggggaggggccagtccccagacagggcagctctccaaaggctgtcctctgggacaactcaggttctcctcaagagctgcggggacgagggggcgtggaggctcgggcgctgcggggggccggaggcagggacgcggggggcgaaagcgtcccaccgggaagggggccgggccacgtgtcccggggggcaagtgatcaaagggcgagggggtgggcgccgggcattgtgggagaccaagccggaggcggggggtcgcggggagcaagactccggcagggttagggcgggggctggggaggaggccgggcgccctgcagggccaggaaaggaagggtcggctcctctgggcaaggggcggtccgcgggtccggagacgcctgaggaaggggcgggtgacgggatgaccctcggggctggtagggccgtgaggggcgtctctttgggaaccccgcgctctcctcaccccggagccgccgcaggtcgcgctgggtccggctcggtgtcactcccgctccggctcctcctcgccgcggccgaaggggggaaaatggctccggctccagcgtcgcctcttaaagggcctgaaacaccggccgggaaatcccaccgcacaggccccgcccccccacggacagcccataataacctcaaccaactccaaccccccccttccactaccgccaccctcctccccaggtctcccgggcaacccccgccccctcgtcgctcaggcaaccactggccacgcccccttcgcagcgggcgcgcgcgcgtcacctgggcaaccgcccacctcctggccatcccataatacacacggacacccccccccccaacacacacacacacacacacacacacacacacacacacacacacaacacacacacaccctgcccccccacatttcatacacatatgccagagactgctgacatctcaaaatattgcagaccttttgcaactaaccctcttagacatcccataatagacatcctttgccaacttcttcttcactcttggacctaatgctaacatcccataataattcatcacccctccctccccatggccatcccataataagcacccctcgcagcacttatgcctcatatcccataatattcagccccatcccccacagacatcccataataaccatccttcatccacccccagtttgatatcccataatagtcagaaactcacccccccccatactacaacaacggacactcggcctcctcccacacacatcccgtaataatcagtctcccactttctatactgacatcccataataactaaccccctagagctgccctcagtccctgcaggccagggtctagaggctcacatcacccccagccttccctcttctagctccacagcctatagtaagtacccctcctctatcaaaaagataacccataatgatcaacagccctactgtcgccccacagatggacatctaatctcttttcctctaacactggaaagctatcccataataattttactctcctacccacatcctgacatcccataataattgcaaggagcccgtggtcaaccaaacataccataatactcccaacacaacccagtgtcacatc

SEQ ID NO: 916056 - DNA, 4001 bp, Homo sapiens
aacatgtaatgtcctaccatgtaataacatgtataacatgttacaataacaatggctaatgctaagtgctaacgctaaagttccttctaagcagtccgtgtatgatctcattaactcctcagagcaaatctatgaagtaggtacataggcgcagaaagatgtcgttagcccagagtaatgtgttgacagattggaaacccacataatttgtctctagggcctctgctcttcaccaaacctcctagtctatcaagtaaagacaaagggaaaaatcttcaaatacttcctcttgtcttaaagggataattttgatatgttatgatgatatctaaatactttcaaagttgtaaaataaactttgacttgatactggaatgtaagactaccaaaacaccccaaaaaacaaaaccaggtcagacacagtggttcacacctgtaatcccagcactttcggaggccgaagcaggtgaatcactttagttcagttgttcaagaccagcctgggcaatatggcgaaagctcatctctactaaaaatacaaaaattagccaggcatggtggcgcacgcctgtagtcccagctactccgaggctgaggcgggagaatcacttgaaccgggaggcagagggtgcagtgagctgagatcacaccactgcaccccagtctgggccacagagcaagactcttatctcaaaaaaacaaacaaaaaaacaaaaaaaaccaggtgcaagcacattataaggggtgaaattaaccaaaaaaaaaaaaaaaattgcttccaaacagcaaatatttcccatcctcgctcctttttagagtataatgtcggagctaattcattaattttcagacaaactaaacatttttgttgacaggaccagcgcatttctctccccatacaaaggcttcagaggaaatcaaacaaccagatggtcacttgggagactggaggcagtgaatgtggaggctgagggaactttctctcacccgttgtatgactttgttcaagtttttagctttccaggtttattaaataaataaatattctaggggctgggacttgagatcttttttaatataagcactacagctataaatttccctctgagtactgccttggctgcatcctaaataccttttggtgtattctatttttgtttcatttgtctcaaaacaaggtccccgttgtaaagacttatttgacccaccggttgctttaagagtgtggtgtttcatgtccacatatctgtgaattttccacttttccttctattatttttaatttcgttccattacagtcagaaaagatactctgtacggcaacgaacgtgacaatattgcattctggagagtatatgaacacaactaacttatacagttgtaacgaaggctaaatgatgtgcgtgaatcatgcgcaagaatcggtgggcagaacaccgaataaataccagttcttacatgacatttcactccacggaaaaatctggagcgcacactgcaccgccgcccgtgtggcctgcccgcaacccggtggctctgcccggccccggcccccggccccggcctcagccccgcacctcgtctccgcccgatggtccactcccgcttcctcaggaggacgtgcggctcgccctcctccgcgcccagacgcaggagccgtccccagggctgcggcggcggcgactgcttgccttcctcgggccgctccatcgggattcacatctgcggagaccccggaaacgcccatggagactcccgaccccagaggccgagactcggcgcccgccccaccccgcgggccccggcccggccgcccgcgcccacgcagccccgcagcccggcctggacgccggcgggcgccccctcccacggccgcaaccaggtcccccttcgccgcccgccgcagccccctcgccagccgcgcttacccccgccccgcgccgaacccggaaccggctgcgccgccgccgctgtcaagagacattgcggctccctcagctgatccgcggggcggggccagaggcctctgcgccccgcgattggctggcggcggcgctcaccaagagcggcagctaaagcggagccgggagtggcccgcgagagtaggcgcgtggagggcgctcggccatctttgatcctgaccaggcgacttcgtcgcctgcggatcacggaagtggctgcggtcggcgccatgttatgttggggcagaagggacggggaacttccggattggaagccccaaggattctgagagccccgctaatctggggatgactcctaggagtagaagacggtccatcttagttgtcacgaggtagtgcacgtggggaccctttcgggtacagttgcacacagtggatcacacagatccgaagtctgaggcacagggcgcggtccgcgagtgggagcggctgcttgtgggcagggtggacgcggggccacgtcttggccggcgttttgcggggtcttcctgttctgaacgcgcgtaacttttgcctcagtatctcacttcttggaatccggcggcgttcacgtgtgtgctccagagaagggcgccagagggtattccctgaaagtgaaaggtcggcgaaagaggagtaaagacggcgagacgcgtccacgcagggggagtctgtgcggtttggaggaacgcgccaatgtctgcactcatgaggagcccccaagggcggttttaagagggtgaagcaggaccgggcgcagtgacttacgcctgtaatctaagtgctttggaaggcctaggcaggaggatctcgagcccaggagttcgagattagcctgagacctcatcgctaccaaaataaataaagtaggcatccatttgtgtaaaacaaaccatatatacacacatatatacatatataaacatttgtatatataggtataggcatagttatctataccttgtaaaccaaaaataaaattgtaagcctccccaaccaactgaatgaactgagtctctcaacgccaaagttaatctgaaaaaccagttcagtccctgatgggaagcagggtttggatatgtcccattatactgtcctccctttggaattcaggtataactgaccagcgtcgacgttaaaacagacaacttaaggctgaccaaacggtctgtagcattaagatacatcacatgacaaatagcaggccctggaagaaaacgaagtattttaccctgacatgtatttatttaacatagttttacgtagccctgcaaaactgtctcctgggggaaatctactttgtagagaatctccttccttttccacatcttttcctgatccaggagagaatgtaagactctggcacctttttaactctgataagaaaagtttaccatctattctctctgaagcctgctgcctggagcggcatctgcattagaatggccagagtggtggtgctcaagcctgtaatcctagcactttgggaggccgaggtgggtggatcgcttgagcccaggaattcagaccatcctgggcaacatggggagaccccgtcttagctggacatgatgacagcacatgcctatagtcccagctattcaggaggctgaggtgggcagattccttgagcccgggaggacaaggctgcggtaaaccacagtctgtgccactgcaatccagcctgggcaacagagaccctgtcaaaaaaaaaataacaaaatagaaactttgtctcccttagcttaacccagacaatcctttctattgattccaggtctttagataataacaactctttcaaccaagtgccaatcagaaaatctttgaatccatctatgaactttctccctaaaaggtgtaaaaccggctgggcgcagtggctcacgtctgtaatcccagcagtttgggaggctgaggcaggtggatcatgtcaggcctctgaacctaagctaagccatcgcatcccctgtgacctgcatgtatatatatgcctagatggcctgaagtaactgaagaatcacaaaagaagtgaaaatg

SEQ ID NO: 916057 - DNA, 4001 bp, Homo sapiens
gaggcaggcggatcacttgaggtcaggagttcgagaccagcctggccaatatggtgaaaccccgtctctactaaaaatacaaaaattagccgggcgtggtggcaggcacgtgtagtcccagctattcaggaggctgaggcaagggaatcgcttgaacccaggaggcagaggttgcagtgagccgagatcaccacattgccctccagcctgggtgacagagcgagactctgtctcaaaaaaaaaaaaaagaaaagaaatacataataagcataccaatccattgacaagatattttaaaatgtaggctcgatcaaatttttgtttttaaaggatgcatgagcctggccaacatggtgaaaccttgtatctactaaaaacacaaaagtgagtcggccgtggtggcacgcgcctgtaatcccagctacttggaaggctgaggcagaagaatcgcttgaaccctgaaggcggaggttgcagtgagccgagatcgagccacggcacggcactccagcctgggtgacagagtaaacccctgtctcaaaaacaacaacaaaatggatgcatgcatggagggcatgaaatatttccactgtatttctgttaatccaacctcaacctccatgagtcctccacaaggcctacactcaaatgattataaagggacttcactatttggagcagagaatagaaagtaatgtcacagaatgtgcaatgtaatatttatcccacgtagtataaactatagatgggagtgaactccactctgccccctatccctccacactcagcccaaagggtgcttctgatgaacagctatccaaagcctatatttactccttattttgtacaaaggtcaaatgtaattattgctaataaaatgttggggtttttttaatccctaggttgtgatgacaaaaaaattattgccttgataacattccagtttgtttttcttgaaaaagtcgatgaagcaaagaggaagttacctcttaactcatctttgatcagtgctaccggtcatttcaagatcactagctcaaccttccagaaacgaacggttacgaaagtattcaaagggcgtctcgggcttggcacaagtccctgtgccaggcaggacggagatgggggtgttcagtccccagtgtgcaaagcacccgaccgcgggtccgtctcacaggttggcgccgcatgggatagcggctgggcaggcgccctccggcccgtccgcggccgtggggaggatctgcgcggacataggacctggggcagtgaccttaacagcccctccgctgcccaggggaggcttgggatggtcacgggattgggatagtggcgtgacagtctccaggcggcccagggcggacaccgcccggggcagtggccagtccgcccctccggggcccgggagaggctcagccgcgcgtgggtccgcccttcccccggcgcctccagcgacccgcccgcagcgcatctggggcccggctcgggcgatcggccagccctacctcttcggtggccgtgggacagtaggagatgagcacgagcgtggtgaccacgttgacggcgagccccagcagggtgatggagttgggggccatccagagcgggatccactggagcagccaggtccagtagagctgcagcggcggctcgagcagcgagacgcccgccgcgctgtagcggtgctcctccagtcgccgcagctgcgccgcgctcagcggctcgctcagcgccctcagccagcgcggcgcggacccggccccggcgcctgccgccatggccgcctgagggccccgccgccgccaccgagcgcagcccgcgcctggcgctgggggcagggagaggtggagggagaggctggcggccgggtcctgcgactgccgggctggactcaccggtcgggcccgcacggcggaggtcgaggtcaggccggcctgcccggctgccggggccccagccccagaagctgtggggccgcggctgcggctcgcgggtggggcggggcctcggggaggggtccggctgggggcggggcggagggggtcctgctaggggcggggaggcgggtgccgcgctcgcgggtcaccctcggcgcccgccaacggcaacttgttatcggcgatcaaggtccttgactccccaggggccggctgcactgcgcctgaggtctgatgtcttaacccacggcgtcggattacgccctgaggtcgtctcctcgcgggctgcaccacgaccgagccggttcctctcctaggggtcggaacacgactccggtcgcccagtgttagccactgcaggaccacgctgcccgcagagcctgggggttttcgtgtgagaacacagttttgcagggctcgggtcacgggggtgacggccccatctgtcctgcttggtaaaacacacaagcacaattctccctttctgtacggaggaaggcggccctgccatgtattcgctctagagacccatcactgcggattcagagaccaaggttttgaaactgaaaatcagggcttagaaacactaacaaggagaccgaatggctgaaaccccgatacctattttcttcagcgcatttgataccaacaagggtgaatatttttacacatactcttccctggaataaagggcaggagtgtcctccccctgcaagggggaacaggctggcttgccacacgcattggtaggtcaccggccccttatctcacagtgcactcacttggacaggggacatctgtcataaacacgttctgttgcacaacctgagacaggcctgtcacttgctttgctcttcacttcatggctctgatctgcacgcactttctaaggcctaggacaagccagaaattgcttccaagacacttgtgtggcgcaacctctatcggcaagtgcagtttgcctcacgggcttcgtcaaacacttggcacaggggtccacgaactgctgcctgtgtgccagacccagcccaccacctgttttcctacagccctccagctaagtatggttttgacatttttaaatgattggaaaaaatcaaaagaatacaattttgtgttgtgaaattatatgaaattcaaagttcagtgccacgaataaagccatgtttattccttacctattgtttggctgccttcatgctacaagggcagcagaattcagttgtgacagaccgtatggctggcaaagcctggactatgtcctactaggccctttaaggaaaaaactggcaaccactgccttagagcaatgagggtctctacagaccaagcgtatatgtcttaggaatatggatctcctcatctttagtgtgaaaaacgatgctgacaaatgcaggaaaggaaatggaatgatggagatccacttttaacaatgctggtttatgtgcagtgaacttgacagtaactactttttaatttaccgatgccatgaacagtccaaggaaaaaatccttttctagattagccgatttcactgtattaaagataatttttaatgtacatcaaaagacgtcatcaagagaatgaaaagacaagccataaactgggaaaaggtatttccctcaaaacccacaatgagtagaacccagattatgtaaagaactcctaaaaatcaatcagaataaaaaataatcaactgggctatgttctgtttctataggagaagccctggaacatggtaatgttccagggtgcacttatgaacatgagtgaattgcacaagcatatgttgactgaaaaaaaaaaagaagcaggtgtattagtcagcttggattgtcataacaaaataccacagactgaatagcttagacaacaggaatttatttctctctcacataaaagaagtacagaattggcactccaagactggtacgatgtttccatggtcatcaggaactcaggcttttctgtctctctgctccaatatcctctctgacttgtatctataaggccatctcatgattcagaatggctggtgaagctccagtcatcttatttgtgttt

SEQ ID NO: 916058 - DNA, 4001 bp, Homo sapiens
cagctttattcctctgccatcgacccaaacgcaggcttgatgaattcgggactgcgtctgtttaaagtgttagatacacagtgaaaggagaaggcgggaggcaaaaatgaaaaacaccaaccccacttccctggaaggaaatgcgtttccacctccctcctccttgcaattagaaaagcaaattattgctgtgactacgctgagaaaggcaactcggaggcgtagaaaatggatttctgagccaacgtggcccggcagggggctgctaagggagggtaaaagggagcaggggagccacggcttggcggggagacccgcgttacccggaaggcttctcggaacgttctacctgttgggcttcgcagccgagctgctcacccccggccgccgcgctcgagggcgcccctccctctccagaacccaaactttccctcgcacccctaggaagcgacgagcctcgtccctcccccagtccagatttcggacgtggaactttgcctgagccacaagggaccggaggaatggggttcattcccacgccgcccgggggattcccgttgctcggatcccagaagtgggggatgcaaacggacggtcagcccaggacctggccaaagtttcctccaaaactgcagtggtcaaggcgtgacccaggagctcggagtttccagctcagggctgggggctggagcaggccccggggcaccagccgcaaggtcactgcggagccggaccccgggggcaaacggccggcgcgtggtggaggggcaacgctgggcacccgaccactctccacacctgctcagctctgcgcggagcccgggacacgtgggagcccagtcccgggctcccagcctgctgcagggactcgcaacctcgccggggcgtacacccttcgcccccggcccggcaaccaggaagaggcggctcgcccgggcgcagagcagccggctccgggtaactctttcatcctccgacctcggcagcagcagggagggagtttcgttctcctcaaaccagcccctcacccccggttgcttcccacacctctccgtttccctgctacctcgcagacagacagacaagggacacaaagaaaaaaagaagaagaaaaaaaaaaaaaaaaaaactaccgcccctcctggtcccatcctccagcccggagccggtaggaagaagagggcgaagcacaccttcccttctcctccccatcccgacgcggtgacccgggtagatctgggcagccaggagctctgggcagccaggagccccgaagaggccgaaggcggagaggtagggttggaagaggcagaaatcaggcggagcgagctagagcgcgagagagaagaaaatatccaacaaaaccacgctaacgcgccccctacctgggtgcaacatactttggaaatagaagatgaccaggataaaggatcccaagcaagtggccagcaccatccggcagattctgttcatcctcatcacttccagcagcgctggcttcatggctttgtcctggctgcggggaccggggtgtccgggaagcgcgcccggggcgcaggagcagggaccccgccgcgcggaccggagcccgggaggcgcggggcagagctgagcaaggctcagagggaggatcggagtcgcttcgcggccgctctcggagcccccagcccgggcaggggtgtggaaggtgccggagttggtctggaagtgctgagatgcgtggacccgctggctgcgcgctcctgctcctcctcctcgccgctccgccgcctcctccgatcccgccggcggccgccgctgcctggtcgcgggccgggcggctggggtgcgagcggtgatggtggtgccgccgccgctgccgctgcgctggccgctgtggctgtccgacgggccctctcccttctctccaaaggctacttcattgcgctccaacgatctatatattccggggctgggttttaccaaatgcaactcgcggcccccggcgaggggagggcgcctgcggagagccgggaggagggagggaccctagcgccggggcggagcgtcgcgctccccccgcccctacccgggatatggtcgcgtccagctgttgcccggggagtgcggtgtgcgcgccgcgctcccgcagggtcccaaaagccctcagtccccggccgggctcggccgccgtctggaggttgtgtcagcgtttccatgacaaaacccggaggaaaaaaagacgaagaaaatcgcctcggtgctgccacccacccccgccagcgtttggagagggaagtggcaagcagcgggctgggtctcggagggaagaattaagggttagggggtttctggtggctggcaattatttaaaatccctgggcgacgtagcggggaagttgccccaaacccccagggagcgagtgcccattttccgacgctcagaactgggcggtttcgtttttctttcaaaggacagcccagcttgggagtcggggttaaagagggctgacttaaagtcagggttaaggaaactgcacgaccctcgggtcaggcgacagctgagctttcccggggacttatacagacagaatctctgacacccaccatcaccaccattcctcaaggcaaaagggatctgtgggttgcaaaactctgctaccccaaagggtagagcatcctccaaattattcaaaattaacagcagtcttagctgggagggggtgagaaaatgcccctaggaagccacctcaaccaagtccagaaaactgctggaaaagccaagccagccatagcactggcaggtacatggaaagatggtgctgctttcttgtattgtgtagaatgacttccagtttccaattccatgcatttaggctgtttcacaatcaataaagtggacacagccaatagtgtagggatcactcgtatgtcagggaaaaaaaaaatgttagttagactaacctttgtgccttatcaagtcattactaattcaattaaaaatgaaataagatactgtgtctttcaatgcctctcacaaaataggcatttgataaattcttattgaatctgaatgtaatgggccttatcctcccctcgatagacagagacacaacttgcagttagacacatgcaacaaaaaccacctgggcaacctcagttcccttcccccagagttctcctccagcagttgcatggtggggaaagtaacaaactcagcagccttgcctttgattacagaagacaatcaaagcacaatatttatgtagccggtgtgcgctgtattaatttggacttacctgtgaataagttgcttgctcaaggaagccaggctgaacaagcttcagacagagtcgttctccagtgattcttctgctctggtgataggagatcaggaatgggagttgcactgcaccctccccacctccccaccatcatcactaagaaaggggattccttgcagagggcatggcttagatgggcatttgcacaaagcctttgcctggaatataagtctctcatttaacacttggctttacagagccagggaggggaagggatttactcccaggtcacccaagtgacctctcacctcataggccaaagacttcagttacctgccccaaagcctggacatgcacaaggcagtttgggaagtcacagggtcaaggaagagatcagaagtccaattccctgtgagtcacagagatcatggagttggcccacatggtgggggaggatggtgaatcatgcccaacatccattcttgcattcccacaatcaggaacctgcccaaacacagtgaggattaaggctgtgacacataagctaccacctctcccaagaagtctttgctgttttctcacctgaaattgcaactttcctcctctgcgctgtgagcactaggtccaaacctcttttgggccactgtacccactaggctgaactccttcctggagatccaagttgtcttcatctctgtctctttctaatgcccagcacaatgactggtacatagtagg

SEQ ID NO: 916059 - DNA, 4001 bp, Homo sapiens
gaccctgtcttgcaagcaaccaatcaatcaatgaatgaataaactttagtacagaagtgtaaagtgtgagaaatatgaaaagatctcccttctaaggcaagttcagctatctacttctgcacagtgtcttttttccaaaagaatcagtgcatataaaactctaaatagagggccaggtgcagtggctcacacctataaccccagtgctttgggaggccaaggcaagaggctcacttgaagtcaggtgttctatatcagcctgggcaacacagtgagaccccatccctacaaaaaattaaaaaattagccaggcatggtggcacaggcctagagtcgacagaagaccttgtttcaaacaaaacaaaacagaatttcccctaaaatattatccctggtcctataataaaagcaagctgggcacggttcatgcctgtaatcccagcactttaggaggccaaggcaggtggatcacttgaggtcaggagttcgaccctagcctggccaacatggtgaaaccccgtctctactaaaaagaaaaatacaaaatttagccgggtgtggtggcaggcggctgtagtcccagctactctggaggctgaggcaggagaatcgcttgaacccaggaggcggaggttgcagtgagctgagattgcaccactgtactccagcctgagagactgagactctaaataaataaacaaataaataaaagcaaaggtgagtgacaaggagattccaaggacacacacaggtgagcaaagttggcagggtaggctgttacctggaagaacagattcagcctggaggcccggctggcaatgggttcagcagcaccagcatccaaaggattccgcgctccatatttgaacttcaacatctccccactggcgctgaaaggatatcagaaaagtcaagtgtgtcctatgttttgagcaggaagggcctgagagatcctgatctccctcaagatatcagggacaaggaggtgaaaatcagctaccactccagttttaggaagctcagtctaatcatggagattaaacaccagattttaactcactgtgacaggagatgatacacttatctgacatactctcttacttataaatgtgtttattatctccccccttagaatggaagctccacaagggcagagatgtttgcccccatgcagtgggggcacacatagcctggcacacaaataggtgcgaatagttattaaatgaatgactgaaataagcaaaatatatagcttgttgtaaggtgttaagtgctatggggtaaaaacaaaatcgagcaagaaaaggacaatgggggtgagatggtgcaatttttagtgtggtcaaataagacttcactgagaagccaccatttgacccaagacttgaagacctgaagcgaatgaccagcaagccatgttgatatctggggaaagaaagacatccgtggcaaacgaaacagccaagccaaaagcactgaggcaggacctggcctctccagcaacagcgaggccagacggactggagcagagcgaaagaggcgggggcatcatgaggtgatggggtgggcacggggtatgaatacgctgaaacagagaggttaagtaaatggctaagttcacgcagataataaggaaccggccgactacactgggcagaataatgcagttagtgctgacaggaggcagagctgaagagacaaagcactccgcctggtttaggggaggagcaagcctcctgccccagcaccactcggctgacccctcggctcccaaggaaggtgggcgcgcgcacagctagccccggaagaccctccaggcctcccgcagccctgggggtggaatcgccgccctccccggggcgggagggaaacccgggacttgtatgggtggaggcggccctcccctggccttgcagagccgggtgcggtagaattgggtctgggggatcagactcacgctctgcgaacccccaggtctgcgatctgttccgccccgcgcctcccgccgccgcgtttgaacccgaggaacggcgcgggcgggtctcagccgtgtttggaccaatcagcgtctccgctcctatgatagacatgggcgtctcagccaggccccgcccatgtccctaaaggcatggaggaaagtgaaggggagagccaatcaaattgcatcttcctttgactcgcgaccaacgggaaaaagggaagggcaaaatcagcagggcaggtcttggaagtttgaaattggcggttacgcaggatgctgcgtttgaggacgcgactgttaatctaggatccctgaggaggtcgccagggcgctgtcccctgctctcggccacctgcaaggaggaaggcagccaggctgctctgcctggtcttctttctctctcatgtggctaaggtagaagtacttgttacctggggaagcccagtggtcctctgctacagctgaggcagcgaatgttttgagcttgacttcaacctaccttgattactctatctccgggctgactgccctgcaaggagttggtgacagtcattgagactgtctgaaaggacactttaaaataaattatagacgagatacttaaacaggcacttcaccaaaaaggaaatccagatgaccaacaaatgtgtgaaagttgtcaacctcgttcataatcagaaaatatgaaaaataaagtcacagtgagaaagaataacactcaaattcgagaacaacaacaacaaaaggatgtgacagtgtttgcgaagatgtggaagtacacacacttatacagtacccgtaggcgtgtaaatggatacaatctctttgaaatttgaaaaaaaagtttggcattatttgctaacattgaagatttgtgcattctatgactattgctaggtgtagtttctctacctaagaaaaactcctatttatttatttattttgagatggagtcttgctctgtctcccaggctggagtgcaatggcacgatctcgcctcactgcaacctccacctcccaggttcaagctattctcttgtctcatcctcccaagtaactgggattacaggtgcatgccaccatgcccaattgtttgtatttttagtagagatggggtttcaccgtgttgtccaggctggtcttgaactcctgacctcgagtgatctgcccacctcggcctcccaaagtgctgagattacaggccctgagccaccacgccggcgagaaactcctacttatgtacaccaagagatgtgtataagaatacaaaatagtgttcgcaaaaaactggaagtgatataaatgtccatcagcagtagaaaagacaaaattgtatattgcagtgttttcacaagcaatgaaaaagaataaactgcaactaaccacaatgacataatgagtctcaaaacaaggcctaatgaaggaagcaagaaaataacatatgattccattatgattccattcttataagttccaaaacaggacaaaacaaagcaacattgtttaaggagggatgtattaggttgatgcaaatcattgcagtttttgtcattgtttaaagtaatgacaaaaccataaagaaagcaacagccagaatagtagttacctggggttgggatggaggcctttcagggtgttggggtgctgctgtgatctatttcttaacctaggtagcaacaatatggatgtggtttcataatgattaaattgtgtgtatatgtgtgcacgcatgtgtgtgtgtgtatgttctatttatatatgtaaagtcctttttgtactctcctaattctacagtagacagaactggagatgtgttctctctctcacacacacacacacacacacgcacaccagcacataattagagctacaggcttgcttaatacacatttgttcttttttccttccccaaacataacttacttcttgttcccggggccaataatggatagctactatttatcaagcacctctttttttttcttttttcttagacagaatctcactccgtcacccaagc

SEQ ID NO: 916060 - DNA, 4001 bp, Homo sapiens
ctcaacaaaagcagagagcaacttggcaggacagacagcatgctgggaaaaggaggcagtggctccgggatcagaagtggcgggattttttgtttcagtcttgcaaccaactttcattgagcaatgacatagtggagggcgaataagatcaaaggggctgtacttggtatggaaaaaccacagaagggtggaagctaagcaccttcgccttgagagttgggtccatccatacctgaaatggacccctgtggacccttgacgaacagggcagtggcctagacattctcgtgtgtctgtcactcaccagctggggactttgtcaactcattcctctgtctaaacctcaatgttctgctctgggaaatgaaatcaaaactgttagtcctccctcccagggtagttataagaattagataatatgtgagtgagtaagcattctaaacaccatataaatgtggctagaagtattattcaccagtatgatctagtatttttggccctcctcttcccctaaagcggaagtagggccgggcgcagtggctcacgcctgtaatcccagcactttgggaggccgaggcaggcggatcacttgaggtcagaagttcgagaccagcctggccaatacggtgaaactttgtctctactactaataaaaaattagctgggtatggtggcacatgtctgtaatcccagctactcaggaggctgaggcaggagaatcgctggaacctgggaggcagaggttgcagtgagctgagatcgtaccactgcactccagcctgggcgacagagccagactccctctcaaaagaaaacccaaaaaagctgaagtaggactacgtcaaaggcccacctgggcaggctggtccaatacaggacaagggacctaaagatagatggtatttcatttggacctgcaaatgagtaagaatgccagctccgggtctattaaaaaccccgctcggatgtctcccacaggcagagctgaggtggggccttgcctgaggcttccagggatgcgctggcttcccttccaacctccttttcagacagctctgcccattcagcggttcctaatgcagaaagaatgggctccccggagcctgccggcttccttacaggtcaccgctaatgccctgtgacaggcccttggcccaccctgccaggcgggcctgggcatcctcgcggcggcccatccctcggggccgattcctccgcagccattaacaaagggggtctggggactgcctcggaactagggggccgcgtggagtgggatgtctaggccagggcccgccaaggaggagcggccggctcccgcctccgggcctgggcaggcagcgctaggggccggtcgggaagcacgaaggagcccggccgtgggtccggaggccgcagtcgatggggacagttgcggggccgggggtacccaccttctgctcgacgccctgcaagccctggcccagctcctccctctgccgggagaagtcctggtggctgcgccggacctgctggacctcctccaggacgtggtggacgcaccagcccgagaaagcggccgccgccaccagggcgaggtagaagagaaagttgagcgccctgccgagcctgcgcgagcaggacgccgaggacgaggcggcggcggcggcagcggcggcggaggcggaggaggaggaggaggacttgccgccgccgccgccgccgccgcggtggccgcccttgccgtgcgcctggttctgcgggtgctgctgcgggtgctgctgcgggtgcggcgcgggcggcggcggcggctgctgcggcgccggcggcggcttcttcgccacgtcatccgcgccgcccgacgggtgggcacccttctccgaggggctcgcggcgccgtggccgcccttggagcccctttgtttggccgagggcatggcgggcgcggcggcggctcgggccgcgggctgggaggcgagcgagcgcggcgcgcggcccgggaaacttgcaggggctcccccgggactgggcgagcggcacgcgggcgctgctggcgtcggagcggcgagaggacgcgcggccggggaaggaggccgggccgaggaggcgggaggagggggcctgcctccgccgccgcggcgccgaccccgcctcccggtaagggaggccgagcgagccgagccgggagagcttgccacgcacgccggcccggcggcccctcctccccgccgccacgaccccggagagggagggccgggcggggtctacgggggccgggaagccggcgcgggggtggctgggcgcggggcggggtcccggcggggtctgcggaggccggggtgggcaccgaggtggccgcgaggggaggggagaagagcggagcggaggggaggggacgcggccgaggtggggctggcggcccggcgggttccacgcaggctgggggcggagggccagatcgaccccagccggggcggccgagcagggtccacgggggtcggggatgggcggccaggcggggtcggagggacgaaagccggggtgaacctgcgccgcgggccaagcgcgaccccctcccttcccgacctgtgcggagaggagagaaatgaaggggggcgcccaaggagccctggccccgggagtgggagtcagcgggtgggaacagatcgcccttcctttccgctgggaattgggggactccccctgctttcactctcccagcccgccatggggttgggccttgtcctttgccttgggtttgaaggcggagacaaaaaaggctgtccaaaatccagccagcttgggaggcatggttgatgcgagttagcaaagattctcgactgtggtaagtctgttcaaggggacgcattcaccaagtgtccccgttagccaagttagcctgctgtggccagctctttactttttccccccgaagccccttcagctctgttttctctttcggggtcatgaagtttgtccacggcccctactcctgacagcctctgggatgggtgctgcggaggcagcagcagccacacagaaagaggcagatcagcgttgtcacccctacttttgtaaaaggaaatctggtattgccaggctgtgtggttagcgactcacatatgttctcgaaatctcacaaaagccctgtgaggtagaaattattttacccattttataggaaggaaattgagactgagcgagccggcttcggattggctcaaggtcacatatagtcatcattcgaacctcactcagtctgcttctttctgaagtctgtgcagcttaatcacttcagaatgggaaggaaacgggggcccagggaagttaagcaacttgcccactcactcagtctaattggtgccggggcagggacagaactcactcaattccactgctttccccagtttctggtgagtgatgtgtgcctggcactgtgtgcacctggcactgtgtgtagtaggaatgctgtttcttctgtctgtaacctcctcccagttctgtaaacaaagacaaaaccatgccctgcccttaaagcctatagggttcaaatgccacctctttgatgatgctttccctataacaccatttgatacctctcatgggacttagcaagtaattgcaacgagaggcatatatgttagttcaatatagcaaacctttgttgagggcccactgtgtgccaggtatgtctcccctccctgaggactggaagcaaccatagtttatatttctccttctttctcgctttataaggtgttgctaaaagcctccagtgaatgaatgaacacttgtgtgcctgccctcaaggagcctgcactacacttggagatatatacagaaacctgttgagggctaacttaggtaaattgggaacataaatgtaaagagatttggaaagcaaaccattggcctgtacatgggcaggctttgggggcagaaagaccttgagcagtgccttgaagaatgatttgcatatgaggagagcagggaggatatttctgtggcggaaatggggtgag

SEQ ID NO: 916061 - DNA, 4001 bp, Homo sapiens
gaccccccatctccgtcccagacggggtggctggccgggctgaggggctcctcacttcccagtaggggggggcgggcagaggcgcccctcacctcctggacggggcggctggccgggcagggggctgacccccccacctccctcccggacggcatggctggccaggcggggggctgaccccccacctccctcccggatggggcggctggccgggcggagggctaaccccccccacctccctcccggacggggtggctgctgggcggagacgctcctcacttcccagatggggtggctgccgggcggagaggctcctcacttctcagacggggcggctgccgggcggaggggctcctcacttctcagacggggtggttgccaggcagagggtctcctcacttctcagacggggcggccgggcagagacgctcctcacctcccagacggggtctcggccgggcagaggcgctcctcacatcccagatggggcggcggggcagaggcgctccccacatctcagacgatgggcggccgggcagagacgctcctcacttcctagatgtgatggcggctgggaagaggcgctcctcacttcctagatgggatggcggccgggcggagacgctcctcactttccagactgggcagccaggcagaggggctcctcacatcccagacgatgggtggccaggcggagacactcctcacttcccagacggggtggcggccgggcagaggctgcaatctcggcactttgggaggccaaggcaggttgctgggaggtgtaggttgtagtgagccgagatcacgccactgcactccagcctgggcaccattgagcactgagtgaacgagactccgtctgcaatcccggcacctcgggaggccaaggctggcggatcactcgcggttaggggctggagaccggcccggccaacacagcgaaaccccgtctccaccaaaaccagtcaggcgtggtggtgcgtgcctgcaatcgcaggcactcggcaggctgaggcaggagaatcaggcagggaggttgcagtgagccgagatggcagcagtacagtccagcttcggctccacatgagagggagaccgtggggagagggagagggagacggagagggagagggagagggagacggagagggagagggagagggagacggagagggagagggagagggagagggagagcgctcacatcctgtttttttttttttccttgagacagggtctgacagtttgatttttaaaggccaaatctctccagactccaaagaactctgtagccaaacagcagcacatactaatcaggcctgcctgtccttagagcagcagcatagaagcctggagacatggacttccatcccatattcacattcaacagcaaaataaatccaaatataaggcagtgctacaattcaaagactgtctgagatcagatgagattgggcatgttcagcgtgatacgggtagagatgttccctcactccactggcccacagccacatgcagaccaaccctgaagaatacacccaagcggtctgcactcagatcaaaccctgatctcccacaactacatcaacacacaaacaaccaccagaatacaatctaactgctgcaacaataagcaagtcccaagagagtccaaactgaaacagttgagttgctttctccctgtttgttgggctagttcaatctgcaaatggagattccttcggaatttctcaaattgagaaaagcagatcctgctgtctggacccacaaatgacactcacttatccagacacatactcaattactaacaagccccaagagtgtctgaactggaacagtcagggtgcttcctctctccgtcagttggccttgctgaacttgccaatggaaattccttcagaatttctcaaattgagaggagccattcccactgtcggtatccacaaaagacactcacctatccacatgcagaagtcaaatttgaaaggctgttcttcctaggcaatcagaaatgtggttggggctggcagcagcaatgctaaatagaaagactaaaacccacatcctgcctaaaacacataggctgctgcttagggttgcggaaattctcccaactggtgacagccaagccaagagcaatgtcttcctgatgagggaaccaaaatctgttactgaaatgccagaggttcagcctaggtcccgttactcattgcacagaatgccaatcactgaggcaagtatttccaggggagatgactttattcagttgctgcagctgagaagaactgcagatcagtctcaaattcatctccccaagtgactgaaattgggggtttacatagcagaggagggatgtagctacgtgcaggaaataatgtagctatgtgtgggaaaacagaatttgaatttcaggtaaaaatgacttatttttaatgtaagtattgctcatcaatatttgtatttgctgtctctgcaattatctgtggtcgattgaaattcaaatttaactggaaatcttgtgtcttaatttgttaatatggccagcatatccataagcccattggagtggattggctgaaaaagatgaagacaaatttgtacaggcagcacacattcttttaatgagaagagtgacttagtctcaccacccaccctaaagtacactctccccactcttctacataccttgtcagtcaacctattcaccacccaatcccatgtttttcacagcatttatcaagtatttcggtgcccggttaatattttccagatggttgagaggcatcaggatattcattatgtttcttttatggactaattgcctgctactctaagtcaagtcacagaaagcttatggactgaagcaagatcgcagctactaaggtttctggaaagtaactttgctagtaaaagaagcttcataatgccttcgatggttatttatgttgtagcttgtgtcagaatgtccttcctttttaaggctgaataatattccattgtatgtatatatgacatatttttattccacccattgatggactctagggttgctgtaacctgttgttagcacaaagttctaaattcagactgccgtaacaacaataacaaaaaaactgaaatatatgcacttatacaccaaaatgctaggtctagttgtcactttctctgcctctttaaatttttcagggcaacaggagatttgatggggaatgaacaccccacagctctgtgcaggagtgcctggaagtgaggccagtcaagggaatgctgccagacaaccaactcagcttcagaccatcttcagatcgtaacccaccagggactgtgggctttgccagaccacatttttggttactgcaactcaagttggcttctaaatctcaaaaaatgtgacaatgatacagatttttttatctacttttgtctaaaacatttaaatactcattctgaagtaactcatctcaaaatccaatgctagaaaaatggaaataattacaggcagatgcaatgatttaaaggtttaaaagaagctgtccattctaaagagtcagaggaaacctttccttatgaaatggttaatgaaataaataggaaaaaaaaatccaacacaatcacgaggttccagaaaacattgtatatttatttaaaaagtaattttgtatgaatgaaatatttcttaaggttctgcctttctttccttccactcaacaggaaacaaaattactggatttatggtcaaggaaaatcactaacccacagccctcagatgcactcatgaaaatgggaagaatgcatacacagggatcagagaacagagaaacaggtgaatcttgtggttggaaagaaacgcacttttgtatgtacacacagaattaactttacttttccactaagctctctctgagacttagaaatccctacatctgggtaggctggagtcaatcccaaggcttttatggttccttgaagtaaaaagagcagtctcatgtcagaaatta

SEQ ID NO: 916062 - DNA, 4001 bp, Homo sapiens
tgatcttagcttactagagcctccaactcctggactcaagtaatcctctttcctcagcctcccaagcagctgagactatgggtgcccagttaattaaaaaaattttttttttatagacatggcatatctctactttccccaggctggtctcaaacttctggcctcaaataatcctcccatcttggcctctcaaagtgctaggactatgggtatgagccactgcacctagccagagctggagtttttaaggaaaaattaacacacattgaagaggagaagtgtaagagactaagagtagacattacataatacaatgttatattacataatgtagattctaagctcgataatgagaaaattagatgagattaagaacatgaagaagacatggattcaatatttccgtgaattcagggaattcttgtggtgggaacttaaggtggattggcaggaaaagaggtgggaaagggtgtgagaggacaagtaaagggcaattgttggtaatattaggctcatgatatgcccattctctttcagtgtataaaagaagaaatataaacaaggaaataaagacagaaaatattgtaaaattcttaaacccttcttctttctaaaaaaaaatttcagtattaaaaaagaagccaacagaattaatctgctatcctttctcaagatttacaatgctcatcataaatggatccaagatgtaacagtgaaatttctgtttatagcaatgctagaatattaaagatgttatattctgtgtggggagaggagagaggacaacaacttaaataatatgtgagaattttggcactcttctctccttatttttctgtttctatcacccttctttgtgttctccactatcactgtttaagttatttttaactcaaatacactgatttaaactatggattcgctagggcagatttcactcccaaaaggctaggagccagaaggcaagaaccatacataataggaaaactataggattctgagtaagatgaagagtagttttgtttaagtgaaagtcaacacagatggaccacttatttcatgattttaatttgaattgaaaaatacaaagttacttgatataatgtggttttgaatattatgaatatattatgtcttctgatatttctttacctcttttcttcctttattccttaatgattcatttcatttaacttaacatgttttattttttagtaagttagtaaaaaatctccaaaagaagtaggagaaattttagggtgatttatgcttagtttggtagatagtcaaatgaaatcctataaaggtctctctgtctgacacaaagcattttcttataaaaaaaaaaacacacacacacacacacatatgaaatcatgactttcctgaacatgtttctttttccatggcttcatctcataaagaaataaaatcttcatacaacccaatcatttgaaaaattctgtcccaattatattgagtgtgataataaaaaatttcaaaaatgtaaaagattgattattcaatgcagagataagtgtttttacaaaacccttttttctaatcattttgttcatacactttttgttcctttgcttaaacataagagacttaattgaaaatttaagttgaatagtaactatatcactaatattgaagatgcaagtctataaccacttctattatacaaacttacaacacatccataactcaaaatcttacctttttccccaaatttgccaatttctgggattttttccatctcactggagttctggaattgaagatctgcataagtaacttcttcagacattgatgaatatgtaaagaaatcttgacaaagtgtaaaaacacaaaaagatgagtgagttaacagagctgaatgttaaacaggacctataattttaaacttctgtttataaacggaagcttaagcttacaagtttaaacttctgtttataaacctactgtaccaatcacccatatgtctgcaaatgagccaaatctcatctgtggcttcagttaagaacattgaactgttgcaacagataacatctttcttcctcatatttcttcctttttctcaatttctatatatttaccaactacagaaagtagtttttgaaattgtgtttggataacatcatcagtgtcatgcaagagaacacaaataactagcaccacatggtgcagacatagtgtaggatttattggtgaaaaactttcaagcagaaaaataacagaaaagatgcagttctcagacactcactaatctgcagctgtggcctggcatagatattccttttgtatgatgatgaaggtcctgatagaagggttctcttcactgggagactgaacatacagagagcactcccaaggagaatgagacagttagtgtcattccgttgccatgttacatagctataggtttgcctaagagaggtagggaatgcctagtttctctaaataacaatatataggttggtgctaaagtaattctggtttttgccattaaaagcaaaagtaattgtggtttttgccattaaaagtttacaaaattactttagcgccaacctatatattaagggatctgatgcccagaaaccacaccagagagtatgcatactgatggccaaggtctgtatactgagggctctggaaacagctttgcaggccaggaaaactataatcagccttgctatctctctacagactgactcaaccatttgatctcctcctcagctaagctatcaaaagtgggagggaaatgagtctccaaagtccagatttgtgtcttattagtttgactcaatagtcttagtattttttatttcacttcttgatcaagaatgcaagtggaagtgagggggtggagaggactgtttttgagcatgttctctaatattcgttagtaaatcttactttaaaattcttcttgacattgccacatgtaaatcataaaatggttaggtattattattatacatatgaaagagaatgcataaatatttttaaaaatcaattaaaaactaattgctttattatgtcaggatagacaggaaaaacaaaatgctccctttataagagctactaaaaataaataggaaaatattacagatagaaattaactagatatttgcataaccaaaatgaacaaaaaaattttaaaactattgaagaaaagaaaaaaatagaaaaacatgctgtgggattagaagcgtcaatactgtataaaaagaaactaaattctcctaaatgtatcaaaaattcaatgtcaatttaattaaaacaactgattttctcctgataaagaaaaagctattgaatacatttgaaaatattaccatgaaaatattggcagccacatttaaaggaaaatatattcaaaacatgattacttcatcctaagtactttactaatgttgcttttatctttacaactctctaaaccaggtgctattattatcacccttattttacagatgcggaagtgagttgcaaagtggttaagtttgtatccaacatcacacagttggtgagtggtagagttgagaccatcaaagtctctggttgccttgttcaaatatgtgcacaggctataaggcctctcctggtgggaaagagtagccctctatttttcctaggtggatcaaatatttgcatataaatatttgtttataaatatctctttgtttgtgaaaggatggaaaccggccaccacacaggcagagtcctgttctgtgttctattgctctgctgtctcatgtggaacgttgtttcatcaatcaacactagaagatgaagcgtatatgacgaactgtaaagggaaacaaatgaaaaatctcaaagtcctgtttgcaaggtactctattttgttgaaaatatttgaataagtattacttcatacaaaatccttggtttagagccagctaaaacatttatatccacaagaataagctgagctctgagatgactacatggtttgcccttcacagcctata

SEQ ID NO: 916063 - DNA, 4001 bp, Homo sapiens
gtgcaatgagggtgccatccttgtttcccctccatttctccaccgctctccttcactttaagaggaagcttcgttgggggaggggggaggcatacctttaggagatatacctaatgctaaatgacgagttaatgggtgcagcacaccagcatggcacatgtatacatatgtaactaacctgcacattgtgcacatgtaccctaaaacttaaagtataataataataaaataaaaaggaagcttctcctaatttcaaggtttttgttttacatcattgcccacttttcttcctcaagtttattgaattcataaatgagagatctaaaaactgcttttctggatgatgctgacagtaggagacacctcaagcttttgagctcaaaagtctctataaggcacatgttctatctgccttgtaaaagtggattcgactttttaaagtatcttttacctgttaacaataacttatctattattcatgctatttatcacctaataaataatgaatgaatactgaatgaaagaaggaaagaatgtgcagtctaacctacaaacagcagaatagaccagaaagccgttagcatcctagtcattgttgttgtttaaaatatcaatggttgtcatgttttccttagcttcatatcccttgatttaggtccaaataacatctagcgcaatgttttagatacagcatgacagactctaggtacactgtgatatgcaccatatccacacctcctttttcctcacaggttagaattagaattaaaaagtaaaacaaaacaaggcaaaaatgtgtaaccacatttattagacatatgcaaagtctattcccatcggctttttgtaaatatccttccctcaaatgtcatgcaccacacaaaatgtaaagataaatctagagggcaggagaaagtagttcagatgactgacatgattcaggagaacctggatagttaacatatctgaaaataagagatgtggtcttatatattaaatcagagtcttgaccatggagactgctatttttccaattaggcataagagaatgagctgaagaccagcactgagactgggcttccccacatagcagttgtgtgagcttgcttaaattatctaatttctctcaccctcagttttttcatctatgtaatggagaaaatactaatattcgaatattattgtggattttcattacaattatatctgtatataatgtacataaaatactacccagatactattattactggttcaacattacaaattatgctcggatttcaactaccctaaaatttgaaaaaatactgacaaaagaaaaattagctctgatctatttctaatccactcactcatcttccagttttctcttaagtaacttacatcatctaaaagaaaaacgtcctctaccttctctattttagaagcctccaatctggtttctgaaagaatatcctcctggcatctctaacaaggtataaatatcaaggattatattcataagaagaaatctctaattccccaagctcaatttctggcatgtgcagtcagaatttctctgactgtgtgatatcacacaactttaaagaggttctgaaagccacatattttcacttcaaccttgggaacactcacttttctaatacattccacaactatttgtccccattttggagatttcacagcacatgtctttaacgccagtattaaagctggcacctcaaagcatttaacacctgtccactcccccaaggacacagctggtcttctctgaactcctacctctttttcttaggttatttccatctcggttattccttgctccagcagaatcctgaaatgtgagtgtcgcgtaggtcacttcttcagacattgtagaagaaaacgctactttaaattatctaattaatgtttcaatatcttgaggcctgggaacagcatgtgtttttcaaggctgggagctttgatgtagtcactcagctgacccagacacactctactgcccctctgtaagagaagaatgacaatttgtttctctacagagaaagtgagaaaagccaaatattctccttagagatattctcattagaatgttacagatctcaaactgtctgctctgtcagaactgtttcttgctgtgcagcaaagaaggggtgcttgaggcagagcaggaggaacatgagggaattcccatgatcctcggggtagaggatgctctgaatgtttcagaaaagagtcaggttgtcttctttacatctatctaaggctagctaatctgcctggagacattggttctagtttattctcagccacattagatattaagcagagagacacacattaagacagaaagagctgtgccacacacctggctgctattatagaaaattcaagcgtgtgtgtgtgtgtgtgtgtgtgtgtgtgtgtgtgtgagagagagacagagagagacagagagagagagacagagagagagagacatggtgttggtaatggagcatggagaagaaactgatagctacttagctacttaacgtgagtatgaatgggagtgccctcttctggcatggttgggaaagttcctaacagaacaacaaccatgggataatcctgcagacagcaaggaatacacaggacaagattttaaaaagataactaccggaagttaatacatctgtggtaatttgttacagcagcaatatgtagttaatacagaacccaggaaaatatggggggggagcgctatatatgagggacgaaattaaggaatctcctctaaagctttcctttggggagaggcagaatattagataactgtacttaggggaaggattgggtatgagttttgtggtttcagatgagtggggagtgatctaaaacttccaaggttcatatctgtgtggagattatcttagtcaaaggtgtccagcgtgaggtgcactcaccccacagctgtgaagcagatgcagaaaggcaatgtaaaaactttctctttaggaacgctgtgcatgatctctaaacacctaaatatacatatgttacttgttcatgttttttgtttttttttttttcaaattgatgaaataatcaaaaaaatgtttggaggctctaagtcatatatcaataaaactccactatcaaaaatattgaaacaaataataaatctatgcttatgtttactattctagttgaattcagaaaaggcagagaccattgacatgaggaccagtttaaatagatgattacaaaaataagaaattaagaatggttttctatctctgttctggtccgtgtccggagttggttcctgccggtgggttcctggtctcgctgacttcaaaaatgaagccgcggacctttgcggtgagggttacacctcttaaagatggcacggacccaaagactgagtggtagcaaggtttattgtgaagagcaggatgacaaaccttccacagcatggaaggggtcccaagcgggttgctgctgctggctggggtggctagcttttatttccttactgtcccctccatgttccgtttctgtcgtatcagactgaccttttttcaatcctcaccgcaattggctacttttagaatcctgctgattggtgcgttttacagagcgctgatcggtgcgttttacgtggcactgattggtgcgttttacaatcctcttgtaagacaggaaagttccctgagtccccactcgattcaggaagtctggctggcctcacgtctcatgactttcaccagattttgcaaaaactgggttttcatcctcatttccttaattctttcacataccttaaagcttcctaacaaagtattaacttctcactatccatgaaatgatgcttagcttgaacaatgatgaagaatgtcacctgattcctaattatttctaagagaagattgataacacttctcacatactttctattattatgatccaaaaagctatatcatctatcattattagtgtatgatcatattaatttagac

SEQ ID NO: 916064 - DNA, 4001 bp, Homo sapiens
catgaccccaaacataagtttgtgaaaaatgtatgaggttgttgtttttcattttcactatcttaattgtttggcatttttactatcttaattgtttggcatttttaaacacaaacatagttgttacgtcaattgttattgacaaaagtctagaaattaaatgaatgtgtgtgtgatttatttttattaattctaaaaaataaaagttgccagctcttaatggtatcacatcattatgttgaatctgaatcctccacattgccgaaaatttctgagtgatttctgctgttatttttatcagcgaaggtatatcagatatgtttatctaagaaataattatacttctatgatggtattcccctaaatgtttgtattaccataaaaagatgaaaacaagatctcatatatgttgcctaagataactatttccagatgatttcttccaagacaattctttgtaatctccacttctactgtttcaatatccatttcttacaaagaagctcccagatgttgcagctagtgttttatcttgctccacctccctctccacccttcaacctcagcagaacttatttgtacatgctgttcttaattatgctgatctctagtccttgacagagttcctggctccagtcaaaggtggaaaatgaagttatatacaagctactcaaaaccacagccgtaaaaatggactcttcgtaagtttttttggaggaaaacgctttgtatcctattacacatatcctgtggctacaaaagctgacatccctacttttgtcacttagcttcatttcaaagaggttggaaatccccaatgtcccttaacagcttactgggtagtttagttaaaaaaaaaaaaagccatattagtaggtttcaggtggagggtcatttaataaatagaaataaatagaaagtgaatggagggtttagtaggagaaaggaaggaaaactaaaagttatttgataaagaaataaggaacaggatagttttttttttttaaaggtatatccagatttacaaaggtgaagaaaacaatgatataatcagaagggaaagggcatattaaaacacaggcactgaatgaatgttaaaatgtgggattcctttcaacattccatttcttaagaacctaaagtgttcctttcagcaattttgtgtcagtctatatcagatcagacagacattcaaatattttacataatttatcattctcagtactcacaaccaccttgtaaaggaagttttattacttctatttaatattaagtcaagttaatatgaattaatatacttaaagtatttaaaacactgccagcacataatgagccctttatacatgtttgtggccgttaatattttataaataaagaatatgatgctaccaggatacttaaacaactcatccaaagttacacagaaggaaagtggcatacctggtttaggacctagaacctagtcctgtgtatattaccatgtgagtccttttcactagaactgaagtcatattttagctttagattggctgagtggcccaggaaataaaatccttctctaagtgtgggaattatggaactgaatataactgaaaaaaaaaaatcactactatgtcacagggcgagtaattggaaataaaattataagatgcaagctaaatatctccatttctaggagggatagatcatctcacacatttcacaaggactgtggtctatttggactccaggagacagggtacctgtgcgccggggctctggatgccgagttgtggcagagccttgagaatgcaggctcatggtggtgtccccatcatcatccagcatgtccctcgtgctgctgtacttggcctgcatctggattcctacagcggtgagagtgaaatgtggtcggattgccctgggccgccgggctactgtgagctagttcaggaagcaaggcactaaaaggcattcctaatgttctttcccagcgaggggcagggaaagtctctgactgcaattcctgactggacaggcccagcccctctcctgtgagcttgtactctgaatgccaaatcagtcaggctgaggggaaatagcatgtgttttctgtttaggccgtctcagtctaaacagttgtcaaaaagttggcctttctcaggtcttttttgtttacctgtttgcatttctcatgtaacttcactgtaaagaaggcaagaacttacaatagcacggtgtagcactgtggttccttcagagtctgcagaataataataacttggaaggacacacatccctgtttcttacccatcctttagggagtcacttagtttaacctctctgtgtctttgtgaaaagagaagagattataggacctagccccttcctttctccaagaacagagtagtggtctttcttatagtatctgaacttgattcaacattttatagcacatttggtacattatgatcacgaggaattatacaatttactggaagtaaaaacttttaaaactattactaaccaccatgtggtttggggaagccagttcatttgtgcctaaatctcctaaactgagaagaaaatgttttaggtaatgtgaaaaaattcttcctgaatcagtacattagaattatattcccatcttagtctgtttgtgctgacctacaacaggatacctgagaccagataaattataagcaatagaaatgtatttctcagcattccagaaggtgggaaatctaagatcaaggcactggcaggtttggatgtcaggtgagagctgcactctctgtagaggaggaagggtattctcacgtggcagaaagcagaaggtcaagccagccaaatgctacatgtagcgtcttttataaaggccttaataccatcctcaagagagaagacttcaaggactaatcatctcttaaaggccccacctctctcaatactaccacactggcaacacctgaattctgcaggaaacacattcaaaccataacaagacaggtatcagtaacaaccttgtgcctttgggaggacaattaacaatttgcatctacatttcctaaactgaaagacaagaagattgttttagataatgtctaaaagttcttcctgaatctgtacaatagacttatattactctaccaaaacttttccagatgttaggtgataggtgggcaaaatcaagcatgctaaatataaaggagtgtcagaatgctccagttggggtagccagaccatataaaagatctatgaggaagtgcacattgtggattcacatgtgtttcaagctgtttgttgttcatcaaattattctaaattttttaaaaattggaatttttttttttttagatggcagattggaggcagtgttagcatgactctaccacttggaaggacaaaatagtgagtaaaaaattctcactgtgggccagccatggtggtcacgcctttaatcccagcactttgggaggctgaggtgggtggatcacctgaggtcaggagttcgagaccagcctgaccaacatggcaaaaccccgtttctactgaaaatatgaaaattagccgggcgtggtggcgggtgcctataataccagctactggggaggctgaggtaggagaatcacttgaatccgggaggcggaggttgcagtgagccaagatcacaccactgcactccagcctgggcaacagagcgagactccatctgaaaaaaaaaaaaaaaaaaaaaaaccttctcactgtgaactcttttcccaagaagcaacacaggaactgaacaggaaaactgaaagaatccacagactctttgaaagaagcagcaggttatacctacaccatgagctaggtgaaaaactgtaagctcccagggtgtgtgaggtgaagagactggctccaggatacatacccccacaggggaacctgaaagtccatgccatgggggaaggccttaacccgtcccagcactggaaccaattaaaagagcagtgatgaatataaaagtaagagcagcagca

SEQ ID NO: 916065 - DNA, 4001 bp, Homo sapiens
taataatttgtaattagaaccatagaaatgatgcaaaggtctgtcattgaattttcatttccttaactttgccaatatatgaggagtttactagatacacatgattaaatgaatgttgaaaagtgtggaggggctataaagaacaaattaagaaatacacagaactgacgcctgagggttaataagtgaactgtttgaaggagacaatcacaaataaaaaatcccaacatcgataacatccccagagcctgtattcatttgcttgaatacaagcttctcagctgagttatagaggtgaatgacctcttattttctgttctttctgtgatgccaaactattcattcatttaaaaatacatactgatttcttgttatgcttaaagtacttgtgatattcaggtaaataataaagaaatacaagaggataaatgttagattctaacatcttttaaaaaaatcaacaaatacacaaacaagcaacaactacacagacttcaatgtgctattggagggccatgagaattacagaaagaagaaatgcacagtaacttagtaaacaaaatgagaaacagaaaattttaggtagagagaatagaatgagaaaaatttcagacaagggaacatggaatttatatatgaaattgaaaaactccagtttggctggttcttaggaatgcaagataggaaaagggatgaaaaagtttttaaaaatagtttggatccacactgaggagggtcttaaaggccagtagtacattcttaaaaataacttttcattagttaaaatcttaaaatcttattttaatcacaaggaaacagtcagtgttctcctttattgagattctcttggcaactatctgtaggacaactgtagaagtgataaacagacaaatagcgaccattgagaagcttagtgggatatgccatgacccttcagtattaccttcctccagtcaaatttctggcagagtcaacacttacaccaaatccccagagccaccagcccgacaaccatccccacgcacaggatcagcagaatcaaagccatcacacgccaccaggaggaggatgcagagccaactgtaggcatataataaagacatcaaggagcaggcagtatgggttagctatggggaaggctcacccctgcccctgcccctgccttctcagggtcctccaagtaatagaaagagctttgctggcagatctcacctgtgttctcctcatgatcatcaacaataggcatggcccacccctataccatacatccattctcatctccaatgcactttacctctccaagctgaaatattacttgctgttaaggcctgatgtgtttgtattttttgttttgttttgttttgttttgttttgttttatgctcacccatgccataaataattgctttaataaacagcaaatgaagaatcacactcatttgctcacatatagaaaatgaaatttccactcttttccgttatccccttgacttctatgccctcgagtattaaacgctcagaatcttaatgcaattttccctgcacatatattggatgtttgtaatctaaataggtctgtatgagcttatgaaaacactactcaaatgctttagagcattaacatcattcaagaaaaagaaattaaactatatatattatcaatagtagaaaaagaaagaattgaatcaactcattttttaaattaatttccaaattattggctctgagcattcttaccggagatgagagctggtttccgagttttaatatttaaggtgatgtatccatcttcatcctgcatggcttcccgagtactgcaactgagctcagagttcaatgactttgcaaaatgtagtttccaactttacaatttcagtatctgtcagtttatgatcttcctgtctttagtagggtagaaccatgtgagatgggacacatttgttttcctttgcttattgttttccaggaagcttcttcatagctgctcagagatacatggaccttgaacacaaaaacacaaaaataataataacttgtggtaaaggagtagataaggtatttgcttcctgctttttttttatcttcaacactaaataaagggacattccatcatgtgcatcctttctaagaacaaaagttcatgctttatcttagccctagcttagtctaaattacattgctcaaatgagagatttctgctgaaaattcatggatatagctcaccagcagatatatagtttatctcattgtgagaagcaagtgtaatataattggatctgataggggctaaattagctgtttcatagtcttgtgttggaagagatcattcctgattatgacctagaatttacacaacttcttgcatatttcatacttttttttatttgaaggatccacatgaggcaggcctgatattgcttagatttaggtattgaaggaaaactatcaaatcaagtaaaataatacagagttggtgacttgctgcattgttctttagtagtgtttgtgctttaaagtgagtttcctggaatggaagaattttgatttgatgaaatcacttcatttcaagtacagctgtgcttagatgaatatttgagactgaatggttcctagcaccttttcatcacaatataatatgtattgcacacacttaactttatgaaatgggcttttacattattttagcttgcactgaaagtagttgtaagaacagccatacaaagctagctgatgcatttattataggaatattggggaggatgttgtctattttgccatagggtaactcttacatagttttatggcagatttttatttttgttaaatcaccatgactagcaaagctttaagtagtaggcatttaccttataaataatttgaattctatttttctttacttagcagagtgttagacttttcaatatagtgattatgtgggctgcagtagcagatattttgtttattaacatgccctttggcatagcccgtagattttttctcccctgctatctccttcactctgaatttcttgtcaattcacttaaaattatctttcattctaaatttctttctctatactcttcaaattattttgagaatgaggtgaagaataagcataacacgtataaaagacattccctgattttggaaagccaaacttagtatgattcaaatatttttaccaaaactaattcttaattaaaaaaaaacacatttgaaataaatgccaaattttaagaaaagactaaaaatttttaaaaaacattaaatcccaacaccatttttgttgctgtgtttcttatctcagttaaaatattcaggggttcccaatcataagctgggtaaattcagtcacttaccattcatctaccactgcttctgttctcataacttctgtttcagctaaaagggattcttcgctctcccatcatttatcctcaggcttttctggaagattggggttggaatggggtttgatcctccctctcttccttcctttctacatctactcatcagcaagtcctgaggctattctgtcacagtaacccctgtctttcacgttcttttggtcactgctttccttcagtgttttgttacctaaaatatacagaaacactaaaaaataatcgaataaataactgtgacaaagtaacagagagaaaagaaaatgtgtggaggttatagtacaaatgacacttttccaataaagctttactctgttctcttaggtaccaaacaggtacatatgaaaacttaatttgttacattaaatcagatatgtaaaggtaagatccaaggacattgagacaatttttaaattattgtaaacattttttgtttattaacaaaaactttaagatggtattaaagagaacaattagattgctttgttgaggtttccacattctctaggacttgagcagctgatttcattataaaacatgtcccatgtatttttgtaaaccaccaggaatgtgccaggattagttcttgatcctttaa

SEQ ID NO: 916066 - DNA, 4001 bp, Homo sapiens
ataatgttttattaaattttaatatttgtggtttttgtgattatttgtacttttttgatattttctttattgtatcgtcttctgcaaacttttagacatctagttctctcgtcttttctaatagccaccatttgatttgttatccctctcatttcttctctttttcactaacgtctcctattatctcattttttaattttgtatatttttctttcactctattgtgccagatgcatgtttttttcttatctattttgtttgtacacttttgaagtttcagtttgaggtatttggcttttattagttttagaagttggaatattatttcttcaaatatttcctatccgctattctttttttctctctctctgtttcagattcttgttatctagaaggtggcatttctacttctatttttcatatctctcagcttttattttatattttctaactgttttcttttctgtcatgtttttaatagcatctcctaggtcttattcattcttaatcagcgtccattctattaattaactcctcaaagtgttctttatttcaaacactatatttctataattattattttcacttggtttttattgtgttcttggtgcttcttcatttcattaatatcttttcttttggagcatttttattatgctttaattaaattctcagactagatgttctaatgattcctgcagcccggctttctcataatcttccagtacatgcttcacagtacttcatattttgtcttctcgttatgcaatgagataaattttcttccactttttactctctaaactcttaaatctgttacccagacaagcctgactaatttatttggctaaagggatggaatcttatttctttttgtaatactaatgtccaattgtgtaaaatgtagactaatttttaaaaattttcttatgaagttttcatagatcaagagttcgtaactatgaccaatagttagaatatacaacgaagtaaatttaaccttaccctaaagaaacttctaaatagaacatccttaaattaaaatggaaagtcttctaagacagagagatattatcactgaaaacattctagtataggctgctagaaatgctgtagctagaaatcgtatggtagatgaaaagttttactaggtagctactgaggtctcttcaacctttaagagtatcaggcttacttattattaaaagaattatcccaattgccctgggaattcatatcagtaaactctgatagtggtttcagctggagtccttaactcatttcaagattttactttttatctcttcactgtctttatcttaaagttttggcaggcttcctattccagtcatttggcatacaattcattcgttttctttaacataaaccctcagaactattgtgaatggagggtgtttgtatgtgtaccttgtttttatttattggtttgtttatgtttcaatccactgaaaacaaacttcattgttggccttagctgaatcttaaaatttttgaaaagttcttttcagtcttatgaagtcacaatcatcaagcctccttccagagtgaagcatttgctttttattctgtataaaagtgttaagcaattttttccctgtgaaagtacattttaaaaatattcttattgagatataatacacgtaccataaaattctgccccaaaaccttcttacacacaagcttataccctctcttgcagacataaaactctacatgctctaacaggcttccacaattctccggaagtgcttccccatccctcacttactttagtagactttcacagtaagtaaagagtccatatttttaagctgtcctgtattttgttttatctttcctttacttccttctcattcactctataaaacttacctatccgatgtatgaagccatcagctctgccatcccgcagctctggattaatcatggcaaggcgctaaccgatggagatcagtaggagaggactagaaagcttttcatgtacatcacttatttaggcactgagcaagcttcagtcaaaagagacttaaccaatccaaatggaaaacatcagtactaattttagatcaaagataaaagtaggcagacttgttagtttaaggaaggaatttaaaaattaactcatccataacaaaaggatcgtaaagtcaatcatgtaaacaccacaacaaccgtgctatggaacatttccatcatctttctttttttccttgtgtaatcactatcttttctgaccctggaccctggcaagcattactttgctttatatcaacatagtttttcctttcatggaattttttttttttgaggcagggtctcactgtgttgcccaggctggagtgcagtggggaaaacttggcccattgcaactttgacctccttggctcaagcaatcctcctgccctacccacccaagtagctgggactacagtcgcgcaccatcatgccctgctaattttattttttgtagagactaggtctcattatattgcccagactggtcttgaactcctgggcttaagtgatcttctggcttcagtcacccaaagtactgggattacaggcatgagccaccacggccagcccctttcatagaattttatataaatggtatcatataatatgtagtgtcttgtctcttgcttatttcatttataatacttttgagattcactcaagttgttgtgcaggtaagtagttcattcccttttatttcttagtagtattcctattgcatgttataccagaaattatctctttgatcactagttgatggacttttgtttctagggtgggactgttatgtatgaaactgctgtacacaggcatttttgtgtgagcaagttttctcttggataaattcccagaaattgaattgctgcatcatataagtatgtttatctttataaaaagctgtaaaactggctgggcgcggtgtctgtcacctgtaatcccagcacttggggaggccgaggcgggtggatcatgaggtcaggagatcgagactatcctggctaacacaatgaaaccccgtctctactaaaaatacaaaaaattagccgggcctggtggcgggtacctgtagtcccagctactcgagaggctgaggcaggagaatggtgtgaacccgggaggcggagcttgcagtgagccgagatcgtgccactgcactccagcctgggcaactgagcaagactccgtctcaaaaaaaaaaaaaaaaaatttgcttcagcctggaatctttgcttttggtgcttcggtgcagagacagaaaacgggcactcagagtcacactggtagttgcacactgtatctgcagagggcgtgtctcatctgtaccccgctgggttacgggatttcaggaggtatttttgtccacctgcgaattccatttattacctttcatttaacagacaatgtctttcctttctgcagttgattttgctaaagaggcaattcataaggtgaggtcctactcatagtatgacttgctttctcacgacctccttccatttttagtaactccctggtctatttggtgtctgtaaaaaaagaatctggtaatggagacttcttttaatatggaaatttggcctggcaataacttattcctttccacatgtaactgacccaatctggtttccagatgacaagtatgcaagccccagatgttgagaagccatatttcaactgcttcctgcatctgttgaaatataattgttcatacttgccatcccttatgtttcttgtaacaatttgcacagttcttgccagaataaatgccattctctgtatgcttcagagaattccgcaatttgatcagtgtgtgtgtgtgtgtgtgtgtgtgtgaccttccgtaaaacacttctaaagggtgaaagctcttgtatggcatagacatgaattccttcctctggtaataattaggttatttccagaagcacagtgtcattttttttttttttttgagatggagtttc

SEQ ID NO: 916067 - DNA, 4001 bp, Homo sapiens
gctctctaaggaaagataagaaagatgcagagtgaccaatgcatttaaaatcaaacagaatattatttttcttggctaatagctatagaaaaaaatcataaaatactgataagcagagcaaataaaatatttgttaaaatgtatataaaaactgactgaattatatcacactgccctaaattaccgctattaaaacgatgttcataatttcagatatatatgtatctataatatatacaatattatactgaatatattattcagtaacttttaaaatatattcatatgtaatatgatatataatattgtattatataatgtatttatatacaaatgtataaatttatacaattgattgaaagtagaaaataacactggttttactagtggctggaaggccttcttaaaacttttgattaaaatgatattttatgctaccatcaaatattgatctcattccccgcaaacctgttttatctaactttaggcagaattataaaaccggttaaaatacgggaggaaggataaagtgtgcattctattgtaccacagcaataatttttttgaccgtagcatacgctggtaggttgacatttagttaaacgggaaatgcttaaagctcatcacagtccctaaatctctaaatcatagatcgttgtattgaatgcatttagtttcagccttttctctttcaaatattttgacataaataaaccctgttgaaatctcaaagatgtagcttggatcttatatattccgaacttgctatttaataaatccaatgttaccaggttgtttcatagtgtattttttagaacattttctttccttatccttcttagggttggtaaagacatctccatggatatcggagtactagcaattccttagtaagagtaggaaagggatatattctttccgttaagtactcctaaagcccggagtatctttacaccatccaataaagcaatctttaaaaatattagaactattggctaaatttatcatattatgtatgcattctgagaactgtatgagtatctggatcatatctatcatcttctcaagtatttgttttataaaatacttagtaaaaatgaaactaaatcttgagcagttttaagtcatggttaatccttctccattgtaattcaaataatgtaaagtaagtctgaatttattaggacaaaacagtcatatgcaaatctcaatcttgttataagaaggaattttctagtttcacaaaagaaaccacaaaatttaattcttttctcgaaggctttaacattctgcatcacaatttcaataaataacggtcattctaaacaaacaaaaatgttcttaccgtgcttcttttaatcagcgttttgattttctgctagcagctttgtgtcatgtcttgcagaaactctcttcaaagttgtaactttatttaactttaatataaaaatgttactcttgtttttacagcacagctccaaactagaggtataccacttttgaagagtaactcaaagtataaatagcattttgcaaactggaagtaaccatgtgactatctattagtcatactgttgtttattacaattttcttctcgtcaaaaaagaaagcttgccaaggaggaaggaagtttgtgatataacaatttaaagctgaagaataaacacatattttcttactttctcaactgggattctcatctgaaccacagaacacgaaattgctcaagtggctgtttttctgattcatccaggagtggtacttaaccacgtatccttccagaactgtaggagaggctgatactaattaattcaacagcattctttaggacattactgctttcttatcctgtgttaagaaagatcaccttaaaagcgatagaatcaaagaaaaagcaatggtttaaactttggctactgaaagaaaaacaaaaactattatctctctctcaaagacaaatgcgtgcaaagtcacacgtgtgggtgtgagcacacacacaaacacacacaaagacacacagagggaaaaaagaaaacgaaagtaacaaagtgcccagaacgttatcatcagcatacaagatgacaccattatgcttttgctaagttaccaggccacaattttgtcttcaaatctgctctaatcagtttcccagtgattttgtattacccctcaacaaatatattagggaggaaactgaggagaagaagccagtgtcccgcaagcggcttcgggattaacactgcatttgttctgagagagaaacttgaagaggaaaagcaaatgagaatagagaagaaactgtagtacaaaggaattaaaacaaagaaaatatgaagagaataagaaatacaggtttaatcatttctgggcagaaggaaaggacagataacaaaattgctcttttcatttttggacagaaaaaaaagacagaaaattcatgaggaaatgaatatattctacctttgttgttaacaaaagattgtatccaaagaactattagaaaagcatgtatagaaaaatatagagattactcaagtatggttgagtgaaatttagttttgttccaaaaaggaaaacagtcaagatacaacagttaagatataaaacattttcaacacagggaaatgttccccgctgttgctttgcagttcatcctcacccctgaagccaggcagcagccaacttactgtcaataaacatgagctttgctggttttagaaattcctgttaagcagaatgatacagttggcaattcttgtaagtctgatgtctttcactgagcataatgtttttgagttttatccatgtttttgcacagatcagcagttaatttctttttattactgagtagtatttcattgtacagacataaaatatttttatctattttataataaaatgtatccattatgacattgagctttttccacttcttggatatcataaggtcaaaataaacatttatgcaaaagtttttctattgacacgttttttaatcttttgaagaaatacctggatgtgaaactgctaggttacatagaaaatgtatgttttattttataaatgtatttttttccaaaaagttgtgccattcccaacatgaatattggatggttctatttgctccacataaatagcaatattagatatgcccaatctttttcaatttaaccattctagtaggcgtgtagtagaatctaaatgtgattttaatttgtacatctctgatgttatattgagcatttactcacgtgcgtattggtaactcatatatcttttttcaatgacctatttaaatatttttcccatttttatggatttatttgtttccttatggtgatttttaagattttatatatatgtaaatatatatgtagagaaacatacacataaaaatgtgtatataaataagtaaaatgggttgcaacataatatagaaaaattccatttttagataaatgtattaaaaatactttccatcatttgtatagtgacttttcacaattttttttctcaaaaattttaaaaatctagaagcttctaaacgttggactctctaatcctaacaaagttacatgttctcccttgtcgaggtcatgcctttttccttaaagaaaatattgtgcccttcacaccctccttacaggaatccctcccttacttgcctttcttagttattggtcataaggccaataactaaggttatgtgctaagcttataagggagagaaagggctatactcagaatgaatttggacctaaccaatatataataacaacagcttggagtgtacacaatgggattggattctgagggtgctagatcatgagagaaacataaagctggataagggagattttatcaacattagggcattcagttgcaatacagaatttaataacttggaaaaatactgtgaacagtgctgacatactgctgaaataactccaagaagattggagaaagcaatggctcacgctgagtagagtaacattccaga

SEQ ID NO: 916068 - DNA, 4001 bp, Homo sapiens
cactagaggtatggtctgaggaacagaaaagcaaactcctatctcaaatagagtgtgaaaataccacgtttattttttctccccctcttgtctacattctcatgtgcctcaaacctcaggcaatctgatgatggtaggggaaactacagcaacatgcaatagccaaaaccttgagaaaggttaatcctcggccgggcgcggtggctcacgcctgtaatcccagcagtttgggaggccgaggcgggcggatcacaaagtcaggagatcgagaccatcctggctaacacggtgaaaccccgtctctactaaaaatacaaaaaagtagccgggcgtggtggcgggcgcctgtagtcccagctactcaggaggctgaggcagaatggcgtgaacccaggaggcggggcttgcagtgagccgagatcgcgccactgcactccagcctgggggacagagtgagactccacctcaaaaaaagaaaagaaatctaaagtcaatcctttccattcagttgagctgtagctccatgagagtggggccaaacctcttgctttttttttcttctttctcactgtccgtctgccacatgagcttaaagatgcagctataattgcagaagtatatggttcatcagaataaaaggaggcccgcatttctagctggaggatggaaaggagaagcccctgggaacctgaaagtacgggtcagatggtgaagaggaagaaactttagaaagagacccatgaacattattcataaactcctggattcacctgcccctcaacttatgcatgcctagatatggttctaattggcacactaaagatgctaagacctgaactaatgagtagagcattgcacagttcccaatttcacccctggttgatgcacatgtctgaatagcactacaaaggctttcagaatggaactgacattggaaccagatcccacagattgtcttcatctcaccagggtgattgcttgctaaaacaatagtatcaatatactccaaaatttaaataagatccagtctaactaaatatttgttcaaaatgttcaaattacaatccaaaattacacagtatatgaagaaccacgaaaatgtcaacttccatggggaaagaaaacacaagccaaggaggacatgacagagatgttggaactatccgacaaacagtttaaagcatttggtataaaatgctcaaaatacccaatgaatgaagaaataaatgaagtcatttaacaacatttagagttcatctttttctgcctctgaattaccttttctccaaattgattaccttttaagttgggaggagaaaactccaaacttttaagtcctaagttataaaaccttgatattccctaactgtggcaaaagtcatttttttcacttactaaagcatcatataaagctatatatatatatatttccagtgcatccaatgtaacataattccattagaatgccctactaagtttctactcaacctttgttacttttttgatttgtaaatgtcctttacatactattttctaccttttctctcttaagagcttccatgataggttttctacctatgtaataatgatggtatcttgtatctgagtaacactttagagtttgtatagatttttttttagtgaaattaactgttattttcaatcctaaacttaaccttatctcattgtcttacatctttctctcattgttccctctccttagttgttagaactgggaatataaatatatgcatgttttacacaaattataagccaatttatggactcccacattccatctcttatccttgaaaactttttactagatcagcacctttcctgtgtgagcccatcactaccactaccttcccattccagtcctcacacttactctgtagagcccagcttcttacctgggtttgcaggcaattcagatggtgtaatgtctttctccacattgttactgtcatgcattttgcctccagtttctatgagtgatctaaaccacagtctctacgttttcaaccccaagaatgattcaaaacaaaacaaaaaaaaagcccaacgactaaaacgtgtaagtgtgtaaccgccccagtaactcaaaatgtcaagcctttaagttaaatatagctagaggaacaaatgaagcataaattgtttcaaaaatcagctcatcacaacagaataaactggtgtttgtaagaattttaaaaagttgaagctacttctctaacagtattttggttacgaaagaaactaatgtttgataacttaaaatttctttgactattaaaaattataattgtattttgtgcggtacaaagcaatattatgatagaaaataagaatttattgaaaggaaggagttggctctcagaggaaatgaatgttaggtaagtaaagacaacagcaattttaatctcaaattaaaattcattcccaagagtttacgctcattcaaaaaatatcttgttttcaatttcttcaagatattttgggaatttgctgctatggctgctacaacaacttttcaaaaatgggcttgaacggtgtgcagcttctgtgctccctctggcatgatccaggagcacagaggctctttagcagcaagagcttcttgtcagatgtgttgatttcttgtatataaatgccagtaagggcaccttttactaaaatataatttatagtaatgtgcacaaatcataagcatacaactaaacacattcattaaaaatataacatgtaacaagtgcctagatgaagtatatcttaaaaccacgtaaaacaataccaacacgctatgtgccctactcatgtcctgcaacgctcattaccccaaatacaatctctatcttaactctgacaacatattttccctgcttttgaattctatacagtagccccccttacctgtaagaaataagttccagattggacagctattgcctttatcaaatagaaatgaagttgcattaggactgagttccagtttctgtaagattttatatatctttttctttactatttcatcatttctagtttgtcctaggacctatgataaagccttctagtaattccatctgagaacctgctttttatcaaagctgcttctctttcttggaagttgaatttggttttgtctcctgaacaacatgtgattgccaaaagttcaagtctgtttttcacatagttcttcctaacctcctttcctgtgaaatttaataatttgaaaattgcttgagagaaaaatttttctcatttctttggccctctctcctctctgggggttttggtccttcaagtgctttaggaagagatttttctctcccccaaaaaaatgcctggtatccacagccctctccccagaatctcagcatctgacccactgccaagatgcccctaagagaagggtggctcctggaatgctgactcacttctctgtggcccctttccagaatcttcgttctgcctccagttgccttgaacactctctaatatcttaatgaaatcctttttcttcaattctaactcttctagttgttctcagcatgagtttgatgtctctccagttatattatcatacacagaagtggatatgaactgtcaggcttatcccttttatatccttttataatttcattgttagcttaaaggggacaaaaggtaaaccctgataaattgagatttccacacttatcttggaatttccacactaatcatcttggaatttccacactaatcttggaccttccagtgaaactactattacttttactgttactagcctggcatgacaacatgccaggttattactgcttactatgctccatacacattaatatgagatttaaatatgtgttcttatttaattggcataactaactaatgaggctgatattacctttatttttcagatgattttgggtgagggactaactaatatgtctaagttcacagtaagctatagaacccatgactgacagatctgatatgaaaac

SEQ ID NO: 916069 - DNA, 4001 bp, Homo sapiens
tcaacagtgaggcacaaagcagcttggggaatccggtattacttttgtgaggggcagtcctctccttggaagctgaagaagaagccaaattagttttatcagtaataagtttggtctttacttcctcttcttcctcctcctctttctctctcttttcttggatgacacacagttactaacggtatgacatttgaaatcacatgagaataggaatagaaaggatataataatattcactgtagaaactttaaaaaatacataaaagtacgaattcctacaattgaggataactgttatgccatataacttataatataccataatattttggtatatatctttctagcaattttttgaatgtatatatacacatatgcaaattttcccacgattgacataccataaatactgatttctgacctattattttcctttacactatatcatgaacatttttcataccattatattttcttctttaacactccttattatggttgcatagtatttcatcatatatttaaataatggtttccaactttaaataatgctatagcaaataaatctttataatcattcctcatcacatgtttagaataaagtcagtctttttagttaccatctcatggttaggaatcactttcttcgagttatgatattttgtcaaatgatgggggaaaaaaattcagtattatataatatgattacatttttagtaaaatacatatgcacattatatgtatttgtatgtggaaggatattcactaaattgcaaattatgattttctctagatgataagagtaattataattcaaatatctgtgtacctctggttaattttttctacaatgaacattaatacttgtgtaataaagaaattatataaagtttttaaggagaaaaaatttccctaagtgctctccacaccttcacagaggtattttagaaagcgtaactatagtcctgaccccttcccccatagtttcttgtactctatatacattcttttctctcttttgctctatacttgagatatcacacatgacacccaaatcaccttgcatctactcccaaacgtaacagagtctgtctcagagatgcaacacgcaataggttctctgatttcagaaaaagtttcctggagatttaagagactttctttgtagactttctagtctttcatttgcaaaggccttttgttacatttccatccattaccaacaaatataccctcaccactgtccacccaaactctttccctctaactgatcaaaaaacaaatctcacaaattcatcaggaccccctgcatctggattgatggtttcagaagctgtactcaatctcttaaccccagccccactcagcctcagaaaacacaggggcatcagagcactcgccttagctcagaactggagtggatttctctcacctctgtttcagtaagcagagtggaggctgaagagagtggcacaaaatcttttcttctccacaatacaaatgtacaccccgtaatgcgtatctgcaggccactcaatcttctgggactcttgtgtttcccagacatactcaatcagacaaccagcaactgaaaacacctatgccttattcataaaccctctcctcatccttcacctcgtcattcactctgacccctagaaaatgatctttacctgcagaagaggctgtgttgatgcctgaggacttgaattcatttttgaacctcacttcagcataagtgatttccgaagtcataatgggaagagagcttctgctttcttcagaaaatctgtttcagatctttcttaaaacatcttataaacaggaaccaaacatggtggtaaattacctccttcctttcactcaactagtggagagcagaggcaccagataggcacatatcctcaagaggggtctcatgagaactaagaaccacaataaaaactaaaaaccgcagttcacagaagccctttcctcaggaccagtatagtgagaatcacagccttgaaacaaatgcaagcaaatgcaataaaagtgggaactcaaagggttgcggaaagaggaagaaaaataaaagaagaaccaagcacttagagtctttctggagaactgcgtttttcaccagtaaaaaatacaatttctgtgcttccacacacaaatgtaattacttttgaccaaacatcctgaacatagacttatgttgcattcatctcatcaattttgactgatcaggcaacttgttagtaccacattctaagagtatcattgacacaaaactcacatatcagcctccccaccttcacgaattagtttcctgtagcatggtggggatggcaaagtttaaaccccatgtcttctgaagctgttcctccatgctctctgtgtttccttgttggtaactaactctatcaaaagtctgcattcatcttgctagaatctccagaaagcagctccctttactggatgttggaggagagggaaggccagcctttattccatgcttccctaaccttttaatcgccacatcacctccaatatatatgactattttttaacagttaggagaattatatagaatcacagtatagaaggggataaacttaaacaaagtactaaatatgactttttccaaaggcctagaagaaaacactccaaatattaaatccttcatgtggaatctctccatagacatgctcccagctcacacctggattctctgccctcaactctccgcaaatgatcctccttttaatctcccccagctgattccttctcctgcataacacacatgcatacatgcatgcacacacacacaaacacacacgtctatatttctatattatttctatatctaaatatattgaacaccatgagttcacactaattcctctaattccaatctaacaccacaagtttcattctagttttctcccttcccacattcctaactcctttctgtgacactaagaaacctgctttcattgtctttcacttattccttatttgatcaatctcctggatgtcgtcaatctcccacctgctaagatgtccctctcttcctagttgggctctgactccccagtccaagccaccatcccctgcgcggatgccctccctcctcactctgagagtgccggcaaagggccagcccactccccacccccatgaacatcccccaacaaacatccccctcaccctgccaaggctctgactccctgtgctaggccattcctctgcaggaaagccctcctcactctgcttgcactctgattcctgatgctggtcccctagtcaccacttagacccccttaggttctaatgctccacacaaggtcaccctatgggtggaagccctcctcaccctggaggggtctgatttcctcaccgggctatcctaccacatggaccacctccttatcctgctaagtttctgaaacccacaccaagtcctccctctgcatagaagctttcttcatcctgcttgggctctgacactccatgcaggtcctccatcccccagcaataatgtccatcttaccctacttaggatctgagttccctcactgggctaccccaccacatggacaccctccttatcatgcttggtctctgaaaccacaccaggtctaccctctgcaaggatgctctctctcctcatcctgcttaagtgctgagtcccaaccccaactgggccaacactaggcatgggtgccctcctcacctctcccacatgctgacatacataccaggctggccctagagtactctgctcagccatttgcgactctgactccctatagaaggtaacctcatacatggatgccctcctcaccctgcttgcactccaactcactgcacctgactatcccaccacatagatgccttctttacctctcagactctgacctctcacatcaggctacccctactatggacaccctcctcaatcttatcctctgacaccctgcactgggccattgccaggagtggacatctcctcgc

SEQ ID NO: 916070 - DNA, 4001 bp, Homo sapiens
ttcgcctactcttgcaaaggaagagatgtgacttaggagactctgcagtgagctaaagctttcaatttaaaacatacatcatgttcagaaataaggaaacacaaacaaggaaatcgagaaatacatgaaaaacagttcatggttgcaggtctgattgtcttttttttttttttttttttttttttctagacagggtctcactctgccacccaggctggagtatagtggtgcaatctcagctcactactacctctgcctcgcgggttcaagcgattctcctgcctcagcctcccgagcagctgggactacaggcatgtgccaccatgcccagctaatttttgtatttttagtagtgacagggtttcatcatactggccaggcttgtctcgaactcctgacctcctgccgttgcactccagcctgggcaacaagagcaaaactccatctccaaaaaaaaaaaaaaaaaagcctctttcatttgtaaattgcccagtctcaggtatgtctttatcagcagtatgaaaacggactaatacagcctcccaaagtcctggggttaccgttgtgagccaccacgtgcccggccactgctgagtaatcttaaatagagaaaatccattatagcctatgctactcaaatggagatgtttggttgaaggatggttacaactactggtgaaatagacactgagaaagaaagaacctaggtattccagaatcttcccagagttcaactgagatttaattgtagagtagtgagaaaaaagttttgagctgggcacggtggctcatgcctataatcccagcactttgggaagctgaggtgggcggatcacgaggtcaagagatcgagaccatcctggccaacatggtgaaaccccgtttctactaaaaatacaaaaattagccaggtgtggtggtgcatgcctgtagtcccagctactcaggaggctgaggcaggaaaattgcttgaacccgggaggcggagcttacagtgagccgagatcgtgccactgcactccaccctgggtgacagagcaagactcagtctcaaaaaaaaaaaagttttgagttagcagccatcctttgagatattttaggacccagaccaatgagatcctttctaagctgtatacttgctgaaacaacttaaagtcctgtttggtctcttgtctacctcccatttacagttccctgaacctccctctgcccctgcctcaggggttctccctgttgctttcctctgtcttggattaaaatgtagagtatgagggtattcctttgagtatacaatgctgagaagaaaggagcaaaggcaaaaatgagaaaaataatttaaaatagaacaaattataaaagcagaaagaatgacaaattattttctcagaagaaaagcagaattgcatgtaggcccagctcaggtgacatcccagcagaatgctttgagtatgaccagagtattgcaaaagctacagctgaagaggataaatctagataagaattggtagatggtttgctcactacttcttcccccggttggtgagggagggagtcccaacccagggttatgggtggctggacacacaacacccgacactggacagataagactgacagcagttcagctgcatgtactcacggcctgaggcaggagggcaccgcacaccatgcagggtcagacagaggttgcacttgggagcagggtgactgtgggaggcaggatctgctgtaacaagagggtgaggtggccccttggctcttgagggaggatgggattggcttctttaaagaattttgtggccaggtgtagtggctcgtgcctataatctcagcactttgggaggctgaggtgggcggattgcttcaggccaggagttcaagactagcctggccaacatagtgaaaccccatctctactaaaaatccaaaaaattagccaagcatggtggcacacgtctgtaatttcggctactcaggaggctgaggcacgagaatcactggaatttgggaggcagggattgcagtgagccgtaatcgtaccacttcactccagcctgggtgacagagtgagattctgtgtcaacgaaaaaaaaaagagaaaaaaaagattttgtgggccttcagggaagtgaaatctattagcttgaggaccaggtggagtgcagctggcccagctgagatggaaactggctgagtgagaaacagaaatattttttttttttgagatggagtctttctctggtcacctaggctggagtgagtgcagtggctaaatcttggctcactgcaacctccacctcccgggtttaagcaattctcctgcctcagcatcccgagtagctgggactacaggcatgcgccaccacgactgtctaattttgtatttttagtagagacagggtttctccatgttggtcagactggtcttgaactcccaacctcaggtgatccgcccacctcagccacccaaagtgctgggattacaggtgtgagccacaatgcctggccattttttgtttttgagacaggatatcagtctgttgcccagactgaagtgcagtgtctcgaccttcactcactgtagccttgacctcctgggatcaagtgatcctcccacctcagcctcccgagtaactgggactatagatacacgtcattacacctggggatcttttaaattttttttgtagagacagggtctcgctatgttatttcccaggctgatctcgaacacctgggctcaggtgatcctcttgccttggtctcccaaagtgctaggattacagatgtaaaccagcatgcctggccggtgatgctcttttaacatgagtacccagtgtttggaatcaggacagggcatcagttaggttttgctgtataatcaattaacttaaaacttaaaatacacagctattcaattagttcatagttcccgagagtcagcaatttgggctgaacaccactgggtgattctggtttggattggatcggatcggttccatctcagctgagctcactctgcaataagctggtgggctgggtggggctggctgattcacgtctctctttggtcatcctctagcggattagcctggatttacgtacattgtggcaggaggattccagtagtagcaagaaaacaaaccctattgtgtacatgcttttaaaaacctgtgtgccaggaaatcaccaaatcactccagctataacattaaaagacaaccactctcttccacttaaaacttattggctggccacaatgcctcacacctgtaatcccagcactttgtggggcaaaggcaggaggattacttgaggcctgggcaacatagtgagaccttctctctaccaaaaaaaaaaaaacaaacaaacaaacaaacaaaaattagccaggtatggtagcatgtacctgtagtcccaactacttgaggggctgaggtgggagaatcacctgagccttagagatcagggctgcagtgagctataatcaagccacggtgctccagcctgagtgacaaagaccctacctctaagataaaataaaaaccaagaagaaaaagaaacctccccaatatgtcagtatttacgccttcagaaaaagatttctatgtgaataatgttatatatttgcaacatattatcaagcaaagaaaccagtaagaggccaggcacagtggctcacacctgtaatcccagcactttggaagtgtgtggcaggtggatcacctgaagtcaggagcttaagaccaggctgcccaacatgatgaaaccccatctctgctaaaaatacaaaaattagcttagtgtggtggcactagcctgtaatcctagctactcaggaggctgaagcaggagaatcacttgaacccaaaggcagagattgcaatgagccgagatcgtgtgtccagaattgataggttcttggtctcactgacttcaagaatgaaaccacgtaccctcgcggtgttacagcttttaagatggcacgtctagagttactc

SEQ ID NO: 916071 - DNA, 4001 bp, Homo sapiens
taaattccatcaatcaatctctatcacaaggtaccaccattgaaagacagaaggtcaagaatgtagctctgaatattcagtgcaagaccctgaagatattatagataggttatgctaggaaaaatcaagataccaaaaggcttagagcaacttcagaaaagttgtttggaaataataattcaagaagagttctactttggctaataacttacccaaacaacttgcaataaaacagacactgagaagtaagatgaaaactacagcaataaccgaaggtatcagctggggatgcatgcctccttccactaggaccaaaagaaaaatagagattaacctcctctcagctacaagctaggaaagctaattctaccaaggagcaatctaaaagtgacagcaaaccaaatatttcagatctagagaagagcataaatattttctccaaataaatcaattttagagcttattgatgaataaataaataagaaagaaaaatgtaaaatttcttggtaattttgaaatgaaaagaattttataagtaagatacaaaacccaagagccattagaatagataatttgagtacataaaaattaaaacttctatataacacaagcaatgttagagtcaaggaacgtatgaaaggaaagtcttctcataatattaatatccgcactggataaagtatttcaaaatcaactagaaaactgagcaaaactctgagcaggaaatttgctgaaattttaatttgctgaagttataaatagccactaatcaaacaaaaatatgcccaatcagggaactgtaaacgaaaagattgtggtataacttttcacacatcagattttttaagtaaattaagtacatgcagtgttggcaaggctgaggggaaataagcactcttagtgagaaaataaatgctgctgcctggactggaaaattaggaatgccttttagaaggatcaatttagtggcatttatccatttttaaatgcatttcatttgccacaataatttcaattacaggtgtctattctatagaaataattgagcttgtttatgttaaaagatattcattgcagtacttctcaaaatagaaaacacatactgtaatctaatatttacatgtatattatcaatagtggaaattctaaattatggtcccttcacacaatgatattctgtatagtaattaaataagcatgtaatcagtatatattgatgcaaaaaatctctaagaaatattgttacctaaaaaggtaattcaataggatcacactgtgattacagtttgccatggtagggtgatgagataaagtaaaactttaattttaatttaaacatttccacacttgttctatatatctatcaaaaatattatttaatattatcacaatacaaatccactggtgtcacttaagtcaaacataaaatgggacagttagagcctctgatacagcataagcctaaatgctttttctacatcttccttttctcttttttctttaaaagaatcttctcatattactctctttcttttcatcttatttctcttttatatattttatctcccctcttggtccaatatacattttataaagaagtttctgttatccaacttatttgactctatgtccttcctcttcaccaacgtcatttttatttccttccacctccttctccccgtcatcatcaacaatctttaaaactaccatcaattcatatgttttaaattagtataattccatctgcttctttgaaatggaaaggagagaaagtactcacgtttactttgaggtttttctagccccattgtctaattagtctcttgttcaatggtcaggacggcaagaatttgttctattttttttcccccagagtatatttctgtggataggggaatatattcagaaatacttgagatcgaacaccaatgttacatattgtagtgagattagaaaggtaccagtataagaaagttagctcaaaagaagtctttttcaaagacaggggtttcctttgatacattccgggagatgaggcgaaaaaaaaaaaaaaaggaaattgagaaagcaataccaaacaacagttagtagaaacccacaagtatgttgagatcactagatcagtgtgaaatgtggaatttctcaatttgttttttttttcatttagacaaaaaatttagcaacgccctaaaagaaataattgttatgcccaataaaaatttagtaaatgtcccctctttttaaattctttttgtgaatattatattttcaaaggcagttatattcttggggtgagttctatactaaaaagttctctggactgaataaaaagttgagtctaagagagcaaaagacaatgtgaacaatgaacaaaaacttttaaagtataccttgtgtgtacatggcatgtgaagacacagcaacctttgttttcgagttgaggaagagatgatagagcagttaattaaatcccaagaactttctaggtgagcaaaaagagttgtgttaaggcaaagacaaagaaaatgtaagattctgtgataaagacaccatcagggtccctgacttcatttatagcactgttagggagtgaatgtctgtatctcctcaaaattcattggtggaagcactaccctccaacgtaatggcatttggaggtcaaaagtttgggaggtaattaggtttaatatgaggtcatgagaatggggtcctcatgatggaattataagaagagacccggctaacgagctgtttacttcctgcgggtgctcaggctgtggccatcttccttgctgttgctcttctcattggagaagatggccctggagacggtgctgaaggacctgtggcatctgtgggcctgtttgctgtgttcactggtcaaggtactatagaccagtttgaatatgatggttgtgactattgagatgcatatctacagatgaagggtaactgagagatgctatatggctgcaccagctcctcctttgatggaatcattgcgatgatgagtccagaggacagctgggtctccaactggcagcgagtcaataactttaagccaggtgtatatgcggtgtcaaccactggtcgcttgccctaaggaatcgtgcgggagctgaaaagttgaggagtggcctacaaatccaaagacacagctataaagaccagacgcagggctgccagcgtctttgctctccacctcctgcctctgcttattttttgttctggaactaaatgggcagagcttcaaatgcttcctaccctccaattcagactcagccaactgttgagagaacagcacatcattttatcattttaccttatttggacttcaggtgggggtgggagggatttgggttggtggattaacagatggaattgaggagagagtaggatgctgactttcctacctgtagcccaaggctgcgccttgctcatgaagaggtctaggtcaaatgtcaataaatagaaacctctagaaagttcttaaggccatgacacctgcctcgcttccctcttcctttctcttaggcacacagtaagagcttatttgccctataagataccttcccagagcagcagaggcccttccactccctcttgactgtctcagcctccaggattgcagcctttgtagtgtgcttccttgcttcctatcagaaggtgctgtccagaggctcagtaaccccatcagcttggtggccctggtgtcttgtgcttgtatccttctgcccttgagacctggcacagcagtatcccttgaagaaatcctgaggctttgtcgtgctccttgctccttgaccatgtttaataattcttttccccctctgctcgtcagttttcttctctttactgctcttcctatatcttaggccagtctcacacactcacattttacattttccttactggagacccttgggccttggccgactgctgggtcctagtctgccttgtttgtgcccctgtaggaggcaggtccttttctccgccggccc

SEQ ID NO: 916072 - DNA, 4001 bp, Homo sapiens
tcctgggaataataccttccacttccagatttactgttcagacatacccctcaaatttattctaaaagtttactataatgtccccaagactttctgccccaatgctaattgcatcaccaaatttctaggattttacattttgcttttgaaaaataagacctaatccagctatatctcacctgtcccaaagtcaatctagaagccagaaaatgttgctttgtaaattttgatgttcacctttgggactattatacctgatccataattgtagcaggagagctctgtgaaattctcaggtagctgaaactttttctcatcacaggtttgaaagatgcgaaatgtcactgtaaaagaaagggcataatgtttgttagtcttatttcggttaaaaatgtcagttccctcagttttgtatttataacaaaagtgccaataattatcatgttttttcttacaatctgctttttcttacgacccagagaaaatagatatgtttgcactacctcttatgccaagtccaactctctctacccttccttccaaaagtaattagtcatatctctggtgccgaccagtagttcaagctctaaggcagactctcctagagaaggttacactaatgatagaggctgaaagaggaggattcaggactgccaaggaagtgaaaaatgtctatcatgaaaagtaagtcacaggtgattaaaattcagaaacagttccctgcttgttgaggtttctggtttgagaaataacctagagattaatagggaaaaaaaaaagggtgaaatagaaagaccctttgagggcaaagagagtctacaggcagcatggaagagttttctcctaatatgcaccaggaagaattaaattgaatttgaccttcagaacccaccaacacatctggtgatgaaacaggcactgagaaataggatggggatcccagcaacagtccataagaacatttgggaagagaagcatcctctctctgtagaaagaaagacacaaacatgatcaatcttccctaagcaaggtacaaaagagatagaagagattcttattcatccttacttatttccttctacttccattgtttgtactgagtaattcccaaatttcagcatgcttcagaatcacttggagggtttatggaaacacagattgctgacccttacccccagagttagcaactcagtagagtttgtatggaaccaacaagttcccaggggctactgctgctgctggtctgaggaccacacgtttagcacccctggagtaagactctgactcatgaactcagatatacaatttttcctttctaagtctctcagttaaatttttttcagtattttctaaggccccccttctttctttttctttcttttcccttttctcgtctttgcttttcttgtccttctcctgatcttttttttttttctgtgtctcacttttcaagcgctttgtaaattaggtaaaatgttaacagtcatctaatagttcctctcttcctcccattaaacattttacagacaaagagagttccagagaagtgaagtgacttgccaaaagggacacaatgtattgcagaaagggtggaaactgatagctctcccttagctagaggccagcaggctttctggtataagaaatagtctttaaatctctctctctctcttcctctgtccccccacttttttttttaacttcagtgaatacttttctattgtcctgtctttcaccatatttatcacttgttccaaaaagagatctatggaaggaaaggaagagttgcagattttacctgtgcattgtgtttcagatgatttagatgaattcattttttctctctctttggttttttgtttctctctctctctttttctctccctccctctctttctttctcctcaggagtgttttgttggtaagattcagggagaatgaatcttgaaagataaacactttgtcttttaggaagttcagctccgatagatgtagaatattaacttgttctgtggctacgcattaagtcaggatttcctttcttgcataaggaggacaaggaagtttattggacagcatgtcagttctcttcactccatgtaacaacaaaatgaggaaattatgaaatggtaagcatcaacacaaataggctagccatggggaaacaggagagttttttttttaaatgttgtttcgtttcgttggaccaaatgtctctagtttcttcaaggcataactcatcccccagtttttccttgacaatatggagctcacctctgcactctgaatttcactttggatctgtaccatccacacatttggtaactgaaaagaagacttagacaacatagcacaaagctgggcatatagtgtatgtatttaggacatggcaacctgaattttttcatctttttttttttttttttttttgagacagagtctcgctctgtcgtccaggctggagtgcagtggcatgatctccgctcactgcaagctccgcctcccgggttcaagccattctcctgcctcagcctcccgagtagctgggactacaggcgctcgccaccacgcctggctaattttttgtatttttagcagagacggggtttcactgtggtcgtcaggatggtttcaatttcctgacctcgtgatccgcccgcctcagcctcccaaagtcctgagattacaggcgtgagccaccgcgcccgtcctctttttcatcttttatggtttttctttcttcttcatttgcagctcttgaatattctaatgttgtggatttatgtccctcttatcttatgctgactactaggctgctactactaggctgactactagagtccccctcagcaggacagcctcatgtgattagaccactttgaaactcagcttagtttttcacaacataacgcagcttctgaagtctcagagacccagcaggcagtttaattctcctgttctcaattatttggggattttagttctatgttacagcctacagtaggagaaatgtatttgaaggtcagaaaaagcaatttcaattagatattagaatttaatggttctctgggccgggagcagtggctcatgcctgtaattccaacactttgggaggccaaggtgggtggatcatttgaggtcaggagtttgagaccagcctggccaacatggtgaaaccccacctctactaaaaatacaaaaattagccaagtgtggtggcacgcatctgtaattccagatacttgagaggctgagacaggagaatagcttgatcctgggaggcagaggttgcagtgagccaaaattgcaccactgcactccagcctgggcgatagagtgagactctgtctcaaaaaaaaaaaaaaaaaagaattaatgcttctctggaagaatagttagatatgtgccttctccttacttaaagatacttaagaataagatcacactggtctcagtttatttaagttcacgagtcaggaggcataagtatgatgtacatgacttggtaaatccccacatccagtgactcacgaattttccatgtgtgagaaaatattcttgttctcaaagggactttttattatttcaaggtactggtcaattttctctgcattctctgttttatagtaatacaattttaaaaatatctttaaattatatatgtgtatattatagaatatacccatatttaatatgtgtattctcagcaaatagcttttgatcagtaaaaaaagagaaactatctagtggatgagctatatgaattataaaatgatgaacataattaccacagtccatcttttattaattacaatcaaccagcaaccatcaatattactaaacaattgtatgttaatttttatcaatatacaattaaacagaaatcaataaattaatattttttccagccaaaatgtttttatatcttttgtttcattgattttccccaaattatacgagtaatatgttttatgattaatactatgaaaagcatgtgacaa

SEQ ID NO: 916073 - DNA, 4001 bp, Homo sapiens
gaacttacctacacagctcacaatgaagcaagcactgaggagtgcaatggaaatcccagccacagaccagagtctcagggacaaccagcctcttttctctgtccaatcaggaagacaacaaatgcagttaccagggggccagggagccaaaatccccaggaagcttacaacaatgaacaaactagatgaagaacctcagagcagttaaaaacttaaagcaagaagacagcttacaaactccctcagaataaataaccaggtagtagctctgtggtccaaaagaatacaggtaaaacatacactcaaccaactggaatttccatgtctttattctttcttctaaactattacatgtttccattgatttcgtttctcaaaacatcacttttgtctcccatttctcatatctctgtattgatatttggtttcttcagtatatccaagagatatctgcactcccatgtttattgtagcactattcacagtagccaagatatgaaagcaacctaagtgtccatcaacagatgaatggataaagaaaatgtagtataatatatacaatggcatattattccaccataaaaaagaataaaatcctgccatttgcaacagcacagatggaaccagaggacatcgtgttaagtgaaatgagccaggcacagaaagacaaacattgcatattctgactcatatgtgggagttaaaaaaattgatctcatggaggtagtgaatagaatggtggttaccagaggccaggaaggttaactgggaagagaagatagagaagggttgtttcgtacctacaaaaatacaattagctagaagaaataaaatctagtgtcccttagcacagcaggataactgtagttaacttttttttttttttgacatggagtctcactctgtcacccaggctgaagcacaatgaggcaatcttggcaccctgcaacctccacctcctgggttcaagtgattctcctgcctcagcctcctgagtggctaggattacaggtgcatgccaccatgcccagctaagttttgtctttttattagagacgggatttcaccatgttggccaggctggtctctaactcctgacctcaagtgatccacccacctcagcctcccaaagtgctgagattacaggtgtgagccactgagcctaacccaacaataatttattgcatatgtcaaaatagctagaagagtagatttggaatgttccaaacacaaagacatgataaatatttgaggtgatggataatgtaattttccagactttaccattacgcatcatattcttgtgtcaaaatatgacatggagcccataaacatgcacaactattttgtatccataaaaaattttaataaaaatttttttaaaacattattgatggacatgcaaagggttgaagctaaagtcaaattttcatgcattaaaaatgggaagcttttctcttacaaaaaaattagaaaagcaagtacaaaaaaacttagggtaattggaaagagtactgcttcctggatttcaaaattagtcaaaagactttgaagagcagacatccaataatcagttatttccctgtttaccttctatcatgtaaatcttttctgtctccctaaactatcaataaaatctggtacaaacctcccaaaaaatatttgctttcttattctttcaagtgcttatggctctggctctgaagaattactctttctttcaaattcctttgagtctactatattggtccaatcactagctcttcaatctgttctttggctacttcttctctccaggtgatctcatttcaccatacacttccactttcctctgaaactgaggaaatactcacctgtactttgaggttgctgctcttgcatcattatgcaggctccctgtgttgagaaggtccaggaaccttttgtacctctctccctaaagatgttgcccagagactcagcttcatttaaagaagctagagctcagggacaaactgctacacactcttataggactaagagacttccaacattaagtgtacctcaaaagaagaagtcacaattacaactaaagtttccagtgatttcgatacgtggggttaaaaaaaacaaaagaggaattgagaaacattgaaaaccattcatgagaactttgacaagaatacttagatcatttcttcagtttctaacataaaatttctctgtctgattcctattcattctggcatgcaaaatagaaaattttttatctcctaaaagacatctatttagagaacttggttaaattaagtgctccctaactaacctttacattggctgcttattttatgcaagccttaatccatgtgttgaacagtgtcctaggtagtaagcaaaagtttgattggatggatatggtttagatatgaagggtaacatagtaaataacaaaacccatgaacattgttaaggaatgtgactgcaaaatgaaacattctgaaatcagtctgcaaaggtgatgaaacattcttactgcatccagactaatattgggcagatgtcagtgatattttgtaatctccctgattaggcaaaagggagcctgaagtgatataaaatcagaaacaggcttcatgaattttatattgtagcacagaaaatatatgatgttttcttgtcctcatagattcttagtagagacactgtcctgaaaacaaaaggcagagaaacaagagaaaaagcagcagtttatcaatgtgtgttatacccatcactcaggagagaactcagttcaaatgtatttatctctttcatggcagtggcttacaggccttgcttaaatagtatgttaacaaacagccataaatctatggagtgctgagaacgaaaaaaaaaaaaaactgttatttgaggaatgtgagtgccttgaaactatcaagtccagagtggactcatgagagagatatgacaggagtcatgcctcactgccaccttgcacgaaatttacctcttgaagccatttgctatgtaggttctagactaactgaaccctaaaatttaacagtatacagctaattactaatcaatgtggtttctgtaaaccaatgataatttactgatgagtaactttttaattcactccctctcctgattcattctttttttaatttttatttttccataagttattgaggtacaggtggtatttggttacatgagtaaggtttttagtggtgatttgtgagatttttgtgcacccatcacccaagcagcataccctgcaccatatttgtaatattttatccctcatccccctcccactcttccccccaagtccccaaagtccattgtaccattcttatacattttgtgtcatcgtagcttagctccccatatcattgagaacatatgatgtttggttttccattcctgagttacttcacttaggataatagtctccaatctcatccaggtcagtgcaagtgctattaatacattgcttcttatgactgagtagtggtccattgtatatctataccacagtttctttatccactcattgattgatgagcatttgggatggttccatgatttttcagattcattcttttttctttaaaatcttcagtctttcctttgctctctagaccacttcccaaggcaacctacaagtgttttcctgggtagctgtcctcatcctttgcccaaataaactctctatattaatgtggcttcagctacttcctttaggatgatagtgaaaagacaaagaagagagtatcttcacgattccaaaaggaaatgaaatacaggaaggtattttaacaggaagagtaaaatctgcttctaaatccttttacaagtatcgtaaaggagctaatccttagctgggaaaagtagaaaggaagacaggaagacctttgtctttgtaaattgttgttctgccaacaggcaagaagaaggaggggaagaatgttctcctacattgccacctttttcagctcaacaatttgcagttatct

SEQ ID NO: 916074 - DNA, 4001 bp, Homo sapiens
tactggcaaatttttaagtgaattattaatcactgcctaggttacctggtcacctaggatttgctgtgcttctccaccagtaaggataccttcttcttcaattgctggaattgtaatttcggcacattggcttgataactgtatgctcctaatttcagttccacattgacatctacaggtcttgacattagtaggatccctgaaatcccactgattcttagaggaaatagcttaatgttggggagatagcactgattactaagggtaattttcccttttcatatgtttgttgcatgaccctgggcaaattactccctttgttgttttttattcctctttgtgaaactggggtaataatatctcaaaggattattgcgggaattaaacgagctaacacatataaaagcaccttgtttagagactgctagcacatgataggtgtgttgttgcaggataccgtttgcctacacatatgcataaacatgcgcatgtctccctacctcttgcctcatccactttttccacgcttcctcaataggttgcccaagaaaagaattacatcagtgctgagaggaaaatatttgtgcagtgtgaataaccagaaagcagaagaaagcaaactctggtgtcaaaaccgacaaatgatctctctctctcaaagataatagggaactaattttgtatgaacattgccataaccagaatgtatttctgctttccactgtgactaagctgtcaggacatttcatagaattgtcacataggagaatcgtagagtaggctaaatcacccattctatgaatacagagatcctccaatgcccttctttctatttcatttcatttacactttgtttaagactcatgtcctgctggtgggatgtttttatctaccatatgttcatatattttccatcactggtataccaataattgttttttgtttaaaaacaatttaaattaatctcttaccacaaaaaaaaaatgttgttcatatatatacttctttaagtttcctggcctccattcgataatctagcctttctatcaaacaagcaacaagtcactcatacagaaatcctttatctttgtgtattatcccacttattaccaattcctcactgatgaaatgtctatatctatagaaaagagaaattctattttctgccatcagacataattaatttaaacactaataattggtcactgaataattttcatgaaaaaaggtttagggtgcattcaatttatcttcagtgacatctgaagcctttaaaagtatatccataaaaatatacacatcacgaggctctcaaattttctccccttatatctttttgttttgtttttatttttattttttttcagagatggagtcttgctctgccacccaggctggagtgcattggcatgatcttggctcactgcaacctccacctcccaggttcaagtgattctcctgcctcagcctcccaagtacctggaactacaggcgtgcaccaccatgcccggctaatttttgtatttttagtagagacagagtttcaccacgttagccaagctggcctcgaactcctgacctcagtcaatccacccgcctcggcctcccaaagtgctgggattacaggtgtgagccaccatgcctagcctccccttatatcttttcaaacgggagagctaaaggcacacattagaaaaaacatatatatacctttctctgaaacaacagctatcctggtattgctttgagagtcgaagtgtaattgagtatatccatcttcatccaaattttctaaatcaggatgatattccattgttcttgagagcccctgaatagatatagcatttgggagctcttttctttctgctcctgagatgactgtctgtggacaaaagagaatctctgagtcaaatcatgtgggctaggtacttaccggagtttaacaaattaagcttaagtagttcaaccagatattcaagagcaggaaatgaaactatgctgtggtaattttccatttgtacctttagatcctgtttctgagactgctgactcaggaaaactaaaaggcagcatagcagatgagtctttgtttcagaccaaatgtaagaaaaatgcatacattaatgtcttatgctgccttcattactctcacaactaagtctgacattaattaatttaaccgatgcaaactatttcagttttggtgctccaagtttaccataactttgttcatgtatttattcatgtattttttaaattacataaacaggtactggatgcccaccttttcaattggtaggagcttacaatacaaggaaaaatgatacctatgaagaaactcattgcttaataaaggaaatatatagataggtaaatgagggatggcatgaggagatgcattgttgtaacaacagacagagaaaacaaatctctttgggaattatcagatattaacacaaaataacatttattgaacaattactatgagctaagtaccacatgttgtacatattttcttgttcaatctcacttttccaagtctatatagtaggcattattatttctattttcaaatgaaaaaatgagacagaaaatttagcctctttctcaggtttaagaagctaattttaaaaatttagagcaaggaatcaaatcaaagctgactcttgctgcaaaactcgtggtcttttctgttacgctacactgcctctttcatcattccatacacttatattgcaaggaacagcttatggaaggtgttgggactgaaatattatgttagatgtttgattttttttccctctcttccagtttccatagtaatgatcaaatcaaagaaatatagaaaacacctaacattgctggaaactgaagaggtgttcaactcatttatccgaccttgaagccagtagagtgcaggagacatctgagtgttgtcaaggatcaacaaatctggatactagttaatgtggtgaggacaggttttattcagtaatactattgcaacaggaaccagtgcagcattaactgaactcaacttccccaaaagtaaagctgatgacattttaaagtggagtttgctaaggaaaagatactgagtggtgttaaggaaagttaatgtgactagactctctggatttgttaattggcccttatccagaggacagagaaactttgcctatctatatgacagaaggacatggtgatagttgaagtgaagcacccagctaagttggtccttatgctgcatctgaaagaaagagcaagatttatctccctgaatgtttgcatttcaaagaaacagctcccaagtccttgaagaaacagttctgtgtggtagatttgcttctcaaagggcagagaaagaatttaactgtaagatttatttttcttttctttctttttttttttttagacgaaatttcgctcttgttgcccaggctggtgtgcaaatggcacgatctcggctcaccacaacctccgcctcccgggttcaagcgattctcctgcctcagcctcctgagtaagctgggattacaggcatgtgccaccacgccaggctaattttgtatttttagtagagacagcatttctccatgttggtcaggctggtcttgaacccctgacctctggtgatccgcctgcctcggcctcccaaagtgctgggattacaggcgtgagccactgcacctggcctaactgtaagatttctaaagtaactgctctaaaaggaattcaggagcctatctgttaccaagttttttgttgttgttgttgttttgagacagagtctcgctctgttgcccacgctggagtgcagtggcgcgatttcggctcactgcaagctctgcctcctgggttcacgccattctcctgcctcagcctcccaagtagctgggactacaggcgcccgccaccatgcctggctaattttttgtatttttagtagagacagggtttcatcgtgttaaccagaatggtctcgatctcctgacctcgtg

SEQ ID NO: 916075 - DNA, 4001 bp, Homo sapiens
ggctcacacctgtaatcccagctcgttgggaggccgaagcgggcggatcacgaggttaggagatcgagaccatcctggctaacacggtgaaaccccatctctactaaaaataaaaaaaaattagccaggcttggtggcgggtgcctttagtcccagctactcgagaggctgaggcggaagaatggcgtgaacccgggaggcggagattgcagtgagccgagattgcgccactgcagtccagcctgggtgacaaagcgagactccgtctcaaaaaaaaaaaaaaaaaaagaaatccctaaggaggtaggtggatggattttaatatacagatggagattgagcatagattatgttacgggatctttgggatgttgattttctgttcagaaacctgtgtggctgtggcgtctttgcccgagttcttgtcctgcgtctatggttgctagattgtatgttaatattatacttagctctgtaagaaactgccacactgccttccaaagtggctatgcctttttacctctcaccagcggtgaatgaatgctcctgttgctccacatccttgccagcattggatgttgtgagtattttggattttagtcattcaaatagtatacagtggtttctcattgttgttttaatttgcaattccctcctaaggtatgacattgagcatctgcaacactgaacttagctctccaaacaaggctcagccttgtctgcattcctttccctaccctcacttccccttctacttggaatgttatttgtagcatttgtttgtctcctgtaaccctgccaatccttcccaatcctcagagccttcactgacagcatcgggcggctcactcgttcctgctgccatagtaatttgtgcgtaacttttcttgagatttatcacatcctgttattatatgctgtttcttctaccgacattggttgctactcccatttctcaacctcctggcttcaagcaatcctcccaccttggccttccaaaatgctgggattacaggtgtaactaactgcacctggtcttgctactcccgtttctaaataaaatttcaatctgagtaaaaactaaagccaatttcttcccaaaatggtggggggcactggacacaatatcgaagaccattagcacaatcagtagcaccagacaatgagtcagcagagtcactaaagcctcaggccacgagttagaagacacttcacagattaaaggaaatcaacagaggagtaagaaataaccagggatggcctcctggagatttcgtgtttgactccctttccctctctatctctaaagagaaagtgcagagggcattttagactgagggatcagtaggagcaagagtaaggaagctacctgatttacagaggctgtctactgcctgcagtatcaggccattgaaatacacttaacgtctttccaccagcggctccagccttcccctccacttgcatcttccctcatccatctctgcagatgatacatactcccacatatcattcattatttcttaaatatatcagctcacaccttcatattattttacatttcttcagaatctttcctaacctagaatgccctttcccctttctcctttaatcatgcctttcttataaagtaggttcagatgaccttctctgtcagcatcatctgtaatgacataccttccaccctactgccagtggttcttacctcttctgcagagagtatcatcagtttgaatcatttagatcttggctaacatgggaatctttaccattgtgtggatcaaatacccagatcttgataagaaaaataaaaatgctattgtcacataaatggctgggtttaatcatctgtgggccttagagtatgttttcttcaggacaaggtaggccgttgtgcttcacaagagcttgcgagttatttgagaagaatcaaaacatgttgccagtctagcagaaaagcatttcaacttcaccacagattgccacagccgggtacaaacggaagtcccgcccccttccaggttgttggggtgggagctgccggatgagctgctgcggccctcggggcgcaggaccacaccatctgcgcagcctgcaccctcgcggcccggtaaacttgacagtttcttatagaggtaagtatagtattaacagacaatctaggaaccatagaaagtggaaaacctgtacacactgctgagaccagctcggtctgggagaccctaacccagaggcgctagaggaattaaagacacacacagaaatatagaggtgtgaagtgggaaatgaggggtctcacagccttcacagccgagagccccgaacagagatttacccacgtatttattagcagcaagccagtcattagcatggtttctgtagatattaggttaactgaaagtatcccttatgggaaacaaagggatgggccgaattaaagaaataggttgggctagttaactgcagcgggaacatgcccttaaggcataaattgctcatgctattgtttgtggcttaagaatgtctttaagtggttttccaccctgggcgggccagctgctccttgccctcattcccgtaaacccaccaccttccagcatgggtgttagggccatcatgaacatgtcacagtgctgcagagattttgtttatggccagttttggggccagtttatggccggattttggggggcttgctcccaacacacacaaaaactggcacacacattttcacaggagctttattcataattgccagacattagaagtaattatgatgtctttcaaaagatgagtggataaacaaactgtggtacattcatgcaatggagtatcattcgacaacaaaatgaaatgttgtcaaactatgaaaaacatggaggaatcttaaatgcatattactacgtgaaagaagccggtttgaaaagctatcatattatcctagctatatgacattcgagaaaaaccaagacaaagaaaacaaagagatcagttgtgaccaatgattcaggggaagaggaagattgataggaagggggaagattgctgagtaggtagggcacaggggatttttgtctgcaaaaatgtacacccatgtacataagcagggctctgaattttttaaacttttcaaattttgtggcagggcctattgaatgggttgagggagaccttcctgattgatacctactaatgtatatacaaatttgagacagatattttgagggagagtggaattcaggtacaacatacctattaccccagaaaggtgtcaagtggaagtaaaaaaaaaaaaaaagaggtgtgtgaggtaaaaaattaaattaaattctaaatgaggacatggaggttcttgtggaaagttttttcttgtatatatatatatatatatatatatatatatatatatatatatatacacacacacacacacacacactatgttttctttatccacttgttcatcaatgaaatgaacatttagcttgttttcatattttggctattgtgaacatgggaggaaatgagatatttgtaagactaactcaaacattgcattaaatggtccatatttaatataaagaaatcaagataattaatatatacgtctggcttttcagataatggatgtaagccctgtcctgaaaggtggcaatggagcaaaagaccagtaatataaaataattcaggaatccataacatggcaagacagcaaggataaaaatttttagaggatctctaaaatttctaccttactcaatatagagaataaggaattggtaaatatgcaggtctcctgtcttttgttaaaatttacagaggtgaggtgagaaggtaagggtaagttaaaaaaattattgagtacctaataataaaatactatgctctcaggcgagtctataaatgatcacatttaattcttcctttgtgtgcaaacaacagccttacaagtctggtaatatcattcctaatttttagatatgaaacctaggctttagagg

SEQ ID NO: 916076 - DNA, 4001 bp, Homo sapiens
tatcaagcatctattaatttcctgctctatatttagtacggtgtgaggtgctagaaacacaaagattaatagattatgtagaaagattcagcattttatgaggctctgaaatggtaaggaatatgacaacctttaggagaaaagaaaaggccaatagccagagcaaaatcagtgaaaggtatgaggttagaagagatcaggaacaattgtgtaggactctgtatgtaagacaacaaaaatctaatctatccaacagctctttcgcttgatggcgaagtgacgcatgagaacaaaagttgcgtttatctaacaccacacgtatacagcacaagaacaatatgatatttgacttctggtcataagcatgactataggtaggtaatttaatcttcatatagttcgttttctcatttttagcattctaagattgaactagatcacattaaaagatgttgccccacatccctaaactgggaaaagaataaggttttatttataaaagttcaaaccatagacagaaaggcaattaaaccctggaatgcggaatcaaaaatattggttttgttgcttaaactgagtaaaataacctctagaaaaagaaactaactacaggacatttttgaagcataggggaatgacagtgcagttctagtccatgttatttttcaaattatgtttcactatttcataggaagtgaaagtgcctaagctggaagaaaagaaagcaagttagcctctgctgggtaaaatagagaggtaaggtttaaaataagaaacaagatgcttttacaaccagaaaaggacacacactagattcctttgataactataaacttttgaaaatataaagaagaaatacattccttggaaatacgaacaaagtagcagattcattccacaagggcaaatacaaaggaggaactttaaattatttaaaacacctacataaactctatgctacaaaaattcttaccctagagcagagaatggaaatgtaacaagacagagaaatttccttaatacttcaaagaatagaaaagacactggctatgaaaatctataatttttgagggggtttggtgatgaaggcaccatgttaagtttaggcatatgcttatcgcctctgattccagaaatattcaattacctagtcattaattctagactttataaaattaaatctaacgtttcatgttttcttaagtttacatttttatcctattgatattgtaaaagaataaataacaatatgagtaaattgccacaggtatttttcccagtggagatgaatttatcacattatgttaaaaggtcagatttgattgagagtgagcaaagctgtggagcagaaaggcgtgatcccgctagaagttgctgtgtgaatataaacattcatcacgagaaatcaagaaatagaaaggctatgaaaacagaagcaaagttctacatattaaaaccaaagtggcaatttattttatgaacagacattttgcttcattaaaaacattcgctcttattcttagcattcaatgaattttgctttgaatccaatctcctcttttcagtttggcaattagatacataagaaagaaataaaggagataactagtaaaatcttaattctcaaaggcaccctaaatccagcttaccagatctctgaagtggaaacgcgagttctaacggggaagtccgaacagttttgatgtcagcgtagactacatctccagccattgcacagatcaaaaagagagagaagaccacaaatgatgtcccactgaagggacaatcatatttctgcaaagaaacttctgataagtaaattgagatggcaaatttccttctgctccccaagtgggtggtggacttcctccatgaataaatgacaaaaccaatgtgttcagtcttactaatcaaggtagcagatttctcgaatacttgtatgacatggaagaaattactaaccatacagtaggttctcgtttttcagttagttttctgcctaaacttgaaatgcttttaacttttattaataccacagaagatatctcaccattttctcctatagaccacttcctcttttagttcaggcatatattctctggcggaaactctgaatttccagcatcttctccaaagtaggatagctatttgggaaacagaacaagaaaaagaagggattttattacgaaagttacagaaaggggccctatgtcttttatcctcctctctaaatgcattgtattgtctagataataccttaaaaattctgaaagctatttgctttcctgtatgctttataatattaacattaaactgaggtaaaacatgaattatgcagaggacttctgaactaaaaaatatatatttaagaaacagaaataactctgttaaaataattcaaggtaatgacataaaagaaaaaaatctaattttaaaatgaggtgttcagaaatttactatcgaatacaacatagcaaacatagattttatctcctatttcttctaaaattccactaaaattgaattaagtgaataaaaatttgttagtctaaaacaataacacaaaggctcagggtcctattagttgatgaaaaatttcaactaattcctggaaaatggagagtagatggagatgtgatcattgatgaagaagtaaaatcagagaaaaatgcagccaacaccatacagagggaaataatggaggagagcctagctacctgtgaaaccgtcataggacatagaaatgtcagatatgaaaaatggcaggatccattagcttatgactagtagattaactggaaatctgcatatggaaaaactggttttttcaatacccactcaagtgcattctgcagaattaatctaaactgcagtcaccccatccctacccctcatccaagaaatttaacttaggttaattaaataactagagaacagatcctggctttgtggcatttagggatccctcctataaagaccaacttctgaccctggatgaggcttgagcaccgacctctgtctcttaagactgcatgacactctctcccttttctgggctgttccaactgtttgtatgtgactagacaatacctactacatacatgaaaaactgacttttagaggttttattatctgcaggtggttgcataaccaataatttttttttttttgagacggagtctcactctgtcacccaggctggagtgcagtggcgcgatctcggctcactgcaagctctgcctcccgggttcatgccattctcctgcctcagcctcccgagtagctgggactacaggcgcccgccaccacgcccggctaatattttgtatttttagtagagacgagtttcacggtggtctcgatctcctgacctcgtgatctgcccgcctcagcctcccaaaggcataaccagtacattttaagagtgataactgagttctaagtccatgccataattcaactatgctgtctagattttgagggtaagactcacattttattatttttattttcatcacttagttttgtgtgaaacataacagccgctcagtaattatgtgttgaattaccaaatcagttatgctatgctgaatgttataattaggctataacagttttccagaatgagaataatcatttttcactaaaaagtagacttttattcatatgaaaaatatgactgatgggccgggtgccctggctcatgcctgtaatcccagcactttgggaggccgagacgggcggatcatgaagtcaggagctcgagaccagcctggccaacatagtgaaatcccatatctgctaaaaatataaaaaattagtcgggcgtggtggcgtacgcctgtaatcccagctacctgggaggctgaggcagaagaatgggttgaacttaggaggcagaggttgcagtgagctgaggtcgcgccattgcactccagccctggagacagtgcaagactccgtctcaaaaaagaaaaatatgactgatgatctagtcatat

SEQ ID NO: 916077 - DNA, 4001 bp, Homo sapiens
ttctctgaaccttaaaaatcgggcacaagcctttggccaagcaattacccacttcaactttgctttaatgtagaccagccttggggccaggtgcggtagttcacacctgtaatcccagcactttgggagcccaaagcaggtggatgacttgagcccaggagttcgaaatcagcctgggcaacgtggtgaaaccccatctctaccacagatacaaaaattagccgggcgtggtggcgggcacctgtaattccagtactcaggaggctgaggcacgagaatcgcttaaacctgggaggccgagattgcagtgagctgagatcacgccactgcactctggccggggggacagattgaggctccctctcattgattgattgattgattgatggatggatagacagacagacagactagccttgctttttgccacagattccctatactaatcgaataactaagcacctgaagtcagaatacctgagttcacatgctggtaaaaggtattctgacttcaggtgcttagctgtataaccctggtcaagttacttgacctttctatgaccctcctgccgaatgcacatgacgacagcacgctcactgggttagggttgattaaatgaaataaaacacataaaaagctagcccagagcctggccacaagatgccttcaataaatgttcattgttataatttacagagaaaaaaaggccccaagtctgagaagcgacatgcctggggattcttgctaaaggttatcattaaatctaaaagtcaaacaaacacattcctgactctgggatactctcctgattcgtggataccatcgctaacagtagtgacacaaatcaaataataagaacagccagaatcataaccctaatgacagcagtggccacagcacttaatacttatagagctgctaggggccactgtcctaaaagaggaagaaggccaggctgctgaatcacacacacacaattacagaatcttctccaccctttgttttaaaaaacagttcactggcgcccaagttttgctaaaaacaggtatctaaaccgatgacggacaacgtgtaatttcttcataccaaagaggtggggctgtgcagggaggagggggtggcgctcggctcctgccagatggaaaagccacatgaagtggagaaacagccggattcaggattcacccccgaatcaaaacccgatttttgaaaggcaggaccttccaattcgggcaatcgctaggttctgcttgtaaaataacctctgaacaagtgtcatctgccttccgcgccaatcccctgccgcggtagaaggttcggattaccgggcagcggtgtgatttcggaaacccgagagcgatctggccacctccagccttccccggtctccgagaatcacagccccacttgagaggaaaacaaaagccggggcagcgggggaggccgggccagggtgccctccatgccggatcgcgggcgccgggcacccggggcctgaggaatgctcaggtgacaggcgcggcgcccggggcaacaggtcccgcccggcttcggcctcccggggtccggccgatcccacatccgccccggggcccaggagagggagcggggcgccagggagagagcggcgcctggggcggcgcaggggcaaggagtccaagctccatcttgaggcgggcggaggaagcgaaggcccggctcggcgctgacagggccgccacttttccagctccggaggagccccccagggacccccggcctccggcgccggccacccgagactcccgcggtcccctcccggacggctccggcgcgcgaggctcggccccgctcccggacgccgggcttcgacccccgacccgaccctgggcgggccccgcaggccgggaagccggcaggggagcagggggtgccgggaaagggagagggcccgcgccgccccctgctcacctcctcggacgccgccggtcgccgccacctgtcccactgcagcagcagcagccgccgcggccgccgcctcccgcctcccggctcgtcggctcggggcgggggagagcgtgacgcgccgccgccgccgcggggccgggcgggcgcgcgctgccaggagaagacgccgcgcggctcctcccagcgctccgccgccgcgcccgcccggccggcccggccggcccggcccctcgagtccgcaccggccctgcggcccgcgcccggccccgcgccgccccgccgcctctttgtctgcgcccaccgcggccccgggaggaccctggccccggcgcgcccgccgctccgccctcgaaccctcccgagccccggcttggggagcaaggtgcgagggaaaacccacaggcctgctccgaggggcttctcgtcatttctgcaaagtgttcccagaatttgcaagtcacacccaagagccccattcagcctcgacctcagcccgctctttggggctgattcatttgtttgccctccccttcccgccagacaagggtgagaaatcctttgaaacaggctgcaaggcgcttccgaagcaggttaagttggggattgggaaggatcatctctgccctcgcctccctccagggaaagaccctggatgaggcgtccctggagaaaatgctgaaaggaactgtagagcaggttaagcttgggaagaactgtatctgctccccacttccctccgggaacgaccgcgggttaaaaatcctttgaaacgatcccagggtttgctccgttcgtttgagaaaagccccttttattcgccctggctgcttggacggaagccctggttagtgtcccatcctccttcccccctgggatttcctttaaaagcttttgaaagggacaggagggaaggctgcaacagcctgctcggggctggggtagcagagggcggccagcatttcactcccatggaccatggcaaccccagaagccttacatctccagggaggaatttgcagctgtcggggaagcccaggattttgtggtggataagggggcaggggcttcctcctccttgccagtagaagagaataatcggcgggtgacccctctagctgacctttattcaaagcaccgtgctgcctggaccagcaggaagagggaactgctctggtaatgcacgaagttctgaactatgtaaatttgtctcctggcccctcctctccattcatgtctgaaatccctcgaaatgctgttacctaattcaacatcgccctaatttacaggctgcaaggtcaggtggtggtggtactcctgaaatcccatatccatattcctaatctgaaaggcgcgcctcaccccctaatctaaacagtcttcagctgtaatcagcaagctgtggaatcatagatgtcataggatgaggcacagaccacttctaatgggggagttcagctaggaacacttatgggcttgtcttttcttctctactcagtaggctgagcctgtctttattaaaaatattgttttggggctgggtgtggtggctcacgcctgtaattctagcactttgagagacccaggtgggtggatcacctgcagacaggagttcaagaccagcttggccaacatggtgaaaccccgtctctaacaaaaaatacaaaaattaactgggcatggtggtgcatgcctgtagtcccagctactcgggaggctgagacacgagaattgtttgaacccgggaggcggaggttgctgtgaccagagttcaagccactacactccagcctgggtgccggagggagactctgtctcaaaaaatatatatatatatacacatgtatatatatatgtatatatatgtgtgtgtgtgtgtgtgtgtatatttgcttgttctcatgggttattctatgtcattgtcatgttcatcatttgcttatttatttataattatatcattttgttcatcatggagtcttggcgttaatttttttttttttttttttttttgagatggagtctcactctgtcgcccaggctggagtgcagtggt

SEQ ID NO: 916078 - DNA, 4001 bp, Homo sapiens
atttttcacactacagagtacttactttttttctaatacagttttagggtgccatacgtatctgcaagaaaggtttttaaaactaatcaattttgacacccattcatgaaactttttttccaagataaagaaaagttggcaaaaataattcgagacatttgccaagatcattcaaagaatttggcttagaatctgagtccctgggaccaaacaaaaatattaacaagtcaggtgggtttctatttcatcctggctggatatttttaagtgcttgctgcttgttagtcagggaagaaatggatcgtaggtcattaactttaaaaaaaaaaaaagaatatttattcttttgaatttttcccgaatgctttgaatggatttctgttgcattattggctgagtatattcttgtcaggataatccacttttagaggcttcatttacattagctatcactccagagagccatagtaacaggctgctgaattacccaagagaaattactcttgaaagcaatcattgtgaatgaattttcatcacttggtctcatcatttcatgctgttttgtctctttcctttttgcccctgataaaagatagtcataaagagggcttttgttatgatctcattttctttagaaaacttggtcttattaatcatagcagccagcttatggaggcaaccaaagcgtatctctctgtctctctctcacacacactctgtcacacacacacatacacacacagagtttttgaaatgcatttcaatttgtggggaacataaagactaatttacttccatctacgatatctcacacaaatttgcttttcatgtaacttcattggtacgaggaatatgtttaagtacaggggcttaaatactgtactgaatactactgtactgagtttgttttacattaccaacacacgcgcaacagttgaaatttaaaatttttggacaaaaacgtagaataaataatatgttttttacttacctgtccataatgtatacctggctttatgaaagtgacatattgctcacacatcaactcagggtaggagaatatagaaatgtaaaataatatcttaagaagtaatttgctaaatcgtattctgttgttttgagaaaataaataaataatcagcttatttatttcagagttagtctccagatcacactcaattactaagtttagaaaacagataatagcacaaaggctgctagcagaattgtctgcggcaggtctgtaaatagaggaatgaaaggagcatttgttgaacatcctcaaaacaagcctaggagatgattattatagtctccattttatagatgaggaaactcaggcacataaagtttgatttccttgctcatgagtcatgcagctagtaagtaaaggagaaacacaagtctgccagaagctaaggcctgggttttcttccttgggaaaactcagaaatactaagttgcagaaaacaatcacaggctacaatggaacttcgccagctctactgtgcatatgaatcccggggcatcttgtcagtatttatattctgattcagtgagtctgggatgggacctgagattctgcctttttaacaagccctcggcagattctgatgctgctgttccagggaccaaactgaagtagcaagatacttaagattacaatataaaattttaccttcaacccaaatatgttatatcctactccaattctgtatttttctgatagtttcctttcttctcttctctgatctttttgtcacttttctctattcctgaagaaattagagcaaaccactgcaacatagtttttctagcatcctttagctaactgcaatgaaatgttaggtcaagtgttatttttccttagttggtaaaaaaagaaatgtgatttgtggaatctgtggaatctgaatgctaaaagagaatttactctcaccctcctttatttccttcctctgatatttctatttctcagacctccctcttttttttaccttcttccttttttttttttttttttttttttggtcacacttgttatactcaatctctggcacttttacaaaaatattttaaactctgcattatcacttttccccagtattttctctccttttatgaaattgagccctatggctcattttatttcccttagctttttagttagatagcatgacgttataattcaggcatagtcaaagctgcaaacagtagcataatgttattatacctgagttagactgcctgagttaatagcctagggtgactagcagtcttaacttgggttagatatttaaactttaggagctcagtttctcctctttaaggtaggataatagtggtatacatatttgggttatttatgaaaaataaatttgacaaaagttaattcacataaaggacttagcatagtgctttgaatggtgtcagctatatcataattaaagattatttccccatggggctatgggattatctatctggacaactgaggatggtggcatgtagcccagcagtttccttacatgctgtgacccagcaagctgagccagctctgtcttaggcacttcctggaagcaggcttattggtgttttcaacacccagagtggatcatttgttaactccttcctcctctattccgtacatttctttttcagtaataatcctgtaataatcagtaataattatgcttttcttgattcgctctttagttttataacaaataccagttttaaaaagaagaaagctgtaatttcagtgatgttacttagtcttgtaaaaatacttcatgtacttaaaattgtgtctaaaaagccaaaaatattccagcatgaagttgacactctgttttactattcaaaattttaagcacaagtaaaaactctcagtggttccatagaatgacagaagcaagcaattttggttcacttattttgtctacacaatcactgtgttatcattcttgattttgaatctgtgatttgaagaagaaacatgtggtaccccaaagactagggccatgaaataccctaagtatttacctgagtccttaagagtcagggactgtatacccgaatgtttcccataatcattttcatgttgaattcaatgtttgttaaggaacaggtaataaaaatatgcaaacttgaaagtatttatatatttaaaagctcagtggtgaccacaacaattatttagaattcaaaccaagaaaatgttttttcagggaagagtatttgaccactagtatgatttagaattatgatgcatggcaataattataccaaactgcatttcagtgactctattattttttcagattctctacagacagtgcagcctagtatctcccagacttgtacttcctatggccctgcacttggggccccactgcctggtagaaatgaaggttagtgttcgaaagtatttaaagaatcctgctaatccctattttatccataaatgtcatctgtcataaagaaacttttagcagtttctcaacttctgagaggtcttgtgggaggttttgccataaagtgctcttgttgagctcttgatatctataagctgatgccctgggcttgtcccaaatgatgcctcccacccattcatcagcaggacactatcccagttcacacacctatgccccatctccacatatgtttcaccaaaaccataaattttgaaatagagtcaatataaatgtataacatattgtattagggctcttcagagaaaaagaaccaatagtatatttgtgtgtgtttgtgtatgtgtgcgtatacagtcatgcactacacaatgacatttcagtctacaaaggattgcatatatgatggtgatcccataagattataccatatttttactgtaccttttctacatttagatatggtagatacatacatacttatcatgatgttatacatacttatcatgaggttacaagctacaccatgtagcctagatgtgtagtagtctatgctgtccaggtttg

SEQ ID NO: 916079 - DNA, 4001 bp, Homo sapiens
gatcaggagttcaggaccagcctgatcaatatggtgaaacccagtctttactgaaaatacaaaaatcacccgggtgtggtgacgggcgcctgtagtcccagctactcgggtagctgaggcaggagaatcacttgaactcaggagtcagaggttgcagtgagctgagatcatgccactgcactccagcctgggtgacagagcaagactccatctcaaaaaaaaaaaaaaaaaagactggtttttcaacagctattcccacccctctgcatggaaatattcacccagtcaattgttttcctagtttgggtaatggccctctgggcaggactggagtggggcacacaggagaagctgcaaactatgtttagaagcatgtctgggaaatgtcatgcaagaaaagacatatttaaaggtaggctttgcatgaatggaaaaggagagtaattctatgtagagcagagcctcttacttgcagtgagagaagcaaaagtggggaagcaagaggaattatgcttttcatcagccaaatttgcaggtaggaggattggctcagtcatcttggctgaggctcatgaaaccaggtgtaaagaaagtggactagattaatttcatccattacaggaagaggagccgtgaaagataatccagaaatcattgggatttgatggtagaaggtattttgggactattccatttgaaatgagaaggtacctgacattctttgaattcctttcaagcaaaggattaaatttacccatgagttgactcagaaaaaacataaaaagtattgttgctctgctcagagttttatctaactcattctcacttcttattccatgatgaaatgacataaatgaggttttttattgttgttgttgttgttttctggacacaaggcaaggtagctacctgggcagagctgttttatttctctatgccgtggagagaaattggttaattggccatggaaggcagtcattaagatgttcccatgcgagtgaactttccagggttcccagcttctgcatccttccctgtccctcaattccattgttggtgatgacaatgtctctcccatcagcctcatgaagttctctctcatttattaaaatttgctttcaggaaaaattttgaaaatgtgtccagtaatgcctgattggccccttatcctaaaggcttaaactggaggaaggaagctaaactgagaaatcttgcaaatcattgagccaaaaacgtattaatagcaagatctatcatttattgactagtatgtggcaggcagtgcccttttatttaggcagggagagttgatggggggggcggggttcacacatcttaaagaggtgctatctcctcctatataaatcatgtaagtcaagagagtaaggaattgtctttgtttggttatattcaggggattagagtatacagtagaagatcccaagaaaccttgggatcattttagactaagaaatgccaataccgccgggcgcggtggctcacgcctgtaatcccagcactttgagaggccgaggtgggcggatcacaaggtcaggagattgagaccgtcctggctaacgtggtgaaaccctgtctctactaaaaatacaaaaaattagccgggcgtggtggcgggcgcctgtagtcccagctactcgggaggcggaggcaggagaatggtgtgaactcaggaggcggagcttgcagtcagccgagattgccccaatgcactccagcctgggcgacagaacgagactccgtctcagaacaaaacaaaaggaaatgccaataccagcagaaatagagccaaatcatgaacataagctaaacaaatgttggcagtgtagcctagtggttaagagagcagactcttaactagaacactgcactccatgtcctcactgtagaccctcactgtggggttctaattaacccctgttacttaccagtggcagtcttaaggcattccttaagttcgttgtgccccaatttgttcatctgtagaaggggtaggatgacagtagtgtttactttataggcttactgtgagcattaaatgagttactactgtatttgtaaagtgcttaaaatgctgctccaaaagagtttgttaaacacttaagaactgatttacttgcatctaaactgacagctctcaataactggaaatgatcaagcataggccctggaatataagcaggtctacatgaaggcaaaaatgttcgtttcttttgttcagccctgtgcctagatcaatatctagtgatcatgctcaagaaatattgttgaatgaatcaatgaacctaccgaggtagttacataaaagagttctgcatgagtacaaatctgggcaaagtgacctccaaggaaatttccacttttagattctgtgatttccttaaggaactgataaattggtgtgatacaatgtaaaaaaatgtgcctatatgatttgagaaaaacttattttctctccctcttttttccttccttccttcctccctcccttccttccttcctccctcccttccttcctccctccctcccttccttccttctctttcttcttttctttctttctttctttctttctttctttctttctttctttctttctttcttctcttctctttcctttctttcttcctttctttgtgcctttctttctttctttctttcttctctgtcctttctttcttcctttctttctttctgcctttctttctctttgtttttctttctttccttcttttttcctttaagcagaccatgtctgttagatgaatgcctttttctagttaaaaggttaaacaggaaagtgaagcacaattatcaagggtctccagtcatctccacatgttcttaatcattatcttcttttacagtttcatatctccaggcctttcattgggtcaggttggcatttcgctgccctttatgtgtgtgacaagtgaaaataaggaaagaaaaaaactcaagtgaagaaaatcagaatctgcgcagcagttcctgggcgtttcagctgcttcccacatcacctgcctcatcaagccccagcatccatctccttgctcatcttacaccctgtgtgcatgacaggcccaccattcatttatcagagcaaaggctctcccactattctggttcacccccctacttagccagatatacaagaatatctgcacggatgacctgcctcacctgggagctcagaggagctcagattccattactatcgcaccaaggacagatctcccagcaagaatgacagaaaagactaactgcccccaaaatctcccttccaaaacacagttctcttaattctcccaagaaaccagaatgtgactgctcacctctctaaggacctgaaaacaactggccatttcagctatttaaatcaactttaaaaaatccaaccgccaaaatattaaaccattttggttggaatgataacataactaacctgctgacagctgcttctgctaggtgcaaaaatggaaaaaaaaatacttctaatcaggtcaaatcactctacctttgggattctaaatttactcatattctcaaagaaatatattcagtcatagtggggaaaataggattattcctttagctcgataagcaaccagaagttcttccttcaaatcttgacatttaatcaatcagaaattgatttttggaaaactgtttcctatgaagctatctctgcctgaaggatttttcttttacaatccagactatagaaggaaattcacaacctggactttcacctccattggtcagagttttactgaccaattcccacctctgccttacacctaacggaagtttatgcctgttttctcttcacataccccaacagttacaaatggttgttattattaagcatcttttattttgtggcctctgattacatggtcccctaaattttgacctaatcacaaaagattggtaaaatttcttaacatattaataatattttgtttatgtgtcaatatctt

SEQ ID NO: 916080 - DNA, 4001 bp, Homo sapiens
cagcagagccgtcatcctaagggattatcgggctggcctagaaacatgacaaatcccgtccctgcttcccacccccacacccaagagaacacattcgaaaccgacacatttctatgtcctccacaagaccatcaaaccacattccctgaaacccactttttatacagaactcaatcccagttcttatctaccccatccctcttcccttcaaccaccagccaattcagaatggatgcgggactcatcagactccaaatctccccatcttctaccagattcagcctggtgaggggctgtggggaagcatatttcctccccttccacatcaccccccaccccagcctccacgcttgctctaatcccatcatcatgccaacacccaggctcccaaagcacaatcatgaggcagagggaaactgagtcaccaaaaggaacctcatccccagtatctcacggtgagcaagaaaccctgatttccattctttcctccaaccacacaccagcaagcctttggcatgggaaggctttcttactgatgaccaccataaccccttcctgaatgctgaggagaaagccacaagatggtgcacaggaggcggtacaggaagtggcaggaggctaggaggcgaggctgaggtcagagatgcaggcaaggaagagagagcggtggaagggcagggctgggcgccctctgcacagctccccctcccaccctgcttgtcttcccaggtctctgagcctctgtctcctctcctcctggccccctgcggtctctgcgtttgctccctttcactcctaggctcccgggctcctccttgactcactcttttcctgattttcctcattcctccctcttttttctgcctccacctttacccttttccatcccctccttaccccctcccacgcctcatctccggtcttctccttctcagctttccctctcatactcatttagcgccccccacacacccacttctgccctttcctgccagtctccatccgtttccacctacctgagccctctgcccgcaagccctccctcccgtcctccctctccgtctgtccgacagccccgcccagctgaatgtatccgctgtctgccagagagggcagctctggtaacccacagcccagctgatgcaggcaaaagggtctgaatgcagaggcacacgcaaaaaacatacgtgctccgaattgctgaactgcagcaaatactttctccccaggatgggatggaggcgaagcagatggatctgccacacacccttagcatgcgccagtgaaagggagagccgcggggagaggcctatcaccggctcgggggcagtccttcccagacccgaggtagccaccagcgtgtagaaattaggggaaggggagaatagagaccccaggacgggaatggagaccaaatgggagcaagatgaccagcaagagaaacgcatgggtagagatggaccagaaaggaagatgtagctgggggaagagaaagagaggagacggagcaggtctgagaacggatgggaaggagggtgatcagaagagggccagacacctgtcaggtgccagggagcctcgacacctccttcccacccccaccccgcacggcgctgcccgacgcccctctttcggtacccccacccccacctcactcacctttgttacaggagcaggacgcgagcagagaggccagcagaaggggcagcagcaggagggtcatggtgcggcgtggggcagggcagggccaggcgtttgcctcccctgggagcctccagcctgcggattccaccttgcgggagggatacagggggtctccaaggagcggggtacagcagggcagggacggaaaggagcctgccgcccacactagtccataaagcgggcctgggcagatcccaatctgggtagctgaggcggtggacttgcagcggcttcccgtttcccccagcccagcgtcctcactctctcactcccaccccaaccccgctactgcaggatgacgtcagcacagccgggcaacgattgatggggccgccggccaatcaggtgactgggagggggggggaccaggtgctgcagcgggggagggagccaatgagactggggcgtcggggctggagagtttcaaggctccttcccctggctgcaattttgggggagccgaggaactgcgggggctggggaggaagctggagagccacggagggggtgggaaagaagagggacgtggggagaaagaagccagaagccagggggtggggaagagagacgtcagcgggacctgagggcggccaggaggggtggcaccgcgtcaccccgccccccaactctgccataacctgtttccacagccccttccatccacagatccgtgctgcgtgccctctgggaagggtgaagtaaaaccctcagtctgagcctgagaaatcctggcatttgtagcccagggctgcgaggaagccacagggcggtccgcagggcggtatcgaggctctgggacccaaggaggggcaggacgtcgtgcacccctcgcgcacgcacctgtcgggaccggccgcctcctcctgcctacctgtcctgcctccttcgccccgaatttcaccttaaaccatgatgaaccaagcccagtggattctgaagcccgggacgatggcaggttcgagagagaattgggcagctgggggcggggcacaatattatttaggcgcctccaccccaccttcacagaaatacatctggaaagcatgggctgtcctagggctggggactgggggttacggtctcatcgatgactcagagggagagaaaaccccctgggtcccaagccaaaaagaataaaattctccagaatagccaacaaactcctctcaggctgtctgttccggactttgaactcagcacccctcgggctccacctccctcctaatggctctttaggaccaagagtctggaatgccactttggggtcccagttgagcacactacctgagggagctctgagagccaggcctacagggtgctcttcatggtggcagctggccatcctcaccccctcccctcacatcttccaacatcactcagtcccaggatctcaggatattgttggaactcatctccacctcacacagccagaccagcctcaggtgtctcccaggaaagactgcccctcaggccctgggacggttcccaagcctgccagaaatgaggtggaggccaacactgacctttggatggctgagttttggatgactgacagccccagatcctgctccaggttccttcctcaggaaggatcctgctccaggttccttcctcaggaaaagccaaggtcaggcgcaactttgccaaatccctgcccctccttcaggctggagacaccacccccaaactcaccatgcggggagggaagaagtctggtagggactcttattgcaacagggccccagccttataaaaagccctggtaacccggccattacacatcctgtctctgtgtgtggagctggctggaatctctcagcctcacctgccagacaacaccccctccttcctcaccctgtctcctgcattctcctgaaaccttcatccacacaatgcctcccaacctcactggctactaccgctttgtctcgcagaagaacatggaggactacctgcaagccctaagtaatggcctcgccctcccagacccctgtcactccctttctcccctcttccttcctgcttcttggtcccatggagaagagggaatgcccggggttggacactgtggaaaggctcaggcggctggcaccagacctgggatccatttctaaccaggcattggtaggagggggtgaatccacagtcccagacccaaagaagggaaactcacagccctgaggggctgctgcaggcagaggagctcctggctggctagcagcacccctactaacaggcagcccccacagacatcagcttggctgtgcggaagatcgcgctgctgctgaagccggaca

SEQ ID NO: 916081 - DNA, 4001 bp, Homo sapiens
ctgtctctactgctactacacgtggttcggtacatacaacagtgcctgttacatagtaggtaggcagtaagtatgctgaatgaatgaatcatttttttgtccttgaatctgactgtaccttaataagcctttccctcttttgttatgccagtttgaacagggtttcctgatatatacaacctaagagttgtaaatggtattaacagttttgttctccatttactgtgaatatgattttgatctctagttcatttcacaaaaatgatatttcactatattactgcagtctggatgcacctacttctctcagtcctttttagtttgtaccctttctaagaatgtaaaaatatcccaaagtttgtgagcttcacaaggacaaaaactgtgtcccaatcatcttggtattcccttggacatgtatagcagaaattagggctcagtaaatagctactgaattgaacaaaatccccaggtccttccctatctctccttcgcacacttcctattgcactagtgttatcttctgagtggtggctcctatttgccttggtccatccaggacttcttttgggttgaaacattaagaaaattagtatatttatacttttttggcatctcccgtttttgaacaagactggttaaatgaaaatcatttacccatatattaatatgggtaagcaaatataggttcaaaaagaaaaagagatgacttcaaaaacagtcatctctttaaaaatcgaaacatcaaaaggttaacataaattaatttccacaataacaacacattcaaatgtagttaggttgaagctatatgtgtaaattcattcttggcacagaattcgatctcccttcttttatgaataacatcagcttgtaactcctgaccaatttggcaatgtatctaaattacgcataattaaaactgtccatagggcaggcgaggttccaaaggtatgattaaatgatttgtaagtattaatatatcataaaacagtcagttgtacaccttcccactgagtctcacgtatttataaatgtagggagttttctagattgtgctgactcacaggaagatagctggagtatttttcaaaggttaggaaaagatctccaagctgagcttgaaattcagctctgacaccccgacactcaactccattcatgaacctgatgcctccctaatcgagcagcaccaagcagttatcagaggctgagcaacaggggagcttcgatggcccccatccaaagaagttcacatattatcacagatgttgcaccggggtggcctcctttacttttccccgtaaggtcaacccgggaggaggggacggttggggaggtgtaatctccccttttacggatgattctcaagggcggagacaggaactgtcccaggttatgaccattggcagctacggaacaaggaaggagctggagcccttcctcctgggctctcagcccggccccaggcaccccggatcttgcacatccctggcatgagagatggcccccttccaagagcggtggccccggaggccccagcccctccagcagcccgactccctctcccgacccccgcccaggccgcgccgcccactctcgcacatgcgcacctctggaaggcccctgaatccagggccgcacgcaggacccagccaatgagcgggacccccgccaggtgcttaatgttcttcagggggatgcctttgctgcctccccgggccagaattagggctgccaggtgcgggggcttctccacacctcggccctggccgccgcgagagttgcgctgcagcttcggcggccggccccgggacggtcgcccccgcgggttggagacggaggtggcggcccccttctccaccgagtccatcttcctcccacgccttctccccagcttctccacatccgggagctagtccctcaccacctcagctcggcgccgcccgatccccgcctggcagctggcgcgcgcggccgtccctcgccccgccccctcccccgcccctcgcggtgctcgctgggaattgtagtccgcggccgcctcgtctggggccagtaggccaagtaggctctgatgaggtgaccccaaaactaagtcaagcagtgggagtccagagatatttggaggaagtgcggcttttggggtgcttgcaagtgtctgtaaatttctaaaattaaaaaagaaaaaaagtatttataattgctgaagaacttccccactttagaattgtggtgggtttcccgttgcataccttgatgcaccctgacacgaatccattttatattttaaaatgtacattttaaacatacacctttttttaatgcccctgggtcattttttccaagaaattactgaccagctcattcaaatatcctacaggcgccttaaactcaacgttttaaaaactccatttttcatatgctctccgcactttgatcgacatcagcattccctagcagcagaaatttggaagtcagctttactggtcacctctagtgtggccgacacttggttttttggttttgttttgttgtctgctaaaaatcttttccttttaggaattgatccctctctcatccggtgagggtttccctcacattctctgcactgtgtgtgacccaagctggtccatctacgcaccccattttccttaacacacctgtggtctagggacaggcatatgaccaagcagagcccactggagtcctttccagagagtcttggaaagaaaggatctttctcgtgctgactgggtgctaaggaccttgttaacctgaagcctcagggcaagggtagggtagggcggcaggggggctttgctgttctgaaatgggctggaagactgatgttctccctgaggaagcagaacaatgacatgtagggattaaagagaaagaattctggaggcatcatttaaactcttttttttttttgagacagattctcactgtgtcccccagaaggctggagtgcagtggcacaatctcggctcgctgcaaccctctgccacccattctcaagcgtcctgagtagctgggattacagaggggcaccaccacacccagataatttttgtatttttagttgagttgggggtttcaccaggttggccaggctggtcttgaactcctgacctcaagtgatctgcccgcctcagcctctcaaagtgctgggattataggcatgagccgccacgcctgagcatttaaaccctgatccagccaagaggctcaaagacatacacccacacacacctctcttaggaaaaaaaaaaaaagagactttaaagcaggcatctctgacctagcatgcattttgtctttcagcatgtttgcaagcctatatttggaagtagagtcttttacatttctgagatggaggctgatacaaacagaaagaatggattgtagtgtgtcggcttgccttctcccagagggcaaaaggattttgtacttctcaggtcttggccatttttgaggggagagaagaagtctttgatgttttgggtcctatgagaggtactggatactttacatctcttagtctgtgaattaactgagggcccagcccttcctgggactggtgctggaagaaggtgcttcgtgcagacacagataagggaggctgtgagcagacatcaatgccatgcttgggaaaggggcaggctctatgagccattccagcactgaagggcaaggggacaacttgcccccatacactggctctttgagtagggcctttgcagttgctgtgcctcagagacaccagcactgagcttttggtagtcatgtgaggacccctactacaccccaataacaatcttgattcctattaatgatttagttgcccttctccacagtaattccctacaggcccataaatcctagtggaccacagacacctgagtagttttgactcctggggcatattggtgtcctctaagctgggaacagagcaagtggcaccactgttacttatcaaatgagattatagcgat

SEQ ID NO: 916082 - DNA, 4001 bp, Homo sapiens
gtaaacatctaagagatgggacttcagtccaacttcccccaccccattttacagatggtgaaactgacacctggttactttatttattccatgaacaatgaccctaatatatgctagttcttgtgcaggggactgaggatgcagaaaaaaagtaatatcccagatctggcctctaggggcctcccggctagaaggagagacagacaagatgactggtcattagaacacggtgtggtaggagccgtgataagggagggataggccctgggagagcctagcagacaagccctgacccagtgcgggtaggggacttctcagaacaagtcaagccagagaaaggcatgacttgcccaaagttaaggttatctgttccctgaagttttgggggagtccaaagaaggcccctgtgcatcaagagataactctcctgtggacctcccaagtgtatgacacatcatcatttgagtgccactggtttaggttaaagaaaaggccaagctgcctcctcctgcaccagaggcctgaatgacccagtcacactcacctcagcagccaaggcatttagaggaatcttaccttcaaaccagtttggaaggggcaggagatacagcaagaaccacagagaagattggtcttgagaaggaggtaggggatgcaaaagggaagttgagggctttccctaatagaaaaagaaagactcagaacctggacgttcaggcgtgtgacctcagaccagtgatctggcatctctgaaccgcacaggtctgagtgattgggcttatatcaagtagtagttccctgatgttgtaatgcttataattttgccaaagctggcttgcccatttaaaatgggctattctgaagacagaggagggagtggaatattttcaacagagagtgccggcaaaggttttgtgtcctttatatacaaagaacccttagatatcaattggaaaaagataaacatgcccccagaggagaaaaaaatgggaacagacttgaacaggagagtcagactagaaatgtgaaaaataagtttataaaagagaatcaacactaacaaagaaatgaaatgcctattgaagcatctagatattattctcgacttcacatcagggaaagtttaagggatgggtagcaacaaggtgggtttagtatgtgagaatactgtgccctggtataacatcgtagagaggtcaagctgccacggccttccagggtgcagtgtgaccaaaagctcagaagtcttaaaaataggcaaaccttaaatctagcaatttctaaaaggtattcataagacacacacacaaagatgtcatactaaatattcattgcagcactgttctaataaaaaaaaagaagcaaatctattatggaaaagtcaaataatcttaagatagcctttctatgcagccatgaaaaatgtatattggaagaatataggtgatatggaaaaaagttcacaatctgtggttaagcaggttaccaaactagatgtggaaatccacattcatatatttagttgtgtatccttgctatttctttaaacaatgaacatgcattacttttgacatctgaaaataataacaaaactcttccttttaacaaatatgaaattataaaaagaaacaaacttttctctctgttagtattcattccccttccctggcccccctcagaagacacccaaggcaagtgtgtgatgataccttccctctggtctctgcccggaaggtcttcctgagggttccctgtgactgcaggccactcgaggctgttggggagacttgcacaccctggcttctttctgccaatcacaggctcctctggctgtggctgtttgcccagaaagcagttcattcatttgttcattcaagatccccctctgaacccccagagcgccgcagctggaacacccctatcacccggaggcttcccagggagcctgctctgtcctgagctccctgctggccgccggggctgcttccctgaatgggactgggacagaactcagccagagaaacagctggagggaggagagcaggagggaggggcaggaaactgggctgacctagggcgggggcggctagctgcgtggagagggggctgcgaggggagggtgcccctaccagccggggactgggcttgtgggtggcggcgggggcccgctggggacgacccgcccctctggcagcctcttgcagccggggagccgtgcccactgagcgcaaacagggagcacatctgagcacccggctgctgggggaagtgcaagcgcctctgctcccggtgaggggctcaagctccacactgaccgagagattggctgcctctcaccctgggcctttgcaacgctgttcctcccacctggatgctattcctgccctaattcgtggcccgatggtctcctactgcctcttcaggtctcaggttgaaggtcacctcccagggaagccttccccaaccctcgggggctgctgtgcccctcagggtcaccccatcacctcactgatgcagtgctgtccttgcctgttaagatgtctctctccttgcaccgagaactccttgcaccaggaactctgtagggaaagaactgtattctgttccctgccctaaccaggcgctaagtgcctggttcatcggctgtgtggtcaccatcattagtggaataatcaaaacaaccgacagccaggcagcgtgctaggcgatgcgtacttactcttcacggcaaccctagataacaggaattattactactccagtcttaccaataaggaaactggggtacagagagattaagtcacttgctcaagaccacaccgccagcagctgacagagctgggattccaactatgttgtctggctcggaggcccacccttggcctccagactgaagaaataacagaagtgcccatgtgggcccctgtgccaagtgcttccatggagtaagccgtgtgaaccaccacccacgtcgggggggcatcacttgcccattctacacatgaggatgctagggccacagagcagaagtcgttttgcccagggcgccaagctcatgctgaccgagccatggctggatctgagtctgtctgattccaaagccaagactgcctacgactgcctaaaataatatttttagaaagaaaaagaaaagggaagggcaggggaggggaagagaggggaagggaggagaagaaagaaaggaagaaaagggagggcagggaggaaggtaatggggaggaggggaaggtgaagggagagggagatggggagggagggagagaaggagagaaacctgtgttttgggcctcaaagtcttgggcaggtggaggactatgtcctcatcgtctgatcagccttagaaccccaccgacctctccccaccatcctcaatcctttaattcagtgagctttacacttagaaaccatctaatttcattcttccatttcacagataacttgaagcccagagagattgagtctcttgcctgaggtcacacaggtctctatagtcagaagtcaggcccagtctacccaactgtcttccttgctctcttcttctttgggcttatctagggaacaaaacatcatatcgaaacacttactgtacagatgagaacactgaacccagaggaggcaagggactcacccaaggtcacccagaagttagtaattgtattggtccgttctcacactgctgtgaagaaatacccaagactgggtaatttataaagaaaaaaggtttaattgactcacattttcgcatagcaggggaggcctcaggaaacttacaatcatgatggaaggtacctcttcacagggtggcaggagagacaatgagtgccaggcaaagggggaagcctcttataaaaccatcagatttcatgagaactcactcactatcatgagaacaggatggggggaaaaccacccccatgttcaattacctcccacctggtccctcccatgactcgtgaggattatggaattccaattcaaga

SEQ ID NO: 916083 - DNA, 4001 bp, Homo sapiens
ggctggaggagggagtctctgcagaaaacagagcagccacctgccaatggcaggtttccagtgtggtccctgatcccatagcagccagagcccaagcccacaaggagccatgttctggaggtgcctttggtggccccaagcagccctgagaactgccaagttgaagctgctttttattctgttttaaaataaaatagtgatcacattcccaaggtgtggagacacccctcccctccacgaattagtctcagctttcccagccactcaggaaaggatccaaaggaattttccacccatgccttatgcagagcaaatcctggtggacaacagggtgcctgcctcacttccaggcaagagtcctcatctccctctttgtagcactcacatcttcccaacttgcctcccctagggccccaaggtgctgacaaggagcctttgtctccctcttcctggcctccatgccctttgccaagaaccctggccatgacgtctctgctgatgcaggtttccaaggctcattttgtaaccatgagcagagatctttgaaaccgctgcctcgctgagccatgagaaccatccctgtcaaccctcagggtcctttccatcccttactttgccccagcctcccaacaacattgaggaccacccctacctcacaggtgagtaaactgaaagtcagagaggtcaagcaacttgcccaagatcacacagctagaaaatggaggagctaggacttcaacccaaaagccatgttcaatgtgtgatggttaagggtacaggttctgaagccagaccacctgagttcagagccagctctgtcacttactacctgtaagacctctttgttgcttaaattctttcctcagtttcccaatctgtaaaatggagcaatacatgcctcacaaagtacatacctcataaataatatataccttataaagttagtattaggatataagagaaggaatataaacagctagaataataatacctggcccatggtatgttctcagtatattatccattgttattattgttgttgttgttgttgagtataattatgaatcttaccattatatgacttggcctcacacataaatgtggcatgattgtaagggagtatggtttaaaaacaaaacaaaacaaaaacctcctctcagaatttctttcacactgaggtataaatatctgatgacatattacacatttctcattcttacattcaataaaccttactgagcacatattacctgccaggtgtcaggctgggagatagaatacaaagatatagttcccactcccaagaaacccaaagccaggtaagagcaacagacgatgagtaaatcatgacagagtaagcccagggctgggggacctgtcggcatagtatccattccagctgccaagtcagggaaggctgcctggacacagtgaaatttgaaggacaagcaggagttggccagtgggcaccccaggctgaagtaactgcagaggcacaaaagcattgcactttcacatgatacagctggagaagaaggttgtgaactgagttgggatttaaagctgtgatggtggaaactcaggcactgtgtggagtagaggtagagtttcagccagaacatatggaccccagtgtctctaaaatcccaaaggggtggcatgactaggggacgaagccctgagcttccctccccaagccctgggaggtatgcgccaggtaaggggtgctttctcctgagtgccagcagaaatcccaacccactccagggatccgggactcagaattaacatcccagccctcagactgtgaatacctctcccccacatttagaaagagccaaaagtgccagtccacctcctaagcccttcatatagcatatacctgattacccaaaagcaaagatttctccttccttccctccttcttccatcttcccctcagcctcttcctcctccatgtctccttccgtgggcagaatcacagacacctgttccactttggccttcctctccccagctcccaccctccaggaaactgagccagcagcttaggaccaaccaggtcctcaggtcacacccacatccacactggctccacccaccctcctgctcattcattcgttctacaagaggaatagaaactggaccccagaaactccagcacagccatattcaaagaaacacagtccagcagccaaaagtgcttgtaaacctgtgaaatttttactgccacttctcaaagaacaacaggatggtattgtggtggatgtttttggtgcctagtctgggtcctcttcactagcagggtcccccatctgccagctgcagggaatattagatgctaacagctcacagctgccctctcctcctaagaattgccctcagcagagcaggagcagcctctccctggctgccgcagagcacaatgctcactccaggggtccccgtgggatcagactgaagctagtctcacctgaggccatatcctcaataaccccttccctgattcccattctcctgagagcacagcttggactggaggaggcaagtgaggcacttgccttgagtgcaaacttagggaggagggttgccaaaaacctcactcatacaaaaaataataatgtaatgcaacattttttcaaaatcaaatttacagctatgcaggaggctaaggcgggcagatcaattgagcccagaaggtcaaggctgcagtgagctacgatcataccactgtactccagcctgggtgacagagtgagaccctgtctccaaaaaaataataataaataaataataaaaattaacgcaaaatattgcatgatgagcaaaacatcaaaataaagatgggatcccatcctgcactttcacgcgtctgcgtcactcaccaccccctaactctgactctgctggagagcacaccctaacacagaacgtgcacccaaatccctgtctcaggctctgcttcagggaaacccaatctgagacagggatccagatcagaacccactgcaggggttcttagaatgtactttgactcattcctctcctctgtattcccagatctaagacaccctgatgcccttccctagctcctccccacacagcccccttccagccaaggctctctctctgctcactgccctgactgaactaggaattgagcacatatggtgatacagtttgaatatctgtcccctccaaatctcatgttgaaatctgatctccagtgttggaggtagggcctaagggcagtgtctgggtcataggggtggatccctcctgactgtcttggtgctgtcctccaagtaatgggtgagttgtctattagttcccacaagaattgattgtttaaaaggaagaggttgaggggaaggtagaagaagggaggggagaaaggataaatctttgcttttgggtaatcaggtatatgttacatgaggggcttgggaggtgggctggcacttttggctctttctaaatgtggagggagaagtggtaacagtctgagggctaggatgttaattctgagtcccggatccctggaacgggttggaactcctgctggagctcaggagaaagcaccccttacctggtgcatacctcccagggcttggggagggaagctcagggcttcgtcccctagtcatgccacccctttgggattttagggagacactggggtccatatgttccggctgaaactctacctctgctccacacagtgcctgagtttccaccatcacagctttaaatcccaactcagttcacaactttcttctccagctgtatcgtgtgaaagtgcaatgcttttgtgcctctgcagttacttcagcctggggtgcccactggccaactcctgcttgtccttcaaatttcactgtgtccaggcagccttccctgacttggcagctggagttgatactatgccaacaggttcccctagccctgggcttactctgttagttcccacaagaactgattgtttaaaagagcctggcacc

SEQ ID NO: 916084 - DNA, 4001 bp, Homo sapiens
ttgtcaattatgccaagcattcccaaactcaacatcaaccttgcatgtaaatggatactttaaaatttctatctcatccctcaccccatactttattctttccatttatattgcttcaaaagggaaatcaacagtcacacttatgattccgagctctaaaaattcctaatattaagcatgacactaaatatgttcaactttgaaccttaaattcaagttggcctccctcgtgaactgattttaactgagtactttttaccatttcgccaagaactaagggttcaaagcagtgtacttaattatgaggaattgcccaaacgattttaaaaggagtgggattctctgaccaagacttttatgaaaatgaaacaaaatatgttgcactcagtcttccggatgttgaaaagtgaagatgtctccaaggattcgaaggaagttgatgtttaggttccctctgagagggtggtacccttaatgtaagacttttgtggtagtaataccgtacctacaggcctggaataaatataaggtctaaaaccttggaaatactttgtataaaagaaaactccaattctcttttgctaaggaccacagttaccaagagttatcagctttcacccggacagacaacagtgcttcaatgaagaactacaaaggcctcttttaaccctactcttttcttctgttaaacttttaagcgagacctacgacagcaaaaggtggagaggcccctgcggaagtagaaacccaggacttgcaacttcacagacagaagcgtctgtggttcctccgccgccccaggatcatccggactcagtctacgacactacggaagcttcaccttcctggtgcggtggcagaggcggcatcgcagttgcattccttctccctccaccatgcacagccttcggtatcccagggcctgcaggatcctgacacccgttagccagtccagtgtctcccatctgacacttgcaaacacactaacagaaatacacataactggcagatgatatacgtgtattgagagaaggtaagaagccacagacagcaccagctgccgggaaggcggcagagccgtctaaagcgggctcgagctcgtcggccacggccacggccgctgccgccttctcttctcccccaggaagcagcgcggcggcagcggctcctccgcgctggcgggagcctaggggagtggagtctggggaagccccaccactcgcggatgggaccgggcctaggatctggagctgctgctgctgcagcggcccgagtacagcgacgctttacgtccggtccaccaccacccccatacacaccccctccctccctccaccgccgccacccccctccccgcccgctccgctctccgtctctcgattggagccgagacaaaagcaacgggaagcggtgggccgggacgctaccggcggaccctgggcgcgaccggaccggccccggggcattcccccgccttgcgggggccccgaatctgccgcccccgccgcgcgccccgctgccagacttccgaaaatttaccaaaaactcaccgcatgaattttcttgtcccgcggatccaagatggcgacgtatccaccgcggaggctgctgggagcaagacctttaccctctgaccgccgccgtgacccccgtcgctccggcttccctccaggcggcagcggaaggtgggagcgacgactgcaaaacggcagcgatggggtgggtaggcaggccgctttcagcgcgcttctaacaaggtggagagaggcgcttcacttccctaccgcccttaccgccgctccgtcttgtctcccaccgactcacagggaggcttgctgctcctccgcggccgttacagagagcggggcttctgcggccgctaccgtttccctggggctaggttgcttcgcagaaggctctggccctgagtccgagggggactgcggggtccaggggcgatgaatggtgaggtggcttcagtccgccctccccggggacgctgagcgtgttcgtgttcgtgtttgtgtttgtgtttgtgttggacacccccgcccccgcacgtccgcctcgtcactcctcccctcctcactcccgccacctggagcgaatctgatcgtgtccctgtttcctccctcagctcccgcaacctccggagcttgtgcgcgtacttcagggaccggcaccacgtcaccgtcacctcctgagtagtgagttcccctctgatgaaaccactggtgtgtttactcaccatccccaccatttttttttccccaacctgatggaaggaagtacataatggagagcaagtttttaaagcacggtcgtgtcgtgtgaacttgctctagccaaattaggtttatagcactttttttggctctcattacctccagtccccacataaacaagagtgaccagctgggtcatccgcaagaccgtttgaaattattgtggcttgggtggaaacttaaaggagtgaagtatctgctttccagaaaaatcgttgtcattcaaagtgaaattaaacttgttttctttgcaataattcgcctttatttccttgtatatctgtaaactcttcacttttttgtaattactagacaattcggacttaaaaagagcctcagcatgtgtattttggaattgtgtagcttcataatgtgaaaattattcttttctatttgagtaaagtacagttaatttgaagtaaataaaatttctatttccattggttgtttcttttaaaaagtcaccttttacttacaaaagaatcactgtaatccagtttacatttatcattgaaggtcaaaagcaagaaataggaagaaacacaagcatactataaaataaaaggtaactgtcatgtttttgaaggtaaggtgttttgacatatcagcagacattgtgtgaatttatttcaactcctagtggtactggtgtaggtagaaaatgttttgcttggttattcatttcatcaaacactctacttcactgtttttttttcacttcaggaaaattcgaggaggaacaacacatactagtgtctttcctttctttctccccgtcttctgcaaatagtcccttcctcttcctgctttctcctccttctcatgttaacatcttcaaccataagatggtgtgttaaaagattgaatatacctctatggaatgacttccagagggtgtaagtctgatatgagagttttattaccttgagtattttactggaagagatagaacaacaaacattttcataataaatgtgtgggttaggagtgttaggagaaaatacactgatactattactttcaatatttgatactacttactttgactctcactgaacacctatttgtttaggatgaattcactttaagccgggttgaagaacaagcctttaattgtcctattatttgtgccaaatctattataaatttgttaaaaaatttttaatacctaccttagagggtactctaggtatttaatgagctagcatttgttaaaggcttgtatagtaagaattcttatagtaagagttcttaccaatagatggtatattttttaaattgtcctgttgcatcaaaaagttcatctttattggtaatgttgattaagtttgcccatttggtagtttggtttcttttaactatcttactagattttcttacttttacctgaaaagtagtccttactaataggcacatgttttgtatatttccaaaatatgtattatgttaaattctctgtacactttatttaaaaattacagacgttgagggaaaaaaaataccctattaagggaagaatgagtttgtgtataacttgtagaagaaggaggccacccatttttagaaaaatatggatggtattgaaaattttgccatggcaagggataaaaaggacaggcttctctaatgtgtctgaaacaacatttgaatcccctttgttcattccctaaatctgctgctcctttagaattcctgattttcataaatagtaccacc

SEQ ID NO: 916085 - DNA, 4001 bp, Homo sapiens
ataagccacaatctgagttttatcttcaagagcaggtacttggggatataaatcactcatacacaagcattttgccctcatttttccaccatgtaaattaaagtattatagaaattgaaaaattgtataggctgtatttgttgcttggttaaacaggcaattctcattccctgagatcagattaggttacagatatctctacattgtatacttagaaaaagattcctgccaacaaatgtttacattaacttatttgtattgataaagcactaatcaagatgcaaaaaaaacttcagcagtttctcacttcctctctaaaatacaaagtattcacaaaaattattacaattcaagctctcagaaaatatgagagaaaagtaccttttttacagtaaggatcttacaaagtcaagaaataagtgagtagagtggaacatgttttgtctttaagtgtattttgtatttttttctttagatttaacattataatagaactacaaactaaacaaattcaacatacagagcttactaattatcttggtccattataaaacatttcaatgaactgggatgtgaatatagacacttaaccatttcagccaactatgattcttaaccctttcaatctgcaatagttaccttacaaaattgtgagatttattcattgacgtttggaaagaactgttgtcaattatgccaagcattcccaaactcaacatcaaccttgcatgtaaatggatactttaaaatttctatctcatccctcaccccatactttattctttccatttatattgcttcaaaagggaaatcaacagtcacacttatgattccgagctctaaaaattcctaatattaagcatgacactaaatatgttcaactttgaaccttaaattcaagttggcctccctcgtgaactgattttaactgagtactttttaccatttcgccaagaactaagggttcaaagcagtgtacttaattatgaggaattgcccaaacgattttaaaaggagtgggattctctgaccaagacttttatgaaaatgaaacaaaatatgttgcactcagtcttccggatgttgaaaagtgaagatgtctccaaggattcgaaggaagttgatgtttaggttccctctgagagggtggtacccttaatgtaagacttttgtggtagtaataccgtacctacaggcctggaataaatataaggtctaaaaccttggaaatactttgtataaaagaaaactccaattctcttttgctaaggaccacagttaccaagagttatcagctttcacccggacagacaacagtgcttcaatgaagaactacaaaggcctcttttaaccctactcttttcttctgttaaacttttaagcgagacctacgacagcaaaaggtggagaggcccctgcggaagtagaaacccaggacttgcaacttcacagacagaagcgtctgtggttcctccgccgccccaggatcatccggactcagtctacgacactacggaagcttcaccttcctggtgcggtggcagaggcggcatcgcagttgcattccttctccctccaccatgcacagccttcggtatcccagggcctgcaggatcctgacacccgttagccagtccagtgtctcccatctgacacttgcaaacacactaacagaaatacacataactggcagatgatatacgtgtattgagagaaggtaagaagccacagacagcaccagctgccgggaaggcggcagagccgtctaaagcgggctcgagctcgtcggccacggccacggccgctgccgccttctcttctcccccaggaagcagcgcggcggcagcggctcctccgcgctggcgggagcctaggggagtggagtctggggaagccccaccactcgcggatgggaccgggcctaggatctggagctgctgctgctgcagcggcccgagtacagcgacgctttacgtccggtccaccaccacccccatacacaccccctccctccctccaccgccgccacccccctccccgcccgctccgctctccgtctctcgattggagccgagacaaaagcaacgggaagcggtgggccgggacgctaccggcggaccctgggcgcgaccggaccggccccggggcattcccccgccttgcgggggccccgaatctgccgcccccgccgcgcgccccgctgccagacttccgaaaatttaccaaaaactcaccgcatgaattttcttgtcccgcggatccaagatggcgacgtatccaccgcggaggctgctgggagcaagacctttaccctctgaccgccgccgtgacccccgtcgctccggcttccctccaggcggcagcggaaggtgggagcgacgactgcaaaacggcagcgatggggtgggtaggcaggccgctttcagcgcgcttctaacaaggtggagagaggcgcttcacttccctaccgcccttaccgccgctccgtcttgtctcccaccgactcacagggaggcttgctgctcctccgcggccgttacagagagcggggcttctgcggccgctaccgtttccctggggctaggttgcttcgcagaaggctctggccctgagtccgagggggactgcggggtccaggggcgatgaatggtgaggtggcttcagtccgccctccccggggacgctgagcgtgttcgtgttcgtgtttgtgtttgtgtttgtgttggacacccccgcccccgcacgtccgcctcgtcactcctcccctcctcactcccgccacctggagcgaatctgatcgtgtccctgtttcctccctcagctcccgcaacctccggagcttgtgcgcgtacttcagggaccggcaccacgtcaccgtcacctcctgagtagtgagttcccctctgatgaaaccactggtgtgtttactcaccatccccaccatttttttttccccaacctgatggaaggaagtacataatggagagcaagtttttaaagcacggtcgtgtcgtgtgaacttgctctagccaaattaggtttatagcactttttttggctctcattacctccagtccccacataaacaagagtgaccagctgggtcatccgcaagaccgtttgaaattattgtggcttgggtggaaacttaaaggagtgaagtatctgctttccagaaaaatcgttgtcattcaaagtgaaattaaacttgttttctttgcaataattcgcctttatttccttgtatatctgtaaactcttcacttttttgtaattactagacaattcggacttaaaaagagcctcagcatgtgtattttggaattgtgtagcttcataatgtgaaaattattcttttctatttgagtaaagtacagttaatttgaagtaaataaaatttctatttccattggttgtttcttttaaaaagtcaccttttacttacaaaagaatcactgtaatccagtttacatttatcattgaaggtcaaaagcaagaaataggaagaaacacaagcatactataaaataaaaggtaactgtcatgtttttgaaggtaaggtgttttgacatatcagcagacattgtgtgaatttatttcaactcctagtggtactggtgtaggtagaaaatgttttgcttggttattcatttcatcaaacactctacttcactgtttttttttcacttcaggaaaattcgaggaggaacaacacatactagtgtctttcctttctttctccccgtcttctgcaaatagtcccttcctcttcctgctttctcctccttctcatgttaacatcttcaaccataagatggtgtgttaaaagattgaatatacctctatggaatgacttccagagggtgtaagtctgatatgagagttttattaccttgagtattttactggaagagatagaacaacaaacattttcataataaatgtgtgggttaggagtgttaggagaaaatacactgatactattactttcaatatttgat

SEQ ID NO: 916086 - DNA, 4001 bp, Homo sapiens
aaccttgcatgtaaatggatactttaaaatttctatctcatccctcaccccatactttattctttccatttatattgcttcaaaagggaaatcaacagtcacacttatgattccgagctctaaaaattcctaatattaagcatgacactaaatatgttcaactttgaaccttaaattcaagttggcctccctcgtgaactgattttaactgagtactttttaccatttcgccaagaactaagggttcaaagcagtgtacttaattatgaggaattgcccaaacgattttaaaaggagtgggattctctgaccaagacttttatgaaaatgaaacaaaatatgttgcactcagtcttccggatgttgaaaagtgaagatgtctccaaggattcgaaggaagttgatgtttaggttccctctgagagggtggtacccttaatgtaagacttttgtggtagtaataccgtacctacaggcctggaataaatataaggtctaaaaccttggaaatactttgtataaaagaaaactccaattctcttttgctaaggaccacagttaccaagagttatcagctttcacccggacagacaacagtgcttcaatgaagaactacaaaggcctcttttaaccctactcttttcttctgttaaacttttaagcgagacctacgacagcaaaaggtggagaggcccctgcggaagtagaaacccaggacttgcaacttcacagacagaagcgtctgtggttcctccgccgccccaggatcatccggactcagtctacgacactacggaagcttcaccttcctggtgcggtggcagaggcggcatcgcagttgcattccttctccctccaccatgcacagccttcggtatcccagggcctgcaggatcctgacacccgttagccagtccagtgtctcccatctgacacttgcaaacacactaacagaaatacacataactggcagatgatatacgtgtattgagagaaggtaagaagccacagacagcaccagctgccgggaaggcggcagagccgtctaaagcgggctcgagctcgtcggccacggccacggccgctgccgccttctcttctcccccaggaagcagcgcggcggcagcggctcctccgcgctggcgggagcctaggggagtggagtctggggaagccccaccactcgcggatgggaccgggcctaggatctggagctgctgctgctgcagcggcccgagtacagcgacgctttacgtccggtccaccaccacccccatacacaccccctccctccctccaccgccgccacccccctccccgcccgctccgctctccgtctctcgattggagccgagacaaaagcaacgggaagcggtgggccgggacgctaccggcggaccctgggcgcgaccggaccggccccggggcattcccccgccttgcgggggccccgaatctgccgcccccgccgcgcgccccgctgccagacttccgaaaatttaccaaaaactcaccgcatgaattttcttgtcccgcggatccaagatggcgacgtatccaccgcggaggctgctgggagcaagacctttaccctctgaccgccgccgtgacccccgtcgctccggcttccctccaggcggcagcggaaggtgggagcgacgactgcaaaacggcagcgatggggtgggtaggcaggccgctttcagcgcgcttctaacaaggtggagagaggcgcttcacttccctaccgcccttaccgccgctccgtcttgtctcccaccgactcacagggaggcttgctgctcctccgcggccgttacagagagcggggcttctgcggccgctaccgtttccctggggctaggttgcttcgcagaaggctctggccctgagtccgagggggactgcggggtccaggggcgatgaatggtgaggtggcttcagtccgccctccccggggacgctgagcgtgttcgtgttcgtgtttgtgtttgtgtttgtgttggacacccccgcccccgcacgtccgcctcgtcactcctcccctcctcactcccgccacctggagcgaatctgatcgtgtccctgtttcctccctcagctcccgcaacctccggagcttgtgcgcgtacttcagggaccggcaccacgtcaccgtcacctcctgagtagtgagttcccctctgatgaaaccactggtgtgtttactcaccatccccaccatttttttttccccaacctgatggaaggaagtacataatggagagcaagtttttaaagcacggtcgtgtcgtgtgaacttgctctagccaaattaggtttatagcactttttttggctctcattacctccagtccccacataaacaagagtgaccagctgggtcatccgcaagaccgtttgaaattattgtggcttgggtggaaacttaaaggagtgaagtatctgctttccagaaaaatcgttgtcattcaaagtgaaattaaacttgttttctttgcaataattcgcctttatttccttgtatatctgtaaactcttcacttttttgtaattactagacaattcggacttaaaaagagcctcagcatgtgtattttggaattgtgtagcttcataatgtgaaaattattcttttctatttgagtaaagtacagttaatttgaagtaaataaaatttctatttccattggttgtttcttttaaaaagtcaccttttacttacaaaagaatcactgtaatccagtttacatttatcattgaaggtcaaaagcaagaaataggaagaaacacaagcatactataaaataaaaggtaactgtcatgtttttgaaggtaaggtgttttgacatatcagcagacattgtgtgaatttatttcaactcctagtggtactggtgtaggtagaaaatgttttgcttggttattcatttcatcaaacactctacttcactgtttttttttcacttcaggaaaattcgaggaggaacaacacatactagtgtctttcctttctttctccccgtcttctgcaaatagtcccttcctcttcctgctttctcctccttctcatgttaacatcttcaaccataagatggtgtgttaaaagattgaatatacctctatggaatgacttccagagggtgtaagtctgatatgagagttttattaccttgagtattttactggaagagatagaacaacaaacattttcataataaatgtgtgggttaggagtgttaggagaaaatacactgatactattactttcaatatttgatactacttactttgactctcactgaacacctatttgtttaggatgaattcactttaagccgggttgaagaacaagcctttaattgtcctattatttgtgccaaatctattataaatttgttaaaaaatttttaatacctaccttagagggtactctaggtatttaatgagctagcatttgttaaaggcttgtatagtaagaattcttatagtaagagttcttaccaatagatggtatattttttaaattgtcctgttgcatcaaaaagttcatctttattggtaatgttgattaagtttgcccatttggtagtttggtttcttttaactatcttactagattttcttacttttacctgaaaagtagtccttactaataggcacatgttttgtatatttccaaaatatgtattatgttaaattctctgtacactttatttaaaaattacagacgttgagggaaaaaaaataccctattaagggaagaatgagtttgtgtataacttgtagaagaaggaggccacccatttttagaaaaatatggatggtattgaaaattttgccatggcaagggataaaaaggacaggcttctctaatgtgtctgaaacaacatttgaatcccctttgttcattccctaaatctgctgctcctttagaattcctgattttcataaatagtaccaccattcacttatttgctcaggcataaaacttggaattt

SEQ ID NO: 916087 - DNA, 4001 bp, Homo sapiens
atttttttgtagagttggtgttttgccatgatgcccaggctagcactgtaatcttaacactgccttatatattgcttattagatacacctttgtgtacatgtgtgttgttttcgattaaaatttcctaattatgaggataagaccttttattcttatttctgttttttcattttttatttttagctccgactcagattttgaacggatgtttgcatgtataccacagtgctacattaaaaaccagtcatgtggatgtggagaagggtgctgatcaggactccctgtttgctaacaaattctacagcagaaacaaagtattaaggtttgcagccaggaagcaagtgcatggggaataagcctgcagcttcttccaaatgagacagagccaaatcttttttctgagtctgttttcttcatttctattaaaccaaggtcctttttaagcagtcgaatttcatccaaagccagagtgagctactttgtttgggggaacagtaacagttacctccaccactgactggctgccatctggattgatccggaaagatcccatctgaatggtcttcttggggtccacctgggcaatttcccattctagttcatccaccagagccctgcatgctggtggaagaggagagaatgagagcaggggacagggtagggggtagggtgtgaggagaatgggatcaacccaggatttccattcatccttctcccaggccttggatctcatgccctcccaaggctctgcttcctccacttctttttcccgttgtgcctttacctccacagtggagatcctggctcctccgagcccaggcggttcccagcagggcccccagaagcagggccagccaaccccagcctttcatctttagcgtaatggggtcgctccacctgggtttgagtgggaataaaacataagtgtgaggagccgactccatttttccctgacccccccaatcctcaccccaaggctttcaaaggcctcattgtgactctggctctactttccaggaaatggccgggacacaaaggggcttctctgttccagcgcttgagggctctgattcccccagggtggtgggtgggagcgcgagctcaggacttgcggctcagccccagactctacgtggataggtgaggccctaagtgttggtactttagcactgcatgcctagggttcacggggctttgtggcagctacaggaggtaagttggcgattacgtgaggactacaggcactagggaactgccggcagggagccctcagtcaggccaggaggccagcgaggagagcaataactagggcccatttggatcctgcaccgaagattcctgcgtccccacctccagcccgtaagtgattacccgtacggacaccagccccctttctaaggactccgccattgctttcgcttcagtccatccccaaccctcagcgcccagcgcctcgccgcccgcatccgtcccacctctgctcccagggccgccgccgtggcccaagcgctggaagaccgctggactctcactttggccccagtggctcccgaaactacacctggctgcagggagcagggctgtccgggattctccagagcgcttcgccgcctgccacacacggggtgtcccggcgaccgcctgacccagctcccctgacgctaactggtacctaagcgggactccagcgtgctgcggtgcgagccccaatcagacaccgaccccaaacccgcccctccaaactctcgcgcgaacaggcagcttaggagaggctcccgaacagcaaggaccccggtcaatcgccgaaggacccagacttgcgtggcgaacagatccacgtgaccaccaggggtcagccgtagaataggagtggccttaagcgacgacagagtccgggcgtgctgtatgggagcggctagtcgtgcgcgtgagccagcccaggtgggctaggaccttcaaaacggtgcgctgccggccagcgagcagtccaggtttcaatacacaggaaactacatctcccaggaagcaccgcagcaccggacccatctttgtgagcaactacaagtctcaagctatcctgggacctgtagtttgtcggcttacacaattaacggaaaccatactgtacatcttcagtctgacttagggtactgggcagctatagcaaagacccagcattgcccagaaaaggcataaattatacctttttcccctttttttgagacggagtctcgccctatcgcccaggctggcatacagtggcgtgatctcggctcactgcaacctccgcctcccgggttgaagcaattttctgcctcagctagggttacagtcgccatccaccactcccagctaatttttgtatttttagtagagacggggtttcaccatcttggtcaggctggtctttaactcctgacctcgtgttccacccacctctgcctcccaaagtgctaggattacagaagtgagccaccgcgcccggcctaattataccctttcatatccataactttggattccggacctttaccttcaaaggaaggagaggaagactgaagccagagaacccacactagcagttctctaatgagataaataacaaacgatattttatttttattttataaaacatgcagtttacaacaaatttttaaaaaatggaacaaaacttgggacaggcaagtgggatggaagacagatgcttctcagccatcagcaggaataaatgaagccggcagccaagctttgtccaggatccaaaggcccttttggcaatggtattggcaacactggtttgcttgggccaccaacactctacttgctggcccctccaggtatccctgaagcagttggtgacttgtgctaagtcttgaactactgtggtatcctctgtcactgtccaggacttcaatccctagccagctaggaacttacagttatggttccaggagcttctctgcctggatattagtcacccaggatattaagaataccaattactttccatctgggtcaattctagactccatgtctgtaccactgttttgcaaagaatgaagaaggaatgaatctggctcctagaacctttgcaacaattctgctgtgttccagttcaattaatagcaccatctgtgaccctagaccctgagcacgtccagtactggaagtggacaaggtatagccaacttaggaagccatctcccagttctggggctatagaacagtaaagggagagggccgtggttctttgggaagggtagtcagagcgccagcactgaggagaagacagctgcatctgtcagagacaaaaccaaaagcatgattcaagctgagtggagaaaaagcatcttctcatacttcctatgaaggaaaaatgcaagagaaaaaagggcatggaccttccctgaacattttagacttgggcaagaggaagttatagttaatggagagtttcgataaaatgtattttactgaatgttaggaggatgaagtgctttgtaaactgttaagtgctattctccatatgtgcaatcaaaatccacccaattgggggcgctcaggctcatgcctgtaatcccagcactttgtgagcccaaggtgggtggatcgcttgagcccaggagtttaagaccagcctgggcaacatggcaaaatcctgtttctacaaaaagtacaaaaattagctgggtgtggtggtgtgtgcctgttgtcccaggtacttgggaggctgaggtgggagaatcacttgagcccaggaagtcgaggctgcagtgagctgtaatcacgctactgcacttcagcctgggtgacagagtgagaccctgtcacaaacaaacaaaatacaaaatccacccagtccagtttcccttgtcccatcccaggtcttactcttgggacttgtttggccctcaggctcaggcaccttccagtccatctttctgcccttctcataaagacccttgagcaccttgtggaaagactcaggctcagtgccatt

SEQ ID NO: 916088 - DNA, 4001 bp, Homo sapiens
atcacttgtgtcttctgaatcttagtttcttcatctgtgaaaatggaaaggttgtcatcaggaataagtaatttcagggaatggcaaagataaatgcacatacatcaatctataaaagaaagttcacatagtacaaatagatgtgatatgaaaaagcagtacaaatttaaatatcaggtccacatgtaaaatctgtacaaagaaatacctcacatctacccccgcaagggttctagcagttccttagtcctggaaagtgggtggatccattcccagatccccaaatgctgttagccataagttaccactgaaataaatttactaccaaataaccaaaccattatgccgagtctaataaaatatcccagatacggcatgtattaatttgatttgcgttacacttcgggctggtaaggttcatatgtacacttagaaaccgaaaaatgcggcgaaatggatgaagattatattggcactctaagaatgtttgcaaaatactgaaatattgaaaacatgaaatatgacatattgaaaacatgaaatatgaaatattgatctttacgtgagttacaaaaacattatttcacgcagggtttcagcagtctgaatgcttcttctccggcttttcccccaatggagaattggattcccttttgccccgcccactcagtgcttccagattgcttgagaaggccaaggcagccggctcagcagcagggaagccgggctgggtatgcaggagctatatatagctccaccttggagatgtgcacacacaagcacacgtacgaatacccatgcccggtttggcatgaaaataaataaataaataaggaaaggtcgcagctatccgctttccctctttcccatcatcccaatttttcaggaattttcaaagcagggtgtcatcagtcccagagggtgatgcagcgtcggatctctctgcaattcttctgcctactgctcccagcaatctgactcctgcaggaaccggcactgggccaacacctactacccagatgcggtcacctagggaggcagcctcgcagccgctcggagcccatccgggcacaatcacttgactccctggaaatccctgaagccaaatccacctttcagaaactaggtgtgaaggtggttcccgtagacagcgccaggctaggagggaaggggccgtggctccgcggtctctccctcccacctgccgcagatcgtggagaagggccggtgccttctcaacggagacgtaattaatcggaacgtgcccttcgagttgcagggattcttccccacccccatctcctgaagggagctagatcttaacagaggggtcaggggacaaacaagtcgcttcctcccctctccgcaaccgctcccaggttttccgggatgcgctagccaggcgcccaggtgggatgggaaagatgagcaggtgcgggccggcgtcgggagaaaaagacctgcaggccccgggctgccgacctctctgcttccccacccctcccctgccgaggcgatatggcatccctggggcgagttcccggcgctggcggcggcagcctccgaaaggaaagttgacgagacacagaccccgagctcggagccctcttctagggcactgccgtcctgccttgcccggcaccccagggctccggcatcccgcacccctgcttccccgcaccccagccacctccgccccagtccttcccgcgccgcacggcgagagctgcagggaccacaggagatttgggggtgacgagggctgggcggggctgggggaagggaagcaacagcatggaaatgcgcattctttattttatctgcaaagaaggaaaagtccagcttcctacctgttccctgctcctgctcgcctcggtgcggcacagctggaccataccctacaggtttcccacttccgctgcaaacacctgggagcgcatctccccaccggcgcccctcctcgcctcggcggagcccaccctggctacttgacagcagaagcccggccttttagggcggttattggggcagcagggaaagtggggcggggaccacagggaaacccgcttctctgattggacaacagggatatcactctcacccccaggaccagcgcaggctgcagacttgggtagctgctaaacccaactgcaaagggtctctgcagtgcctgaaacccaaacctgctgctaccggatcaaggacccttgctggagagaaactggtttgatgacttgtcatttggggccccaagagggagggagggtccaggcataactagacacccagcactttcctgaagcttccctgaagggaccatctgctccgggagatttgtcaggcgaaaataccaagccagcgcctcatagagaagaatgagcttcgattaggaaataataagatacttatgtgggaaaaaatacacacacagaaaggaaaataaaacgatgtgaggtttttttttaaagtttccatttttgtccagatgtaacatggcagtttttcttgagaaaagacggaattgcttagtctgtaatgcagaagaccccctaatattccctggtagaaacagtgttttaaacgggaaagcactgcataataacctctcaaaaaaaaaaaaagggtaaaagaaattaaggccaaactgcatgagagatttgctttggggcagttcagtttgtggcaaaagtcttaaaataatcaccattagactgattgataattaagtgatctgttacttttctattgatagtagtttatcatttctttagtactcagacactgagaggatgtttatgcccccaaacctaagtgatcccaagcctgccttttatgtgaagggaacagggtaaaataactttgtgtccagttgccatctctgccatttattcaggtggaatctggaaattttggaattcaagagactccttaaatgaaggaacgtgctagaactaccacgtgtaaaactgggagtgtagggtgtcttagtatatagtaccatgtgaggaatcaagttgccttctgcctgcaaatagccacattcttcttctatctgaattaagtagccatcttaagtgctgagcataagacacaactctcattctcacagagcttcaaagagcttatgacaggcttgggacactggacaactgttagagaagatgacattgctattaataaatatagactctacttagtggttacggttgttattactatcatcaggtaaggctcttcataatgttttcttcataatactgaaggaatccgattaatgcatttgaaggtgggggccgggcgaggtggctcatgcctgtaatcccagcactttggcaggcgaggcaggcggatcacaaggtcaggagatcgagaccatcctggctaacacggtgaaacctcgtctctactcaaaaaaaaaaaaaaaaaaaaaaatacaaaaaatacaaaaaattagccgggcatggtgttgggcgcctgcagtcccagctactcagaaagctgaggcaggagaatggcgtgaacccaggaggcggagtttgcagtgagcggagattgcgccaccgcactccagcctgggcgacagagcgagactccgcctcaaaaaataaaataaaataaaataaaataaaataaaataaaataaaataaaataaaataaaataaaataaaataataaaataaaataaaataatgcatttgaaggtgggaagggaccctggagaaaatttacagtgaacaaatagatattatttgtgtggtgacaaccatcttaacactgaatggaaatgactaaatatgccgtggcaaaatttcagaacccctgtgtcatttcttacacaatactcctattagtcatgcacctctgtcccaggtactcacaccagttattccattggattggccaaatcattcatgaattactgagtactttttcaatgccataccctgtgttaggtgctacagaactaaagcagaataatgtattggacacattaaagatg

SEQ ID NO: 916089 - DNA, 4001 bp, Homo sapiens
tactcagaatttagtgtgtgtcattaggcaataaatatctttaagtttctgcccccctccattctttctcattttcctctagattccattttattagctgttaatcagccacctcagccaggaggcatttcagcagaactgaacaccatgactcagcatcaggagacttctaagatatataggtagtaatatctccttccttttttcccctccctaaggaaaaacttcaggtgtgagtttcctcttatacctaaactagatcagctttgaagatttaaaccattctgtaatgctgggagttctgtgcacaacacctggacaacaggaaatccaaataatatagcaacattgtagcagaattgaaatgcataaaatgtagcattttatgctgtgctcttattatcatcattactctaaatttctttctttttaaaaaaaataaagtgatacttttttttcccaaaacatacttgtccttatctattcttggtcttgatagatgatttagcaaacacacttttaaaaacagtattaataaacatacatgaggaagtagatatacctatatattatagtgcatatattatgttttataaactatgaattatagtatatatgtatgtgtgtgcatatatattcactagtaatataaattcactagtatatatattcactagtaatatatgttcactaataatataaattgaaaagtagccttaaagaattttacttatctagtgtctcttgctttatatttattaattctgttttctcatcctaaagaaatgttcaggaattaatcatttgccatgatatttaagcaagaaactttaattaacaatgacttctgacaaatatactcgtatagtactgtgtttttcagttttacagagtttttgtaaattttatttggatcttatgtagtgggtcctataattgtataggggtaatttttaaaaaaacaagaaataaaactcttttttgggtaaatgtcacaacacgtcatctatccatacattttggagtaaggcattcttaacaagagggaaaaacaaaaccaaaccagcacaggtagaagtcaaatggtttgtttgacagcaaggtcttccctcaaggacatgctagtccaaattgttttaattccatctgctcaatttgtatgcaacacagtatttgagtttgagtacctcggtgctttcctctgcttctgggagaaggattgagcatttctggtgtctacccacatcttttactagaatttgaaaatgttgacattaaggaaataatctgagccaacgcgatgccacagccgtgctaaaacttccccacaaggaggtaatttccacttattgattcagctcattctactgctgcccctccccagtttgcagtcttctacacattcgagctctagtacattcttggaaagcttttgcatgcaagataaaataccctatggtccaatactatcaaatatagaaagtcacctctcgtttaacgtaacaattgagagtcctgatgctggcattgcaatactaaggtctgagtcaaccttattaatatcgcatcaccattatcctaactcagcatattctagtttacaattacctaacctataaaaaaaaccttggacttaccttatgtgttgacttatctgtcgtcctgggtataatatctattgcaaattgtccatttgaataaatacagcaacagttataccacaatacgcctctctcctgcagcagaaagcaagttaaaaggacttcatgctgtgacctcacaggcaggcacagccgctcccatccttcagccaacctggggagagcaggttagatgacagaaaagccggctgtctacatagcaatactttcaaataaagcattccgtgctgtgagctgggagatttacatcttccaaattcggctggcccgagtcaatgctgcttctatgcctgaaaatattaagcatttcactgcagtcacttaatgcaagaaactatctgaggcgacttcacaaaccctgtcattctgttcggagactaaagaatgagcgctgcatgcataattcatgcattaaaatcttcaatgctcttcctgtagtcgctgttctatccagtaatgggctattgatcacctcaccaccaagacaattggagctccacgattggtttatttccacaaataaaattacaacctaaatcataggcagaagcctccaaccctgcaacatccactcggggaaaatattcacatagaggagatgacatttgcatactgcagaatgtttatactggactctttctttggcagaaatgctacagcatctgctgtcttttattcaaaagatatactttctgcaagtttaggctgatattttacattataagtgagatataaggaattggcttttcgctatcatttctggaacatcaacaaggctaaatgaaaattaagaaaataaataaataaatgaaagaaagagaaaatatgtggctataaaatatggagatttttaccaggactcatttgaataaccttttttagaaaagtttaatttacaaataattaatttttcatttcaaaaatgtggaaggagtttctcttaaaaatcatcaatatgggtacaagtgttcatcaatattaattattttggaacataagcacctttactctgggtgtgtcagtggttctgagagctcttgctcttagaatttaagcttctaagaacacagcattgttttcattgcctgaaaaaaaaaaacaggctttaaaacaaaatgtacatttaattttgctaatattcatcaagggaaaacaaaggtagcattttaaaatgtcgtaacagtatttgcaaaaatactaggatgggagattcatgtaaaccagcaaatacatatatgtataaaatgcttgtctatttttcaaagtgtcttagatataaaaatcaattaagccttatttttccaccaaaagtggactgaacatgatgttattaaggtcactgagatgactaaagtcatgtcttcccaaagcctctttttatacactctctcacatacatgcacacacacacacaattcatatttctatgtcattccacctgatcatttgtaaaatcaaagtgaaaccttcaagttcattactcagggttagagtacaggataactgtcagagttaaaccaaagtttgccaattgataattatgctgtagggaggtgttcacccttggtggtgtcatcatggtcattttcatcaacaaatcaatagcagttgatatcagcccttgaaggtagtaggggtgctgatgacaataggtgcagacttcagagatgttgaagtgcatgtgaagtataatccctgctgagccatagagaagacagttgcacttgactgataaagatgctaaaacattccaaatggctgtctgagaaattggccatacaattcctttgtctattatgtattccatgtgccacaatgttttgttctgccccgggtagcttctattttcatatttgcaggtattgtcaccaagctaataaacttcaagtaaactacatacactttgttttataatatttctctcttctatgagtaatattatttattccttaaatagaagatttaaaggcctcagactttttgaaaaatcacagaagttttatcaatttaatcatatatagaatcaatttcatataaaaagatcattttatttataaatagaaatttgaatattttgaaatttattaggtacaaggttatatagagtacaataatttaggaaatctaaattattgacaaaacctacgataattacaaatgtaagaattagaaatttcagtttcctaaaatggcatgattcaacagtgcataaccaggtggctgggaagagcattagcttagtccctctttcttcagtgagtggaaggaaagccaatatcgtttctcacatacaaatctccatagccaactctgaaacaaagactgcaactttgcatctgc

SEQ ID NO: 916090 - DNA, 4001 bp, Homo sapiens
ggaaaaaaagccagccaaattgaatattttccatttgctacaatcctctaataggatatttgtttatgatgtatccactcattcaacaaacagtttgcttataatctcagaaagaccaccttacaaaatttcatagtgatctaacattaaccatttgccttaaagtttagagagttaatagtttaaagcagagataaaatatgattcaatagagaaaagatgtttacaaggtctactctttggtcaacttacctccatgaccatatcttctataccatgtaaactctaaaaatgaaagaaaaaacaattttgatcctgaagcaattatttgaattgtggtttcaaacattacttaaatagctgagatgctagacaatggaatgagagtagtggccctttactataaaggttgaagtatcttcacatctgtgcagatacttatttcttatctttacattgatagttgcagcaccgaagtttgcagtcaatagaattcgtatgaattttcagtaataataagataatttttattttattttattcacaaaaataagacttcacaatgactttaccaaattttttctttattatatttacattatatatatgtaaatatattatgcatgtaattacatctatgtatgtgggtgtgtgtgcataattaccctggttataaaatatatatttatcaatgtcattaaaatccttaagtactaatgaaatgatcttttctgagttttggagtgagcataataaaaattattccccaaaataaaataatatttttttatgttcttaataatgatgcccgtcagattaatcattaaagtgatcaatggggatttatatacaaaaggatgaggaccatttatgtcttgaacaaaacagtcactcaacaagtatctactgggttaggtcattatcatgaaagtattagaaaaattggttgttagaattcaatttttctaatactttcataataatgacctagctcaataagtactaaatgacctagctcaataagtactagttgggtaattatatcagtttttcagataaagatatgatgtgcttctcattgtaggaaataggtctgaatgcttcacacttgcctttgaaagacagaaatataatatttctttgtcctaaaatgaatgtactctcaaaattgttttattagtcttatgtccctacacacactgtagattactttaatccattttttaaattatattgatcaaattggcaaaagagttgtgtaagattcagtagtgtgttgcatctgcttatagctcttaagaagtgattattaattttcagaaattttgtgaatcagttgttaaacatggccagtattaaaaattgtattaatttacaaatgaataaattatactaagaacaaagggaataaatgcttaaaacccattgttttctctcttttatttactatattttatattctctttgccattgtggttacttatatcagggtggtgaaaatactacagactggtgagcggttgcacatctttccagttccacattaaatgatgtcaggttgaaactggccatggtaggataatttactccccagtaatagacaaatgctacactccagggatctccccagagatctagattttaaacattcaccagcacactattacccaagattgacaatgttttgtgaaatcttaattgaaattaaaaaggaaatagggtcacccttgatacatatttatctacttatctgacccagatgtcgagaaaataagaatttttacttcatacaatacatttaataaacacgcatatcaattatgttgacataatatatgtagaatatacaaaggatatttcttacctgctaaacaggtagtaatagatattatcacaagatgactgaccagcaaccacattttcatcttgtattcagtagaagttcggttcaattttccaaaaaagaatttagctctatggcagttggataattttaaacacctgcatcaagaaagaaaagaagaagaaggaaagaattagaaggaaggagaggggaaggaaggggagaggaggagaggagaagaaagaaagggaaggaaattggaaatgttcatcatttgaggaaaacattattaacctatgtgactttatgcttttcgtttgtagaataagttttcatttatttaaatatatttgtaaacaccgtgtaatgcaaagactggagtcagtatcagaaggcttcagctgacatcctagtattgacacaatgcaatcatgagtgtcactcaatcatgtgtttaggtttcttttcctctgtaaccattgagtataataagtcttttctacaaatagcacagttgtaaacattttgatatcattcactttaattgaaggttacatttaacggaaggcctggttcaaagattcaattgaagttacatttgtataagagcttgtaaactcacagacattacacaagggtgatgatgttagcattttctgttagtggcttaaggaaaatttttgccagacatgctaattttaaatgttacaatatattaattaataaaatattcattcctcctcatcccttttacttctttcacttattcaagaaaaaagcaaataagtgttccttgcatgtcaacaggggacaatcaaggttttgtggggccaaaattgtccatttggagagccttctttcaggacaagaagaaaataaaattactaatataaacgaaaatacaaaaccatgtagcagtctaattaaaatatcttgcttttaaaaattttgcaatcatgtacgaccatgtgattacactgctaaagtttcacccaggaccctggaatagcctcatgcaggtgaagggccctgctacttaagtttcatcatctccgtggtaaaatccaccactgtgactaagcatgtagctatgaagactcaaaaaagaaaggcacagtttgcttgctcttaagaagttcacagaaaaagagtacacagatatgtgaacaagccagtgcaatgacatagttgtgtggacctgtatgctattaaacgtgaaaaagtgttaatcattttcactgaaaccatggtaaacacagcacggtgggaatgggccttcctgcggtaggcagggccttatacaggagtgttgcattcttagatttgagtcatttggtgacttcctgcctcaaccactgcttactggatcaccttaagaatgatatggcctagggcattagagcactcatcaataatgacacaataggggtttcatcttgaaaagacattaaatcattgttttaaaagaatatataatagcataactgaaatctcatgacatagaattgaatgaaaacataaattaagatagagcatgggctgggcacagtggctcacacctgtaatcccagccctttgggaggctgaagctcgtagatcacctgaggtcaggagttcgagaccagcctgaccaacatggtgaaacccccatctctactaaaaatataaaactagcctggcttagtggcgcatgcctgtatcccagctactcaggaggctgaggcaggagaatcacttgaacctgggaggtggaggttgcagtgagccgagatcttcacaccactgcactccagcctgggcaacaagagcgaaactccatctcaaaaaaaacaaaacaaaaaaaaagcatgaaaaacaattttaaaaggaaaacacatgttgtagtgttcaacgtataaatatagtcgaacatatttaaaacagcaacattaaaatcctactgattgcttgcaccatactattatgtcagagaaaaatataggagtctatttattttttaatggattttgagaacacatatactccctgatttgcaagaatcctagcatttggcagaggctggacaaaatttttacctggaccatggtaatatatgggccaggataaacatatttttcctttttaatatatataagcctgaaattttaaatttttatta

SEQ ID NO: 916091 - DNA, 4001 bp, Homo sapiens
gaggaggagcgactggaaggtttgggccggagaagctgtggaatcactccctcccaggaaagatgcggcgatgagagagctctaccgcctaattaagcaagcgaccctaataccggatggagaatttgagaattattttaaagccacccagctaattccattgcgcactaaggcaggggtcagtcaagaagacagctttgtgggcgtgtgcttgtaaatgtagtacaaaaatatagtcagtctgagtccaggccacgtatagtcacgctgtattcctcaaatgcccaggagcgcgcctccagcttagcgcactaccgggtgacccggccagagtctcctgctcccggctcctcgcagctgcgccgcaggctccagccctgcccccgctgcgctaatgaccggaaagcccgcctgagcccgccgccttccacgctatccctggaaacagcctggtggcaggagagggcccacagagcctcgaaggcagagaacttttattccccccgccgaagagtttccctctgcgattgatttacaatctgtaacatacaaagacagggctggaatcccagccgtcggaaacgtgcccaaacacgtggaaaaaaaaatcctctctacctaatacactttccaggcttcgtttgtcctgaatataatcccagacagtggaccttaccaaaggaggggtagaaaggtgcagtccgaacagcatttggacccgactacaagagccatctctaactataccggttgaaatagttgtagcaaccgtagcaatcgaccagcctgctccccttccctgacacacacatacacacacacacacgcacacacacacacaccacgcagcctggctcggtgagttccagaatttagaaaagtaactcattgtagtacctcggggcggcggggaatggggtaagaccgcggggaagggggcgctattttcgggggcatttgaaaagcacggtctggttggaatgttatcgtctttcagatggcctctcctactggaagtttctgtaccctttatcagaagagaggcgcaggcggacggagggaagtcgagatgagcgctagggctgcaccttgctccagggccagctgggagggggagggtaccctaaagaggcgctgaggtctcagagggcctatcggaagccgttctttgtggcctgggatttcagcccaccagtgtcagagtgttagtcccctttgtctaactctgctttgagcccaccagccaccaagccttggacaggctgtgaagtcaaccctttggcgtttgcttgctccctcgctcgcgctctctctttcctacttcacctaagttcgatgagttgagatctgtttttgctgaactcgaagtgcttcgaagaggcgagctgtgtgcatgtgcgcctaattatcaaagctggtggaaaagagcccatttatatctgtgcgcaaacttctccgagccaacactttgcaagttcagtattctagcgcaacgtagggacctgcaaatacttgcaactgcgatgggcaccgaggaccctgggacagagtccttgattggcagaactcttcttggtgaacttctgcgtgtcctgtgcctaagtcggcgcgctacgaccccgggagccgttttagcccggagccgcgggctccagagctggagcgggccggggagaaggatgctgagggacgcatggaaagcaggcaggcaggcaggggcgggggaagacttacggacatcctggccctgacaccgaaggacagcggcgacgagcagcgtcagcagcaccagcgtctggggagccccgaggcgaatcatggctcaccgcggggcctggctgagccgggcccgggcggagcgcagcgaaacggcaggagcacggcgcgggtccgggtctctaccgcgccctcatgcaggaggcccttggagcaggagggggaagcgggagacccggcagcccagcagcgctctgcgtcttctccccgccgcggcgcccgttatatgcgcccggcccctttcgaggctggcgaactcgcccaaaccgcgggccgccccctgccccccgctgggctgtaacctgaaccgcccgcccccggagcccgcctgggccctgccagtgcccgcacctgcccaagccggacccccctctctgggagtcacgcttcccgccctccacccctagtgcgccgagtggcctgatcgggcggggcgcagagatggcccctgccccccaaacccggggctgcggcgctgcccccctctgaccacaggcgggaagggtggcctccggcccctcccctcggagttctgccggagttggaggggagggggtgtttgcagaggcgcaggccgagagccctagaccaaggacggaaaagacatgggagggaggagggaaagcggtagaaaggagcagcggagggcgagggggcaccgcgtcaggcgtttgggagtggggacagggaggagcccacagagattcagagtcctaaatcttggagacaggctagctgagccagatctgaagggttaccccgacctatcttttagcccttccctgcagtacctggtccccagactcccacctggacgttcacagcgactgccctccacccctcccccatccagctctgcgttgaaggcttcctctggagcacaggccgaagttggcctgagccgacagccaggaaaagagctggtgtgttactgcacagaaggagacctgtgtgaaggtgtggggggcaggggcaggccctgggaaggggactgaaagagccacagaggacggagggagccgagactaaacggtgcaagctgcctgctgtggggggactgtctagctccaggctcagacgtggtgtctgctcttcctggctggggtccgggagtcccccggggagtgggcactgccggccgtcgtagagcagctttggccagggacggttggtcactgctgcggccctggccagggatcggggaggccgatccagctggcgagttctgtgagccggggagaagcgccagaatttcccagtcggccccctagccctccgcttgccgcctcacctcaccttccccggtgagcgccctctctcaccttagccaaactgccttcttcccagggcttagctggtctcttctcttggtctccggtgcctcctttcataccagggaggaaacgtccccaaacagaccttccttttgagcgatatggtcccccaaagaactataggcaaaatgaaactcagaatttggggtctgacttaaccagaacttctgccctcctgggcagttttgtttctctggagctttccccctagaagctgagagcacttgaaagaagctacttctgggccttaggcttccaccaggggtcctgggaccccatccctagcctatcatgctttgacacttgtcctggtagaggctggagttccaagtgctctggttggaaagggaaagaactcattgttgaaggaaatgcttctaggctttgtccagtctggatggagatggggaagaattcaaccagtttccagcatctcccctaccttccacgggccttgtctgagtctccatgctcccattcaggggcttgcattaagctctgggctcttcctcaggcccaatctctgctagaagaaagctggtctcttgccatcagtgccccatgtcctctttggggctcagaaggtcctatattctctacctggaagatagaatgaccaaattccacacatttatcaagacctcctaggttaaagcccctctgagaagccttctctgatatctctagaacacaacgtctccctggctttctgaatccccctggcatttatagcctaagctacatatgtttttgtgtagttttaattttttccccttatatccattggtctttatctcatcaatgagcttggaagatgcttggggacaagaactgtgcctagcacaattctaacacataggagttaggaaagcccctgtggactaataattt

SEQ ID NO: 916092 - DNA, 4001 bp, Homo sapiens
tggagtctcgctctgtcgcccagactggaatgcagtggctcgaactcaactcactgcaacctcagcctcacccttccaagcagctgggactacaggcgcccgccaccacacccggctaattttttgtatttttagtagagacggggtttcaccatgttagccaggatggtctccatctcctgacctcatgatccgcccacctcagcctcccaaagtgctgggattacaggcatgagccaccgtgcccagccctgtttgtatttttaacagagacaggattctgccatatcggtttcacctcctgccctcaggtgatccacctgccttggccttccaaagtgctgggattacaggcatgagccaccgcacccagccaagtgcttctttttcatcactttgattgatactctttagttccactgcagatgaaagcagggaaaagtcagccagttttctccatatcacagagtgatccaaaaggttaaaccacaggccccaaataacttagctcagtttacccacataccactgtcagcatgtcaggactcaggctgcctcctctgattgtaaattaactctgccacttttgtgtgaacggttctctctgctgtgttcctagcagtttgccatgtgtctctgggaaaaagacacgttctcccttagctaacttgaatagattagcatatgctgcacatagggaagaaaagggcatgctaatttaacatgttcactctccacttgtaccagacttcacactttcccataatctcactttattcccacaacagagaggggcagtattgtctccatttttaaaagagaaagttggctaggtgcggtggctcaagcctgtaatcccagcaccttgggaggtcaaggcgggcggatcacgaggtcaggagatcgagatcatcctggctaacacagtgaaatcccatctctactaaaaatacaaaaaagttagccgggcatggtggcgggcgcctgtagtcccagctactgaggaggctgaggcaggagaatggcgtgaacccaggaggcagagcttgcactcagctgagatcacgccactgcactccagcctgggtgacagagcaagactccgtctcaaaaaaaaaaaaaaaaagagaaagctgaagccctaaaacaaaagtgacctgatcaaggtgacatgagaattaacagctactacactggtggagaccggctggaaatcaggtttcctattctgaataggatgctcttttgcttaaaatgaaaaatagtgggctttacagatcccttatctccaaaggagagctggtttgcttgttcactggttacttctgcaagttggcatttaattatcactgttttcttgttcaactgaatggttattggatcacaaaatgagccctgcccacccattctcaaattcaaacctttgcccacgcttctctgagggctattcaagccagcaacccacctctctaacattgggcatgtccagcagttctccaaacacgtagacaccaggggcctccagcacctgatggatgagtgtggccagcgctgcccccttggccgacttggctaggagcagaaattgctcctggttctgccctgtcaccttcacttccgcactcatcactgcactgagtgtgggggacttgggctcaggatgtccagagctgcaaggaaagaggatgtgaagctagaggtccccgatggctggtcggatgggaagcacaaggctgagggactggattgtaaaggcactaagtcggttctgcggtgaggaatcagacatggagcggtctaaaattctgatctaggaatcctaaagtcagccacttcgcaaggctgccacacccaccccctcccctgggcctaaccccaagccccatcacgtgcaccccattgaaccccaagacacaggatgcaaaggagaaatgggtgtcgcatggtgtccaccctgacgacgctccctcagctctccattgctgccccgcacgcgcccacaaccacgtgacctcacccccattgaagcttacacgtggctccgccccctcccttaaagacaccgcccagcgaccgtgggctcccgccgactgcttcgtcgtaccctgggtcaggctctgcgggccgctacctggaagcttcgacctccagcgcaccgggcggggccgccgctccgtcacctccggcagctgttccaagcctttcctgccacctccctgaagagtcgctctggccactaaactctatggcgggcttccggccgtacttccgctctaaggacgcaaatttcggcaggacatgccccacccccgcgttccgaccgctgaagctccagtgagggacgcaggcattctactcttcgattggtcgctgggggaagaatgacgggcgcctttttaaatgctttatttcaataaaactttattagtggaagagcgccagctattaactacagacgtctctggtgggtccctggtcccggcccattctgtgtctgttctaagccgctggagagctggagatcaggactgcactgggtacctgaggcaagagaaaagctgtaacggaaggagtgaagaagagggaaaaaaacgggatgaggaaacaaggggcagagaggaagcaaacaaaaatcaataatagaagtttagcagcagagatcacctaggtggttcaaccactcacttttttgaagagcaggagaaaagaagcgagaaaaataaaagagagaataaagctaacatgtattgagtgcttactattggtcagacatcttttaaaattttattccgttgaatcctcacaaatattcccctgtgacttcaggacaccctctaccatgattactacatatgtattaatacttgtagaatgatgctttcagtacatggactcttaatttcttggggaggaaaaaaccctatgtggttctcattttacagaaaaggaaattgaggctcataaaaatccaaggatttatctggagcttttcaaactcaaaaccatctttctacttcaatatgatactttaataaaaacaaaaacaactaacatttctatagtgttttatatttcacaacaggcttgcagaaggtcaagtgagggtaaagttaatgacatcttggcctttgtgttaagccatgagcattacttaattcatctgatacaacgatctagtaattgttatctccactttccagatggaaaaactgaactcaggaaaattaagaaacttgtaagtaatggaaagacaagaaagtgaaaaagagaaagataaagagaaataggactcgtagtctgttagggctaaaggaactgcagatgcagtttatggtccgcatattttggtttgtgatagaaaataagcagaaacacagaaaggaaagagaaaggaggaagaggagaagaagaaatgaatggaaaaggtgaaacaaaagtgagtagaaggaatcaaaggcataataaaatattcagagtttgaaggaagcaaggaattaatgagtccaaacattattattattattttgcatccacccctccccgccccaagcttatcttttttttttttttttaatttgagacggagtctcgctctgtcgcccaggctggagtgcagtggcgcgatctcggctcactgcaagcttcgcctcccgggttcacgccattctctggcctcagcctcccgaatagctgggactacaggcgcccgccactacgcccggctaatttttgtatttttagtagagacggggtttcaccgtgttagccaggatggtctcgatctcctgacctcgtgatccgcccgcctcagactcccaaagtgctgggattacaggcgtaaaccactgcgcccggccaagcttatcatttttagagagaagggaaaaacatgtaagatgaagggatgagaaaataacccgtatttgttctattttgcgccaagtgctttatttgttcattttttacttttttttttttttttttttttttttttttagagg

SEQ ID NO: 916093 - DNA, 4001 bp, Homo sapiens
tcctgccctcaggtgatccacctgccttggccttccaaagtgctgggattacaggcatgagccaccgcacccagccaagtgcttctttttcatcactttgattgatactctttagttccactgcagatgaaagcagggaaaagtcagccagttttctccatatcacagagtgatccaaaaggttaaaccacaggccccaaataacttagctcagtttacccacataccactgtcagcatgtcaggactcaggctgcctcctctgattgtaaattaactctgccacttttgtgtgaacggttctctctgctgtgttcctagcagtttgccatgtgtctctgggaaaaagacacgttctcccttagctaacttgaatagattagcatatgctgcacatagggaagaaaagggcatgctaatttaacatgttcactctccacttgtaccagacttcacactttcccataatctcactttattcccacaacagagaggggcagtattgtctccatttttaaaagagaaagttggctaggtgcggtggctcaagcctgtaatcccagcaccttgggaggtcaaggcgggcggatcacgaggtcaggagatcgagatcatcctggctaacacagtgaaatcccatctctactaaaaatacaaaaaagttagccgggcatggtggcgggcgcctgtagtcccagctactgaggaggctgaggcaggagaatggcgtgaacccaggaggcagagcttgcactcagctgagatcacgccactgcactccagcctgggtgacagagcaagactccgtctcaaaaaaaaaaaaaaaaagagaaagctgaagccctaaaacaaaagtgacctgatcaaggtgacatgagaattaacagctactacactggtggagaccggctggaaatcaggtttcctattctgaataggatgctcttttgcttaaaatgaaaaatagtgggctttacagatcccttatctccaaaggagagctggtttgcttgttcactggttacttctgcaagttggcatttaattatcactgttttcttgttcaactgaatggttattggatcacaaaatgagccctgcccacccattctcaaattcaaacctttgcccacgcttctctgagggctattcaagccagcaacccacctctctaacattgggcatgtccagcagttctccaaacacgtagacaccaggggcctccagcacctgatggatgagtgtggccagcgctgcccccttggccgacttggctaggagcagaaattgctcctggttctgccctgtcaccttcacttccgcactcatcactgcactgagtgtgggggacttgggctcaggatgtccagagctgcaaggaaagaggatgtgaagctagaggtccccgatggctggtcggatgggaagcacaaggctgagggactggattgtaaaggcactaagtcggttctgcggtgaggaatcagacatggagcggtctaaaattctgatctaggaatcctaaagtcagccacttcgcaaggctgccacacccaccccctcccctgggcctaaccccaagccccatcacgtgcaccccattgaaccccaagacacaggatgcaaaggagaaatgggtgtcgcatggtgtccaccctgacgacgctccctcagctctccattgctgccccgcacgcgcccacaaccacgtgacctcacccccattgaagcttacacgtggctccgccccctcccttaaagacaccgcccagcgaccgtgggctcccgccgactgcttcgtcgtaccctgggtcaggctctgcgggccgctacctggaagcttcgacctccagcgcaccgggcggggccgccgctccgtcacctccggcagctgttccaagcctttcctgccacctccctgaagagtcgctctggccactaaactctatggcgggcttccggccgtacttccgctctaaggacgcaaatttcggcaggacatgccccacccccgcgttccgaccgctgaagctccagtgagggacgcaggcattctactcttcgattggtcgctgggggaagaatgacgggcgcctttttaaatgctttatttcaataaaactttattagtggaagagcgccagctattaactacagacgtctctggtgggtccctggtcccggcccattctgtgtctgttctaagccgctggagagctggagatcaggactgcactgggtacctgaggcaagagaaaagctgtaacggaaggagtgaagaagagggaaaaaaacgggatgaggaaacaaggggcagagaggaagcaaacaaaaatcaataatagaagtttagcagcagagatcacctaggtggttcaaccactcacttttttgaagagcaggagaaaagaagcgagaaaaataaaagagagaataaagctaacatgtattgagtgcttactattggtcagacatcttttaaaattttattccgttgaatcctcacaaatattcccctgtgacttcaggacaccctctaccatgattactacatatgtattaatacttgtagaatgatgctttcagtacatggactcttaatttcttggggaggaaaaaaccctatgtggttctcattttacagaaaaggaaattgaggctcataaaaatccaaggatttatctggagcttttcaaactcaaaaccatctttctacttcaatatgatactttaataaaaacaaaaacaactaacatttctatagtgttttatatttcacaacaggcttgcagaaggtcaagtgagggtaaagttaatgacatcttggcctttgtgttaagccatgagcattacttaattcatctgatacaacgatctagtaattgttatctccactttccagatggaaaaactgaactcaggaaaattaagaaacttgtaagtaatggaaagacaagaaagtgaaaaagagaaagataaagagaaataggactcgtagtctgttagggctaaaggaactgcagatgcagtttatggtccgcatattttggtttgtgatagaaaataagcagaaacacagaaaggaaagagaaaggaggaagaggagaagaagaaatgaatggaaaaggtgaaacaaaagtgagtagaaggaatcaaaggcataataaaatattcagagtttgaaggaagcaaggaattaatgagtccaaacattattattattattttgcatccacccctccccgccccaagcttatcttttttttttttttttaatttgagacggagtctcgctctgtcgcccaggctggagtgcagtggcgcgatctcggctcactgcaagcttcgcctcccgggttcacgccattctctggcctcagcctcccgaatagctgggactacaggcgcccgccactacgcccggctaatttttgtatttttagtagagacggggtttcaccgtgttagccaggatggtctcgatctcctgacctcgtgatccgcccgcctcagactcccaaagtgctgggattacaggcgtaaaccactgcgcccggccaagcttatcatttttagagagaagggaaaaacatgtaagatgaagggatgagaaaataacccgtatttgttctattttgcgccaagtgctttatttgttcattttttacttttttttttttttttttttttttttttttagaggcatggtttcactctgttgcccagggtggcgtgcagtgatgcgatcacagctcactgcagcctcgattgttcaaatttttatcttatttatttttttttgagacagtcttgctctatggcccaggctggagtgcagcggcacaatctcggctcattgcaacctccacctcccaggttcaagcggttctcctgcctcagcctcccaagtagctgggattacagggacgcgccaccatgcccggctaatttttgtatttttagtagagctgtggtttcaccatgctagccaggatggtctcg

SEQ ID NO: 916094 - DNA, 4001 bp, Homo sapiens
gagaattgcttgattctgggaggcggaggttgcagtgagccaagattgcaccactgcaccccagcctgggcaacacagccagactctatctcaaaaaaaaaaaaaaaaaaaaaaaaaaaaaaaaaaaaagaatacttgttaactgcttggtacagaaaatatttaaaactactcagattttaagctttttacctatatttgaccaaccgacataaggaattaactgtctttaactgaaagagaggaattaaaacctgttattcttttatctgatgaggatctgaatgtgtatgcttaggagatctgaaggaaaataaaagacaagcttctttggaaagaggcctagagttcaagccaattaaggaagaaggctgggagttaaattcctacactatactacctacctacctacacacacacacacacacacacacacacacacacacacacccctccaaatcgcaaaatagggcacttttgagagaaattctctggtccagttctaaaaaggggtaacaggtattttatttgttagaacaagcataaagcatcatatggacaagagggctaatacagccctttagcgaccacaattctcatgtaaccagagagggagaaattagcatcctagatcatacaataagaattcctggcccggcgcagtggctcacgcctgtaatcccagcactttgggaggccgaggcgggtggattacgaggtcaggagatcgagaccatcctggctaacacggtgaaactccgtctctactaaaaaatacaaaaaattagccgggagtggtggcgagcgcctgtagtcccagccactccggaggctgaggcagaagaatggcgtgaacccgggaggcggagcttgcagtgagccgagatcgtaccactgcactccagcctgggcgacagagtgagactccgtctcaaaaataataataataataataataataataattcctggccaggcgcggtggttcaagcctgtaatcctagcactttgggaggccgaggcgggcggatcacttgaggtcaggagttcgaaaccagcctggccaacatggtgaaaccacgtctctactaaaaatacaaaaaaaatagccgggcgtggtggcacgcgcctatagtcccaactacgcgggaggctgaggcaagagaatagcttgaacccgggaggtggagattgcagtgagccaagatcgcgccacgtgcgcactccagcctgggtgacagagcaaggctcggtctcaaaaaaaaaaaaaaaaaaaaagaattcctaaggtctaaatgggtagagaaaaggagaacagaataaggagtctagaaaaaatattccacaatccatgctaactttatcaggtatcccagaactttgatggaatactgattatttgacaaacctatataatagggattaacaggaaaccgaagacaaaacagtttcctgaaggaatgtggcagggaatcggcaatggagagtcaaacttgggaaaccatcaggaggagtctgtaacgacaaaacatctgtattcttttcttacaatatggggcgagtttggtggtttggtaaattaaaatcagggtatcatccacaatgctaaaaataaggggcaacctgaagggtcctaatccagtacgcctacaggtctgtgtatcctaaggagtccatgtgctgccttcaactttccaccgactctatgccctctccccggcagggcttcctactctaaaccaaggctttagctcctacactaggccacacacttattccaaaggtcagcagaacgctcagtccccaagaattacccggaactctctttccccgtctcccactcgggctgaaccctgactcccggcccctgtggacaccacagcatctctgctgcccctccagctcctaccaaaatcagcgcctccatcttgccccgcagctggtgccgacgtggagccgcaaaagaaacgccgccgctgattggccatacgttcccattaggccccgcctaggataaggatcattgggtaaggcttgctttattggccaattattgtactagcttgcttaccggaagcaaagtgtccaaccagaaggctcaggtgtttgattgtcagcttgaatactcaataaaacgccaaaacctcacgactcattggggcgggagggttagtggggcggggttgtttccatggggaacagaagaagcgattgttaattttcaattggtagggccgaggacacgtgatattgtcggactgatttagcgatttttaaaccgcaccctctttagggggcgctgtgtctccttagcctttaacactggcgctttctaaccggaatcctgccctaatccctattttcagcgcccgcattaggtccatgatctctgtggctagcccttccctcatgctcgctcaggtcacttcagcatcctcacagaaagtctgcacaaccatagagtagagccaagaaaggcccaacatgttaactacataaaccaaggctgccaggagttgatagtcgcaataacaatctccctaaggtggagttccaggctttgctgggcctgaggaacatgagaagtcagtttgtaaaggccaacttgagctcaacgtgaaatcggctttggagatggggtttgcgggacaaacggggaaagggatgggattagaataagagaggggttatagggagtaaattctggggttttccaatagaaacaagccgttgtgcctgggcgcggtggctcaagcctgtaatcccagcactttgggaggccgaggcgagcggatcatctgaggtcgggagtttgaaaccaacctgaccaacatggagaaaccccgtctctactaaaaaaaaaaaatacaggccgagcgtgatggctcacacctgtaatcccagtactttgggaggccgaggcgggcggatcacgagatcaggagatcaagaccatcctgactaacatagtgaaaccccgtctctactaaaaatacaaaaaattagccgggcgtgggtggcgggcgcctgtagtccctgctactctggaggctgaggcaggacaatggcgtgaacccaggaggcggagtttgcagtgagctgagatcgcgccactgcactccaacctgggtgacagagcgagactccgtctcaaaaaatatacatatatacaaaattagccgggcgtggtggaacatgcctgtaatcccagctactcgggaggctgaaccaggagactcacttgaacctgggaggcggaggttgaggtgaggcgagatctcgtcattgcactccagcctgggcaacaagagcgaaattccatctcaaaaaaaaaagaaaagaaaagaaaaggagaagagaagagaaaagaaaaggagaaagaaagaaaagaaagaaagaaaggaaggaaggaaggaaggaaggaaagaaagaaagaaagaaagaaagaaagaaagaaagaaagaaagagaaggaaagaaaggagaggaaagaaatgaggcgttgcaaaatgagaaaagagaagtttactgaatgcaagaatttcacaatagggaatgattttgatgaagcttggctttcccctatcccttggtttcctgatccctgactcctcttagggcagggacacctattaccttaattatcctaaagggattttttccctcatctctgaaaattatatccttaggagccctccaagaagagattccaaacttacccaggaatttttcttttttgagacggagtctcgctctgtcccccaggctggagtgcagtggctcaatctcggctcactgcaagctccgcctcccgggttcacgccattctcctgcctcagcctccagagtagctgggaccacaggcgcccaccaccacgcctggctgattttttgtatttttagtagagacggggtttcaccgtgttagccaggatggtctccatctcctgacctcgtgatccgcccgcctcggcctcccagagtgctgggattacaggcgtg

SEQ ID NO: 916095 - DNA, 4001 bp, Homo sapiens
aatcttgtcaatccctcccatacaggcctcaccttgaccatgtgaggtttgaccatggaaactgcagaggtgtaacgttccatgacaggtggaaagccaacctccagctgggctttcaaatgacccttacggctggataccaccagagacttcttacaccagggcacaaactcacgatactcctggacgttggacaccacctcatacatctcctgcattgagtacctaggagaagaagaatcacaggccaaggagctgccagctgggtcaggttcctccttgctataggcccctaattcatacctttgcccactaaccacgcaccttcaggaactacagatcccaaataagcctggatgaataacttcccaaaagcaaacgtgtaaatccttatgatactgttaccttatattttgcagtttacagaatgcttttgcattcattgtttattttgattttaagagggaccatctagggagaacagaggctgtcagttttactggtgatcacacaaggatcagatcccagctcttaacaattttttaacaatgtggccttaggtaaattacctgtgtctccattttctcacctgatttataggtttgttgtgagaattaaatgagaaatatctatgtaaaacatctaagtcaagctgctagcatgtagcaagtgctcgataatttagctattatgctcaaaatatactaaaaaggttacgctgctaatttacacatactaggtacccataaaaattatttttaaatggtcaccagaaaaatacaccctgttttttgttttgttttttgagacagtcttgctctgtcgcccaggctggagtgcagtggggcaatctcagctcactgcaacctctgcctcccaggttccagcgattatcctgcctcagcctcccaaatagctgggattaaaggcgcccgccaccgtgccaggctgattcttgtgtgtgtgtttttttttagtggagacagggtttcaccatgttggccaggctggtctcgaactcctgacctaaaacgatcggcccgcctcagcctcccaaagtcctgggattacaggcgtgagccaccgcacccagctacgccctgttgtcttaaagtatagtccaaccctagtctcatttcacttaagcacatgcacagcaaccaagaagggagaaattaaggtcggaagagtggcaggggaggactgaggatcagtattgtagctggggagggggatggctagggatgaatcttgcccaccgatgataccctgacattcttgcctggacagggttatttggagggaaaagggaggtgcaaggatgcaaggcagagaatgcttaccccatgattctacgctccgagtaagcctttcgcttgttggtgaagggagcagcaaatcccatgaaggaacggctcgaaggtaagccagcctcagccgccaagatctgggcagcccgaggcaagaggaggctgcaggaggtcagaaacctaaggccaaaggaaagaggagccaaccgtatagttcttcgtaatcctctatcatttgtaggtgaaggagaagaagagtgcatcccagacgaaggtcgtccaaacaagctttccccccagcacctgctgcagcccgctaggctctctctggccagggagtcacgagtgcaaaaggtcgagggcagctaaggacagggctgggggcggggtgagggggatgagaaaaaggggtgtgtgggaagcgccagttgcctttgactgggcctacactactgctgaaagctaagactttaaggaagcatcactgtccccggggaccccagggcgcccgcgagggccaagaagaggttggacactcaccccgagaacttcccttctcgtacaacttgcaaaagcattatccaaagctctacgttagctcccagggcatgattgctgccagtccccgccgcgcctgcatcccagtatagcacccctccaccgcggaaccccggggttcgcagcgaccccctgccctcagccgcggtcacctccctctcacctcattggtcgcggcggtggcagagggcctgggggcggggccggttgcgcgcccgggctgagcgagagccggcagcagcgctcggctgccgcgcgcgtcccagctgggacccgccgcgagcccgcccaggccatgcgcgcgaccctgcctggccctctaagttctgacgcgggctgcgccctcctcactccaaaggcggagcggcaagaggcagcggctgggctggttcgggacctctgagcgcaggggcgacgggaggcggcagcacctctcgccttgctcccgtccaggctgccgggtaggctagaactgaagccgggaccgctgctcccgcagatctcggtacccccacgtcacgctgttgccatggctcgggcctgggagaggaaggaaggaaggaaggggacaacgccgcctgtcgggagatgtagtttcacacctgtggcgagaaagggcactggggtgtgcgtttgagaagctgcaaagatggttcggggactgaggtcgcctgtggtcacaggacccgataggtaggcacagaggcgacttcgtgggcgtgtctaccgcagatatctgtagatcctctgaacgtcgctgttagagccttaggttctctagagggacatagtgaataggataaatgtatatatgaaagggagtttattaagaattgcctcacaggatcacaaggtaaagtctcacattaggccgtctgcaagttgaggagcaaggaggccagtggtggatcagtccaaggcccaaaacctcaaaagtagggaagccggcagtgcagccttcagtctgtggccaaagccccgagagcccttggcaaaccactggtgtaagtccaagagtccaaaagctgaagaacttggagtctgatgttcgagggcaggaagcatccagcatgagagaaagacgaaggccggaagacttcagcaagtcagcttcttccacctacttttacttttatttatttatttatttatttatttatttatttatttatttgagacggagtctcgctctgttgcccagactggagtgcagtggcacgatctcagctcactgcaaccttggcctcccaggttcaagcgatcctcctgcctcaccacccccgccccgcccccctccccagtacctgggattacaggcatgcgccaccatgcccagctaatttttgtatttttagtagagatggggtttcgccatgttggccaggctggtctcgaactcctgacctcaggtgatccacccgtctcggcttcccaaagtgctgggattacaggtgttagccaccatgcctagccctgcctactttttctagcgtcgctggcagcggattggatggtgcccaccattgagactgggtcacttccttccagtccactgacttaaatgttaatctcctttggcaacaccctcacagacactcaggaacaacactttgcctccttcaatccaatcaagttgacactcaatcatcacagagcctttatcatattcggccttgtttatagttagaagcactgttcatctttgtagcttccacaagtggttagtgctgtgttctacatttttgggaaaggagattaacattccaagctctgggctaagactgcatagtttttacctttaatatttatagaaagaagtcgaggtaggaagaaccagatattcttaggacagagaaccatctttgtttgaaaagtgtgcgcttgatgaagagtgagacctcatggacagaaacccacgcaattaaataccactatactacttttcatgattcaaggagaaaaaaaaaatgctcttggctaggcatggtggctcacgtctgtaatcccagcactttgggaggctgaggcgggcagatcacttgaggtcaggagttcaagaccagcctggccaacatagtgagaccttatctctactaaaaatacaaaaattagccaggtatggtggcgggcgcc

SEQ ID NO: 916096 - DNA, 4001 bp, Homo sapiens
gaatgcttttgcattcattgtttattttgattttaagagggaccatctagggagaacagaggctgtcagttttactggtgatcacacaaggatcagatcccagctcttaacaattttttaacaatgtggccttaggtaaattacctgtgtctccattttctcacctgatttataggtttgttgtgagaattaaatgagaaatatctatgtaaaacatctaagtcaagctgctagcatgtagcaagtgctcgataatttagctattatgctcaaaatatactaaaaaggttacgctgctaatttacacatactaggtacccataaaaattatttttaaatggtcaccagaaaaatacaccctgttttttgttttgttttttgagacagtcttgctctgtcgcccaggctggagtgcagtggggcaatctcagctcactgcaacctctgcctcccaggttccagcgattatcctgcctcagcctcccaaatagctgggattaaaggcgcccgccaccgtgccaggctgattcttgtgtgtgtgtttttttttagtggagacagggtttcaccatgttggccaggctggtctcgaactcctgacctaaaacgatcggcccgcctcagcctcccaaagtcctgggattacaggcgtgagccaccgcacccagctacgccctgttgtcttaaagtatagtccaaccctagtctcatttcacttaagcacatgcacagcaaccaagaagggagaaattaaggtcggaagagtggcaggggaggactgaggatcagtattgtagctggggagggggatggctagggatgaatcttgcccaccgatgataccctgacattcttgcctggacagggttatttggagggaaaagggaggtgcaaggatgcaaggcagagaatgcttaccccatgattctacgctccgagtaagcctttcgcttgttggtgaagggagcagcaaatcccatgaaggaacggctcgaaggtaagccagcctcagccgccaagatctgggcagcccgaggcaagaggaggctgcaggaggtcagaaacctaaggccaaaggaaagaggagccaaccgtatagttcttcgtaatcctctatcatttgtaggtgaaggagaagaagagtgcatcccagacgaaggtcgtccaaacaagctttccccccagcacctgctgcagcccgctaggctctctctggccagggagtcacgagtgcaaaaggtcgagggcagctaaggacagggctgggggcggggtgagggggatgagaaaaaggggtgtgtgggaagcgccagttgcctttgactgggcctacactactgctgaaagctaagactttaaggaagcatcactgtccccggggaccccagggcgcccgcgagggccaagaagaggttggacactcaccccgagaacttcccttctcgtacaacttgcaaaagcattatccaaagctctacgttagctcccagggcatgattgctgccagtccccgccgcgcctgcatcccagtatagcacccctccaccgcggaaccccggggttcgcagcgaccccctgccctcagccgcggtcacctccctctcacctcattggtcgcggcggtggcagagggcctgggggcggggccggttgcgcgcccgggctgagcgagagccggcagcagcgctcggctgccgcgcgcgtcccagctgggacccgccgcgagcccgcccaggccatgcgcgcgaccctgcctggccctctaagttctgacgcgggctgcgccctcctcactccaaaggcggagcggcaagaggcagcggctgggctggttcgggacctctgagcgcaggggcgacgggaggcggcagcacctctcgccttgctcccgtccaggctgccgggtaggctagaactgaagccgggaccgctgctcccgcagatctcggtacccccacgtcacgctgttgccatggctcgggcctgggagaggaaggaaggaaggaaggggacaacgccgcctgtcgggagatgtagtttcacacctgtggcgagaaagggcactggggtgtgcgtttgagaagctgcaaagatggttcggggactgaggtcgcctgtggtcacaggacccgataggtaggcacagaggcgacttcgtgggcgtgtctaccgcagatatctgtagatcctctgaacgtcgctgttagagccttaggttctctagagggacatagtgaataggataaatgtatatatgaaagggagtttattaagaattgcctcacaggatcacaaggtaaagtctcacattaggccgtctgcaagttgaggagcaaggaggccagtggtggatcagtccaaggcccaaaacctcaaaagtagggaagccggcagtgcagccttcagtctgtggccaaagccccgagagcccttggcaaaccactggtgtaagtccaagagtccaaaagctgaagaacttggagtctgatgttcgagggcaggaagcatccagcatgagagaaagacgaaggccggaagacttcagcaagtcagcttcttccacctacttttacttttatttatttatttatttatttatttatttatttatttatttgagacggagtctcgctctgttgcccagactggagtgcagtggcacgatctcagctcactgcaaccttggcctcccaggttcaagcgatcctcctgcctcaccacccccgccccgcccccctccccagtacctgggattacaggcatgcgccaccatgcccagctaatttttgtatttttagtagagatggggtttcgccatgttggccaggctggtctcgaactcctgacctcaggtgatccacccgtctcggcttcccaaagtgctgggattacaggtgttagccaccatgcctagccctgcctactttttctagcgtcgctggcagcggattggatggtgcccaccattgagactgggtcacttccttccagtccactgacttaaatgttaatctcctttggcaacaccctcacagacactcaggaacaacactttgcctccttcaatccaatcaagttgacactcaatcatcacagagcctttatcatattcggccttgtttatagttagaagcactgttcatctttgtagcttccacaagtggttagtgctgtgttctacatttttgggaaaggagattaacattccaagctctgggctaagactgcatagtttttacctttaatatttatagaaagaagtcgaggtaggaagaaccagatattcttaggacagagaaccatctttgtttgaaaagtgtgcgcttgatgaagagtgagacctcatggacagaaacccacgcaattaaataccactatactacttttcatgattcaaggagaaaaaaaaaatgctcttggctaggcatggtggctcacgtctgtaatcccagcactttgggaggctgaggcgggcagatcacttgaggtcaggagttcaagaccagcctggccaacatagtgagaccttatctctactaaaaatacaaaaattagccaggtatggtggcgggcgcctctaatcccagctactcgggaggctgaggcaggagaatcgcttgaacccaggaggcggaagttggagtgagctgagattgtgccactgcactccagcctgagcaacagagcaagactccatctcaaaaaaaaaaaaaaaaaaaaaaggaaagaaagaaaagaaaagaaagcaagcgagcaagaaagagaaaaaatgctcttgataaaagtcaggtgggccaggtgcggtggctcatgcctgtaatctcagcactttgggaggccgaggtgggtggatcacgaggtcaggagatcgagaccatcctggctaacagggtgaaactgcatctctactaaaaatacaaaaaattagccgggcgtggtggtgggtacctgtagtcccagctactcaggaggccgaggcaggagaatggcatgaacccggg

SEQ ID NO: 916097 - DNA, 4001 bp, Homo sapiens
aacgtccacctcccaggttcaagaaatttgcctgcctcagcctcctaattagctgtgattacaggcgtgcgtcaccatgcttggctaattttttttgtatttttagtagagatgaggtttcaccacgttggccaggctggtctcgaactcctgacttcaagtgcctacctcggcctcccaaagtgctgggattacaggtgtgaaccatcgcacctggctgtaaataaatatcaacttcagtatatattttttcatttcactatacatttataactgacagggtttttgatggttgataatttttaaaggtcataaaacaattctaatttttcccattgattaaggtcattgtgtatgacttcagcttgcacattttcacagtcttgcattactgtgcacagcgaggactgtctgtactgcaatctcagtccccaatctggaattcatatttagttcagtagttaacttcttccttgcttgccactgtgtgaaatgttgattatacattgattatacattgtaaaatgttgattatacattggccggtgtggtggctcatgcctgtaatcccagcactttgggaggccgaggcaggtggatcacgaggtcaggagatccagaccatcctggctaacatggtgaaaccctgtctgtactaaaaaaaaaatacaaaaaattagccgggcatggtggcgggcccctgtagtcccagctactcgggaggctgaggcaggagaatggcgtgaagccaggaggcggagcttgcagtgagccgagatcgcgccactgccttccagcctgggggtgacagagagagactcagtctcaaaaaaaaaaaaaaaaaaaaaaaaaaaaaaaaaagaaaccccgtctctactgaaaatacaaaaattagcagggcacagtggcagatgcctgtaatcccagctactcaggaggctgaggcaggaggatcgcttgaacctaggaggctgaggttgcagtgagcccatattgcgccattgcactccagcctgggcaacaagagcgaaactccgtctcaaaataaataaataaataaataaataaataaaaacaaccaaaaaaacccctatttttctctagaggtaaagaacgggggcttcagactcagattaaactgggtttgaatactggttccgccacttactgatatgttcaactgggcaacttcttgcttaacctttaagtctcaatttcctcacgtgtaatatggtaataacaatacccactactggaatgttgaaaatgagaattgaaaataatgtctgtacgttgcctggcacatcacaaacgctcagttgatgggatttagtcatcagtattctgcttttaaaaagggggcgtctggctgggcgcggtggctcacgcctgtaatcccagcactttgggaggccgaggcaggcgaatcacctgaggtcaggagttcgagaccagcctggtgaaaccccatctctagtaagaatacaaaaaagttagccgggcgtgctggcgggcgcctgtaatcccagctactcgggaagctgaggcaggagaatcgcttgaacccgggaggcggaggttgcagtgagccaagatcggaccattgcactccagtgtgggcaacaagagcgaaattctgtctccaaaaaaaaaaaaaatcataactgcacagacaacaacactggaactaattggatgttaaatcaaccctaactggccagaagaaaccagaccatggacggtcagatccctcccatccgccctctcgcccctttcacctttgccccccttctcctcttccgacacagtctcaaacccaaagtgcgtttccgctgcccgcttctcttgggacaagagccgagcacttagtaggtccccgggccaagagctacgaagcccgaggagctggcagccccgcatcgcccgcgaccacccacggccgcaatagctccatagagcacagctcccgggggccgccatcttggtagtcgagtgacaacggccagagagtacgccttgttgcgtcactccacgaacgacggcggctggccggcaacattattagccgaacgcgccctgaaatctgatacacagttgtgccggcattatctctaggatccaaagggtggtctctaagtatcggaaatcccttcctctctctcttctcaaattgaatttacaattcaccaggaatcaggggatctcaggggagccccgggtcacctcttagcggccatgtctctgaatccggctaggcagaaaagtactaactcgcaagatatccaggaactcttgttgtcttgtgcagaagggggaaattgaggcatggtgtggttaaaaagccaagatcacgggccaattcctgcacactttgttgagcgtaagaatcacttggtttacgttttaaaatgaagattcctgggtccccaactaccagagattttgatctgacctatatccctttaatctctatttaaacaaatttctctggcgattctgatgctaaagatgcagaccattcttgagaaacatatgttacactactctgaaaaataaacataggacagacttctttgttctgtccgttttatgaacctaggaagctcataaatgggaacgaaagctctggtatccacttagcaagccagaaccaccactcacacttggtctcctgctgacacaaagctacattcctagctccaggtggcatgtcatgggtgttttacttcagccccagattttcagtctttttttaatggcaagggtaatgcagaccgtcttgtgcaaaataaagaacggacgttgttgagttttgcttggattactgtatgtttctgctttcattccattttaaatgtatgtttcctgtaaatatttcacgaggagaaagcgccaatagaagaaactgttttgaaatgaaaattctcttcctggtttaatatagcctgacagatggacacctaaccgctttcgtttgggaagtactgcgctgggatttctgtttctttctcttttattttaagaatgatagaaggtcctcgttggtatagtgatgagaaaaaaaaaaggaaggatacaagggcgaaatgattcatccatgtattcataattctcatgtctttgttaaaagaaattaagtggctgggtgcggtggctcacgcctgtaatcccaacactttgggagcccgaggtgggcggattgcatgaggtcaggagttcgagaccagcatggctaacatggtgaaaccccgtctctactaaaatacaaaaatcagccaggcatggtggtgcacacctgtagtcccagctattcaggaggttgaagcaggagaatcccttcaacccaggagtcactggttgcagtgagctgagattgcaccactgcactcaagcctgggtgacagagccagactccatctcaaaaataaataaataaataaataaataaataaataaagtctcatcaaagaatcttatatcttccatatctagttatataaaagaatggatctcaggatttagggctgttccttctgcacatcagattaagtatccagaccaacagtatttcactgttctcttatttcatatgatatgtggaggaaaacctgtaaaaagtgaagtaggacaaggactgttggaaggtattttttttttgaggtagcgtcttgctctgttgcccagactggagtgcagtggcatgacttcggctcactgcaacctctgtcttctgggttcaagtgatcctcctgcctcagcttccctagtagctgggattacaggcatgcgccaccatgccaggctaatttttgtatttttagtagagatggggtttcgctatattggccaggctggtcttgaactcctgacttcaggtaatccacctgcctcagcctcccaaagtgctgagccaccactcccggcgctaatttttgtatttttagtagagatggggtttcaccattttggctaggctggtcttatttacttatttattgatt

SEQ ID NO: 916098 - DNA, 4001 bp, Homo sapiens
acttcaattacatcagagtctaatggtttcacaaatacaattcttagtgaactgtcaatctattaaggaaaaagtatggagactatcagagggtgtctaccagaatggaagatcaaattacctaccttgtgcagagggaggacaaggaacgctcctcccccacttgcctctatgattatggcaacaaatctgggattgacagcacaaaaggaactatcccaggtcacacgagaaacccggatgtcatcatagcactggtcatttttcaccgcttgcccaaatacatgccgaaacttgctctgtcgtaccactcgcctcatcgtgtctgcaaaggaagagtgagaattatgttagaattatgcaccaaactgaaagctttacttttacaaatgaaatgctccaagtaggaaaaacagaatggtatggcattttgtctgctctcctaaaaagtagccaaattgcaatccaaatttcttttagcagcacatacccggagacaactgcaaaatgcgtcagggaaagaattacaaagaaatgaaaaattcctaattcaagatccagaaacagctcatcagttttaatttcaatggaaagattaagggaaagaattaaagaaaattagcctttcagggttgggtgggagctgacagataatgtacttcaacccttccccttttacagataagaaaactccaaagtgaaattctctggtagaggtgaggctgaagaaagccgaaaaacaagttacgattttgtggctttgtcctcagcctgccaaggtaatttttcagattgtaaacattttccctagacatcaacactctgctgtctgagaattgtgtctattccccagagtgtttcaacaagaatagctatgggaggaattcaaaagacacagccatcacccttgacttcaaaagccttctaatctccttctaacacagacgtaataatcagagcaactcactaccaaaccgcctagtgctaagtggtacacagtgagaaacaggaaaagtcagcctaaagcagcctaacgggtaagagccaggtctgggaaaagcagagcaaaagtatttaaatggaaagcaatgtgatcaaagtgatgtttaggatgacagtaaatgtggcaggagcacactggacagcttacacaggaacaagctcaaagccaggtactgggctaggaagctatttgacagtaaaccagacttgaggaaggcctggagtgatacagcagtaacagttgggacctaggaaaggaaaaatgcaggggctattgtcggggggaaacaaaaccaggctgggttttcactgagctgatcatccaccacagccacttccctagtaaaccagggactctgaaggggaggggaggtgacacagagctaggttcctaggctgtcttatgtgtcatttcagactccaaattcgactaaatcatctgatagacactgaaagctttgtgctttcagatcaccaggccctccctgattaagatttcctagactgcacccaatgtaattttcctatgtgctactgcaggacattctgttcatgttggttagatagaaggagcctggataaaaatctaagtggaaatggaacatggttcaacatcgacaactcagctgaaaatcagatcctcatatacagaggagagctaacacctgtccactcatgccagacgagacacatggtgggctgttgctaattcctttcctctaattcccttcctcatggccctgagcccactgctaaatgcagagagacgaatttatttttgccagagtctcttacccttccaacgcatgtgtgaaagtggcctctctccaatgctgggggcatgtagccgggctgaagtaagagacccttggcaggcaattgagcatccacgttccttagcccagctgttattgccagactttcccagctgactaccagggccatacattttgagtctttggtagaggagatggcaaatgattcgtggccagggtccttcattttggaatcaatatgaatacttctcaagcgtgagttagataagacagcttccatgaggtggtgaaaagcaaaaggaaagcacatctatacaaaagccaacgtacagccagctggtcttgggctccacttccccacacaaccatctgcaaccatctgtacaagttatagaagctgcaatccctaccagcatcttcaagcaagtgtttcaaaagtaagctaatgtagaagaaaaaaggattgcaccatgtcagagttaacatccttcataaataaaacgttcttacaaattcatacaattaaaacccaacagaaaattagacaaaggatatgaagaatttacaaaagaaacacaaacagcacttatctccactccttcctaaaatcctaataaaatgaaagcaaaaaataaaagcaggtaaaaacatgaaaggacaagaggactggaaaagaggctacaagagagcaaatgtgacaataaactttcgaagatggaaagctgtcatgcacgtgtaactgactgaagtgtgagtgtcctctactcagctgagtctcaggaggagcgcacaaaaaggacatcaaggcccactgtgaatccccagaacactccaaggagaaactgtgtgtctccaaagacagggatgtgggagagggactacagagaaaatgactgaaagcctgaattaggagcagctggacacccagatcccagggctgcacaaccagggtactggcctgccctctccccagcagaagccaggagaggcctgactatgggcctggatgacacccagcacaggtgtgaacagatgcctcactgacagcctggttctatacagtggggcctccagccccttgttcctcctggctcccaagataccacctgccttaccccacaagagatcagacatcactgccctcagtgaggtccaccattcaatgtgcccctccactcacacaggcataaggtcagcttttagaacctcacttttaaatgtgaatggatatttgaggaaggcctctcacttgaaaaagagagacgatttttcctcttcactcaaataggccagataccatctaacctcataaaaataggaagattaatataaatatgtaaaatgctttgtcttcattgaaagatactatacaaatcttctggctgacatacatactaaactaccttaaaaagtgatttccaccaggcgcagtggctcacacctgtaatcccagcactttgggaagctgagacggatcacgaggtcaggcgatcaagatcatcctggccaacatggtgaaaccccatctctactaaaaatacaaaaattagccgggtgtggcggcaggcatctgtaatcccagctactcgggaggctgagggaagagaattgcttgaacctggtaggcggaggcttcagtgagccaagatcgcaccactgcactccagcctgggcgacatagcaagattccatctcaaaaaaaaaaaaaagttatttccatattatgcatacttattttcatcctaaatacatgtggatagaatgatatagaagttcttttgctacaatcacagagtagaatgttagctacagggcagagacagtaagaaaagccagtgcttccgcagtgctgtgctgagtcaggcatctctaagcggagcttgaagggcagtgtgagcccattcacttccaaggtcaaatctgatctgggctcacctgtgtacatgtggcatagccgcttttcttgcacagaatgtctcaggccctccaggcacacaatagagtatagcaattaagagagcaaactccagagtcagacagcctcgtaagtgagaagcacagctgtactatttacttcctggccgtggtacagtacagcaagtcactaagtctccattaagtgtaaaattctctatccaaaaatgggtacaatgcatataaagttgaagtgatcattaaatgatcaattggtgatgggatggtggcaggagattcttatgctat

SEQ ID NO: 916099 - DNA, 4001 bp, Homo sapiens
aaagagttttcataattcaaggagacagtaacacagagaagtcataaatggaaaacaagcttaagaggttttatcacatggatttgtaccttgaaaatgcaagtagctctcaaatttattattgccccacccctggaaaagaggtcaaaggtaaaacagaccaattaataatatgtttctaaagtaccagtttgtgacaaatcaaaatatgagaaattaaaattttgccatcataaagaagagactcgtcgacatacccacttatataactaagaattgatattcatccttttgaacattccatctcatagtcgttagagtgactctcttcctcatggttggagtggatcccagaagtgacagataagttaaacataaaacttttatcaaaaaatccaacggtgtttaaaaaaatgctattcactgacaccgaatctaatcctaaactatatataaataagtataaatgctgattagcacaatctgcaggcaaagtaacaaaggatcatgaaaaagtcaatattgtgtgcagttatgtttcatcggtatgtatctattaaaattcatcaggctttaatgtaccttccacaagtaatcaaaataaatatggacaagataggttctatatttgtcaaaaatgtgtgctcctgacgtttataccaaatctttgtccaatcctcagtacacacgactaacctccaccacgaaacactgcacttcaagacctaaggtacaacacaattctcagttttatttcacttttttccctacttatttatgcgatttctcagatccaatgtttactattatgcttcatagccaaacattatgactgtgaaacatacctccaaaccaaaaatactagtttccttaaatcatctgaaatgtatagaaccaagtccaaaatagattttgcacatttcttcagttttacagggaatgcagaaagtgaattaatattaaacaggtatctatttgccttcacaactgaacagacggtacaaagcaactgcttatacttaatcatgtttctgtctattccagcaggccctggtgtcaggagaacgttctgccagataaggacaatgagatgcattattatatagagtgactaagagccctacaagtactgttttagaatgtaatcccaggcagaaaggctgcggtaagagggcctaatattttgtggtaactatttccaaaagtaaatatattcgccacccaggaccagtttattaaacgcgcactacattcaattcttttcaaatgtcttataggagggaaaagcctttgtatcttaccatgccgggggaaatgaacaacttgcaatttgcttcgcactctgaatcccacgtttgcaacatgtagagcaagcactttagacaccacaaaacaagggcagcctacattacggccaaatataggatgtgtttctaaatcgtgatgcagtaaagcctacgattccttttccagcgttcaaaatcctttgaacactcccaaaaaaggatgccagggccagcgcctccctccaagaggaagcccctttcttctcagctctcaccgcagcctgccacttcccccaacacattcaaatcatttgagagacggagagctggggagcgtgcgccggtggggacaggcgggagagctcggtttctgcattcccaccctccacgtctgacctcatcctcagtcatttcggcgcagcggggccccacctgcacctcgctcctttttactgcgtccctcgccagctgccccgctattagggaaacacacctctgaatcacccagttcactcggacaccctgggcccccgatccgacagccttcctgcttcgttcctcccctcccaacccccagccagtcccagccctctgctcccttggccgggctcagcctcttcccaagccgcccccacccacattactccagctccagctctgccccgccccgcctgacccccaaccgagatctgcagggcccagagctggtctcgcacccaaagccaggaaacccgcaggccaggcggccgccctcgcccctcccgacgcagggcccagctcgccccggccccacgtgagcccggcccctacccgcccccacccactcgttccctggggcggcccaaacccagtccccaggcctggagcccccgggctctacgcctcgcccgaagcagcccttccctcccagcacctcgcccaagcaggcgatccctgacccctaaaagccttccctgggcagcctcgtcccacctcggcccgcggctccgcacccggccaggagcgttccggacctcgaaagcctcctccccacagggaccctgcttcacgctccccacgccacctggttcggtccccaactccctttccccgagcccccgacagcagcccccggccctaaccccttgcaacccagcccgtgaacccgcgccccgcgcgcccacccagcactgtcccctccacctagccctgcccctcgccccgccggctcctgtcaggcggcgcaggcacatgctcagaggacaggtccgcccgcccgactcgctctcaggctgcccccgccgggcgcgagccgctcacccgggccgaggtgcctgaggcgccgccgccgaagtccccgctgcaaagccgggcgaagcctccaaccgctgccgcctccagcctggcactgagcgccgtgcgggggaggggcgcgggcagccgccaccgcccccgccaccgcgcgtaggccccgcccccgcgccgcgcgggacccaaccagggctgccgggccgctgtgcgccacgcccacttccggaggggaagcccgcttcccaccccacgttccacgcctcgctacgccccctctggtcgcaccgagggatgcaggcggtgcccaagcgcacgccccgctctccagtcatctgagtggtagagggccacgcccacaggcgcctccgagcaacgcccactgctccttagaccccggagcggggttcttagagccccgcccactgacccgctaggctctgcaaggccacgtcccctggctcctcaaagattcccccagagcccctcaatacaggaacattagctcctctgagccccgcgcactgcctatccgagtccttaaaccagcctcctgcttccctaagcccggctcccctcccactgcttcagaactcgcccagcggcctcacaaagccccgccccgtcttccagaagccccgcccaaggaccgcaaccctattcctagcatctcaagccccgcccactaccccatctcaacgtttaaaccccaagccccgccccgaattcgcgaatccacgcctctggctcccgaggctccgccctggctccgtcacaccctaccaccacctcccttgaggactgccgacgttccagccctccctgaaccgtccattgtcacattcctagtgcagagtggccgcccctgggctgggccacacccacgtaaccccaaagagggcccgtgattgaccccatttcgcaggtgagggaatggaaacttcagggttcctcccttcctttccctggccagagtcccttaataactcggcggcccaggcctgaaagtcggagcacgggaatttgagcctcagctctgcggccgtcagactgtgtgacctgggacagttctcttacctctttgggcctgagtcccctaatcttcagcatgaagaagttgtcctgttaatagctaaagtccctttctgaaacaccaagctctgaaataccgagatttgaggaaacagagcctggggaaccgaaccgactgtggggtagggctatttacttcccaaagcaaggcatctttgccattcacagggggattttttattttaagcgtcagcctcagaaacgtgtgttatttaaatcaagcttgacctgaactaagacagctatcacagcaaattatttatcctctctaagggtcagtttctttatctgtaaaatggggataacagcccctccctcacagggttccatgagatc

SEQ ID NO: 916100 - DNA, 4001 bp, Homo sapiens
aacactgcacttcaagacctaaggtacaacacaattctcagttttatttcacttttttccctacttatttatgcgatttctcagatccaatgtttactattatgcttcatagccaaacattatgactgtgaaacatacctccaaaccaaaaatactagtttccttaaatcatctgaaatgtatagaaccaagtccaaaatagattttgcacatttcttcagttttacagggaatgcagaaagtgaattaatattaaacaggtatctatttgccttcacaactgaacagacggtacaaagcaactgcttatacttaatcatgtttctgtctattccagcaggccctggtgtcaggagaacgttctgccagataaggacaatgagatgcattattatatagagtgactaagagccctacaagtactgttttagaatgtaatcccaggcagaaaggctgcggtaagagggcctaatattttgtggtaactatttccaaaagtaaatatattcgccacccaggaccagtttattaaacgcgcactacattcaattcttttcaaatgtcttataggagggaaaagcctttgtatcttaccatgccgggggaaatgaacaacttgcaatttgcttcgcactctgaatcccacgtttgcaacatgtagagcaagcactttagacaccacaaaacaagggcagcctacattacggccaaatataggatgtgtttctaaatcgtgatgcagtaaagcctacgattccttttccagcgttcaaaatcctttgaacactcccaaaaaaggatgccagggccagcgcctccctccaagaggaagcccctttcttctcagctctcaccgcagcctgccacttcccccaacacattcaaatcatttgagagacggagagctggggagcgtgcgccggtggggacaggcgggagagctcggtttctgcattcccaccctccacgtctgacctcatcctcagtcatttcggcgcagcggggccccacctgcacctcgctcctttttactgcgtccctcgccagctgccccgctattagggaaacacacctctgaatcacccagttcactcggacaccctgggcccccgatccgacagccttcctgcttcgttcctcccctcccaacccccagccagtcccagccctctgctcccttggccgggctcagcctcttcccaagccgcccccacccacattactccagctccagctctgccccgccccgcctgacccccaaccgagatctgcagggcccagagctggtctcgcacccaaagccaggaaacccgcaggccaggcggccgccctcgcccctcccgacgcagggcccagctcgccccggccccacgtgagcccggcccctacccgcccccacccactcgttccctggggcggcccaaacccagtccccaggcctggagcccccgggctctacgcctcgcccgaagcagcccttccctcccagcacctcgcccaagcaggcgatccctgacccctaaaagccttccctgggcagcctcgtcccacctcggcccgcggctccgcacccggccaggagcgttccggacctcgaaagcctcctccccacagggaccctgcttcacgctccccacgccacctggttcggtccccaactccctttccccgagcccccgacagcagcccccggccctaaccccttgcaacccagcccgtgaacccgcgccccgcgcgcccacccagcactgtcccctccacctagccctgcccctcgccccgccggctcctgtcaggcggcgcaggcacatgctcagaggacaggtccgcccgcccgactcgctctcaggctgcccccgccgggcgcgagccgctcacccgggccgaggtgcctgaggcgccgccgccgaagtccccgctgcaaagccgggcgaagcctccaaccgctgccgcctccagcctggcactgagcgccgtgcgggggaggggcgcgggcagccgccaccgcccccgccaccgcgcgtaggccccgcccccgcgccgcgcgggacccaaccagggctgccgggccgctgtgcgccacgcccacttccggaggggaagcccgcttcccaccccacgttccacgcctcgctacgccccctctggtcgcaccgagggatgcaggcggtgcccaagcgcacgccccgctctccagtcatctgagtggtagagggccacgcccacaggcgcctccgagcaacgcccactgctccttagaccccggagcggggttcttagagccccgcccactgacccgctaggctctgcaaggccacgtcccctggctcctcaaagattcccccagagcccctcaatacaggaacattagctcctctgagccccgcgcactgcctatccgagtccttaaaccagcctcctgcttccctaagcccggctcccctcccactgcttcagaactcgcccagcggcctcacaaagccccgccccgtcttccagaagccccgcccaaggaccgcaaccctattcctagcatctcaagccccgcccactaccccatctcaacgtttaaaccccaagccccgccccgaattcgcgaatccacgcctctggctcccgaggctccgccctggctccgtcacaccctaccaccacctcccttgaggactgccgacgttccagccctccctgaaccgtccattgtcacattcctagtgcagagtggccgcccctgggctgggccacacccacgtaaccccaaagagggcccgtgattgaccccatttcgcaggtgagggaatggaaacttcagggttcctcccttcctttccctggccagagtcccttaataactcggcggcccaggcctgaaagtcggagcacgggaatttgagcctcagctctgcggccgtcagactgtgtgacctgggacagttctcttacctctttgggcctgagtcccctaatcttcagcatgaagaagttgtcctgttaatagctaaagtccctttctgaaacaccaagctctgaaataccgagatttgaggaaacagagcctggggaaccgaaccgactgtggggtagggctatttacttcccaaagcaaggcatctttgccattcacagggggattttttattttaagcgtcagcctcagaaacgtgtgttatttaaatcaagcttgacctgaactaagacagctatcacagcaaattatttatcctctctaagggtcagtttctttatctgtaaaatggggataacagcccctccctcacagggttccatgagatcatattagcagccatgatcgtggcattactttttgccattaaaaggaatggcaaaaaccgcgattacttttgcaccaggataatagtaatatacttagaagagttcctggcttgtgataaacgctcgacagtacctgttgctgctactgctgggactcaacaaaatgaaaggatgggttttattttgccttcaagcagccactcctaataggaggaattcagcacccttcctgcagtaagatttgccactcactttatttaaatgagataaacgtgatgaaacgcctactgcagtgcctgccatatggtgaggctcaaaaacaattcacttgtttttgtttgtttgagacacagtcttgctctgtcgctcaggctggagtgcagtggggcagtccacggctcactgcagcatggacctcccgggctcaagtaatcctcccacctcagcctcccacgtagctgagactacaggcacgcgccaccatgcccagctaaattcttaacatttttctgtagagatgaagtcctgctatgttgcccaggctggcctcaaactcctgagctcaagagatcctcccacctcggcctcccaaagtgttgggattacaggtatgagccactgtgcccacaattcaatagttttgaacaataaaagttgtttttttaaaatccactagttaataaattaaacaggggcattgatagcag

SEQ ID NO: 916101 - DNA, 4001 bp, Homo sapiens
gcaagactgtgtctctaaaaataataataataatgataataaagaaaaaaaaaaggctgggcgtgagccacctgtaatctcagtactttgggaggcagaagtgggctgataacctgaggtcaggagttcgagaccatcttggccaatatgataaaaccctgtcttgactaaaaatacaaaaattagccaggcatggtggcacatgcctgtaatcccagctactcaggaggctgagacaggagaatcatttgaacccgggaggcggaggttgcagtgagccgagatcgcgccactgtactccagcctgggcgacagggcgagactccgtctcaaaaaaataaataaaataacaaacaaataaataaataaataaaataacggccgggtacagtggctcacgcctgtaatcccagcactttgggaggccgaggcgggtggatcacgaggtcaggatatcgagaccatcctggctaacacagtgaaaccccatctctactaaaaacacaaaaaattagccgggcgtggtggcgggcacctgtagtcccagctactctggaggctgaggcaggagaatggcatgaacccggaaggcggagcttgtagtgagccgagatcccgccacgggaccccagcctgggcgacagagcaagactccgtctcaaaaaaaaaaaaaaaaaattgcgtaaacgtatgggtagaagtgcgattttgttacatgcatacactgcatagtggtcaactcagggcttttaaggtatccatcatcttttatctactttttgtttggcacttagagagtagtacatcggccgggtacggtggctcacgccggtaatcccaacactttgggaggccgaggcgggaggatggcttgagctcaggagttggagaccaggttgggcaacatagggagaccttttctctatttaaaaacaacaacaacaacaacaaaaaaaaaacctttttttaaaaattacccgggcgtggtggcgcacacctgcagcctgagcgacaaagcaagaccctgtctcaaaataacataacataacataacataacataacataacataacgtacatcatgctacggaggccgctaaaaagaacatggcttctgtcatacaggagcttatggtctcatggagaggcactgtgagagttcagagacaacagctcaaagacagggtgggggcttgagaaaacttagcagaaaggtgtaggggtgggaatcggggtgggagtggaactgtctttttagaaggatggcctggagaagaggagcagtgagagcattccaggaagtgaaagcggtcaagaggtggagctggatagccgatatgcacgaagggtgccccggagagccacttatcaggacgcagaggtctatagagcaaggaagaggcagagttggagcgtggagggtcgagacgccaggcaggagtcgaggtttgacaggattagcgctgagctctagcaagactgacctactgctgcgaggagcttgggcttgggcaggaagcagtgcagctcgcggtccgcaacgcaacagaagcgggtgaattcaagggcaccaggcctgcagactaggggatgggaggacgcggcaagcggagactggcccaggtgggcgcgcaggcagtgggactggcagcccctgctcggccctagccggcagcgtacctggatgctgcagctccttcgcatccaaccgaggcctcctcaggcaggcagggtctcgaggccactgtctacgcaacttcccagcacagccgaacgcagcactcggaaccagacacgtgagggtagcgtccctggacaaccctgaacgcctcagctattggtgcagaaagcaactttctccctcccacctgccgggttagcctctaggattcggcttgccgcgctataaagggaactgcgcatcagacgcggcacaactccgcccactaaggcgggagtccgcgcaggccgtcactctggctggaggccggctttgaacttccggcttccgggcccgttatccttactacgcatcctcagacgcgccgtgctctcggagaggcccgctgaattctgggggctgtggtttctctccctcgagggagggtctttggcgagccaagctctggaaccggaagttttaggatgctaaatcagagtcagccaatcctcagcctacggtgcggtgacgtcgccagtagctgggtagattttcgcagccggccttctggaggtggatcgcgcgccccctagagcccggctgtgggcctagtccaggtaggggcccgaggggcaccgcgatgcctggaccgctaaggatgcggcagcttggcccgtgaccaaggaatgggcacaagggatgagagtctaacgtttccgtcccgtgtgtgatctctattcttgcaggaggcatgataaagcccctaagaagggccggcaaggccggggccagcttgcggcgagggcgggagggggcgctggcgggaggggagagagagggatggggactgagtgggcaccgccgctgacccctggagtagctgcgattatggaggagggatttcttttttcatttttcctacggtaagagggaaaacatacgtgcaatgatacgcgccagcacacgcactgccacatgcactgaagctccctctcccaactcttcttgtttctggaaaaaacacgctttattgggtagacaaataggcctgatgggaaggcctgagtcacagtgcactggggagtgaacaaaagtaggcaaagtgcttgaagcttcccctttgcccccaccttaacctcctggggaggcagctctggacactcagtacccagacctgggctcagcaaggcctggggtgactgtgcccctcactcctgctgcctgatctgggcagccccacccttcactggtaagacagaattctcaagggataggcgcagagaggagcccgcctccctggttcattggagagtaacagggttttagcataatgctggccagagccagtgtgccaggtgctgccacacaggaagctgacagccctgctggacgggcgggagcctctcgggccctccggactatttatagctggaggcctaggctgctgacctgtgacattcctctgctgccaccccatcctggagcaaggcaagtgcagagcacactcctcctcctcccctcctgttctttcctcaccccagggagtagggtggttttgattttcttcctcctccttgagtttcccagctctcgagttgctggtgttgtcagtacctcacgagaaggccctcattcagcaaagagagctgcccttggaatattggtgcccaccaacataggaatctgctcacccttccctaccgttcatcagcctttgggccaccctctggcctgctggcttccagatgccaggcatggttagctggttaccctggccggtctggagcagctgaggaagaggtgcagagtttgggaggaagaaaggggtggagtcagggatgtcctctggggagatagcacaggaggggcccagctgacacctcccccagctagagctactgagaaggaagcctgggtgaatacaaaggtcacagggagctgagtgatctgagcctgttatgaaaggtgtagctctgtcagcagattaagttcctgctccccaaagagggtgctggcggggagggtgagggaaggcttggaaaggtcgcacagagtggggaggagctggcaaagaactaggaaccgggaagtccctggggagaatgtcaagccaccgagctacagatgccagcatggcagcaatttgggtgccagggcagcctgggggagggggaagggggagaaccagaggtttctgaggacacagatgttgctaggagaagctaaaaggggtttgtttgagatctttgtattttgttaacaaacactgagatccatcgaagctgtgtgggtcctggcagaggtcagcaaaggggtccttggggcctgcatcagctcagaa

SEQ ID NO: 916102 - DNA, 4001 bp, Homo sapiens
ggagatgcttaattaaatgcagatttctggcaccatcccagacttcaaacaatatctgggctgggaaactgcagcccaccctgaattatcttgcctattacctttgaaaagcattactttagggcaacggtctccaacccagggtgattttgccccttcagggcacactgggtagtatcgggagacactgtgatgggggcgggggagggggaagcgggagtggggttgcgcaggtactactgccacctagtgggtacaggccaaggatatggctaaacatttcacaatgcacaagatagccccccaacaagaattacccagccccaaatgtcaacagtgctgaggctgagaaacctttactgtttggcttctaattgcattgtacaaggatgggagtgccgctcaaagactcaacaaattcaagagtctaggttaagtttctacaaggccagtcctatatgggctaggtgatgtaataataataataataataataacttttttcatcacttctcggccttttggctaagatcaagtatattattactatttttttttgagacggagtttcactcctgttgcccaggctgcagtgcaatggctggatcttggctcactgcaacctcctcctcctgggttcaacctcctagattctcccaccgcagcctcccgagtagctgggattacaggcgcccgccaccacgcccggctactttttgtacttttagtagagatagtgtttcgccatgttgacgaggctggtcttgaactcctgacctccggcgatccacccaccttggcctcccaaagtgctgggattacaggcgtgagccaccgcgcatggccagtattgaagaatcagaataagcccttgttaaagatacagcaaacaacagaggacacaacattgtaatatatctacatcaacaaccaatgataaaacagtcgagaaaaggtattggtggggaatagagaaagctgtcagtctcttcattatgcaactagtagctgccagatgcccatgttttgttgttgctgttttgttttgttttgagaccagagtctcgctctgttgcccaggccggagtgcagtggcacgatctcagctccctgcaaactccgcctcctaggttcaagggattctcctgcttcagcctcccatgtagctgctgggttcgcttacgcgaaccaccttcagactttgccactctaattggatttcccaaacctccaggctttacacaacggacacctgtttcagaactgtctcagaagtaaaaaaaaaaaaaaaaaaaaaaaaaagaactgtctcagaaggcaggaggtaggatgaatcggagaaaagggaaactgaagagcacttattgtatgaccttgaagaagagaattgagacgtaatcccaagtgtcagctgtccatccacaaaatggaagaaaatacattttctgtttgtgaggataaacaagctgtacacgcctggcacccatgccttcagagaatgaagaacttgcactaaggcacacataacgaaaagagaacggacgcttgaagagatgtacaagggcgtaccttggtcctgatgcggagatgggggtaggcgatgaactcgggtctctcgtgctctccgtggtgcgacttcaggtacacattcagcatgctgactgccaccccggggagcgcgacgaagaaggtgagagtcttccacatgcgagctgcggagaagccacaaacgttcagcgccggtatggggcgggcccgggtctcactttccctcccgcaaggcctcgggccaaggtcacagtccctccctgtctcgcccgagtggggctgaggctcgacccgtcgaccccggccccagtacctgagccctcttcgccatgggcgccactcgacataggccgccccagctgtgggcgggaccgacccagcagccgagaaaccgaggacacaccaactaccgccatttttgatctggactgccgcagcgccggaagcggaagtggaaaattggctctgggggcggtactacaacctccaaaggaagttactattgggcgccgccctcccactggcattaacctgagcactatcatccgggacgacggagtccttgtcaaaatcctcggcatctcgggcaagagagagcatgcgctctgcacctcccttcaggctttaccgtttccttcgtgcgcatgcgtgtgccctccggtctccctaccgtccccacctgggcgaggcggaagctcaagagaggtttgtgcagggtgccctggtacctggaatcgctcccttcgttggagtccatggacgggcatctggaggttctgatcccagaccgccctatctaaaattccgttccccttcctcgccatcctccgactgcgttttctcatagcacataacattgcaccttcgtcgttatattattattttgtctgtctcccccactagaatataaagtctgtgataccaagagtttggcactgcagcattctcagaataatctgggaatggtgtaatttggaatcatacctggcacataccagatacttgatataaatttgctgaatgaatggatgaatgaatgaatagcaacagaaagtataaagagcactgaaattggtgccagcagacctggatcctaatcctgactcaacagtctcatcttttttttttttttttttttttttttttttgagacggagtttgactcttgttgcttaggctggagtgcagcggtgcaatcttggctcactgcaacctctgcatcccaggttcaagcagttctactgcctcagcctcctgaatagctgggattacaggcacgcaccaccatgcctggctaatttttttttttgtactttggtagagacagggtttcaccatattggccaggatggtctccatctcctgaccttgtgatccgccttcctcggcctcccaaagtgctgggattacaggcgtgagccactgtgcccggccttttttttttttttttttttttttttcaataggcccctttgagaatgtaatgaggaccagcgtggtggctcatggctgtaatcccaacactttgagaggccgaggcggacagattgcttgagcttgagagtttgagaccagcctgggcaacaaagcttttttctttattagaaaaaaaaagaatctaatgaaagctttgaaccctttcctctaaagacacacctatgtgtaaacacacagtatagcacacattgttgggagaataggtgaccataaaatatatttggaaaccctctaagcatctttatgcctcagatcaagagctcctgggggctgcatgtagtggctcatgcctgtaatcctagcactttgggagtccgaggtgagtggatcacctgagttcaggagttcgagaccagcctgaccaacatagtgaaaccccatctctactaaaaatacaaaatgagccgggcatggtggtacatgcctgtaatcccagctacttgggaggctgaggcaggagaatcgcttgaacccaggaggcagaggttgcagtgagctgagattgcaccattgcactccaatctgggcaacaagagttgaactcccatctcaaaacaaaacaaaaaaaaggccggcactgtggctcacgcctgtaatcccagcactttgggaggcggagacaggtgggtcacttgaggtcaggagttcgagaccagcctggccaacatggtgaaacgccgtctccactaaaaatacaaaaattattcggcgtcgtggcgcaagcctgtagtcccagctacatgggaggctgaagcaagagaatctcttgaacctaggaggtggagtttgcagtgaactgagatcatgccactgcactccagcctgggcgacacagcgagactctggtctcaaaacaacaacagcaacaaaaaagtccgggtaggagaacaaacagggactctagtgtgagaaggctgggctcacatcttgttcccttacagcctgtgtggccttgg

SEQ ID NO: 916103 - DNA, 4001 bp, Homo sapiens
atttatataatactttttctttaatatagaagccatagccttgatttttttgaaaaatgatgaagaatatggtaattatgagactctcaattgactcaaaagttcagagctaaaatcaaggtagagtttgaacacaccttacaaaaagttgagatccaaattgcataaaatttatgaaacttttgatttaaggactaagttttctggtaacctctttgggaacatcaggataataaaagatgattaagtaataatggtatctcggccgggcacggtggctcatacctgtaatcctagcactttgggaggccgaagcaggaggatcacaaggtcaggagtttgagaccagcctggccaatatggtgaaaccccatctctactaaaaatacaaaaaaattagccagctgtggtggcgcattcctgtaatcccagctactcgggagactgaggcaggagaattgcttgaactcaggaagccggaggttgcagtgagccgagatcacgccactgcactccagcctgggcaacagagcgagactctgaccaaaaaaaaaaaaaaaaaaaaaagaaagaaagaaagaaagaaagaaagatgaaataacgatatctgatcaaattatttgccttggccggatgggtgccagtcctggctataaaattcaccatctgggagaccttgaacaaattatttaatttatctgattcaaacttgctgtctataaaaatgaaaataactttatgtagtttctaacttagaacaataaattattaatgataaatatgaaaatgctgggaagagtttcaatcactactaatatatattcattatctagcattgtcttcttcaaatggatacattttaaaaacagcctttaatcatagaaccacttttttgcataactttaagccatagggctaattatacacgacacaaatctaaccaacagaactgtactacttagattaaaagaaacttgcagaaatgatagttttgcataactttaaataaaaggctaactacagatgacacagaaatcttaccaacaaaactgcattatttcagtttaaaagagacatgaagaaatgacattaacagtccaagtcatatataaagaagcccacacaaaggggaactgaaacggataaacggacttacttgggagtttatcttgaaaaggaactaaaacatacatcccaaataaccaatgtctgcaagatccaaaaagacagaagaactccaataatggaaaggactcagtgacactgaattacaatggacaagtccagtaaaattcagttcttcctactattcctcccaacaaaagcagaaaacaaccaacacgcacggtaccggttgacttgttctgtgccactcagagtaggtgcgtggaagagcagacaggaagctggggcatatttaatgaatactgaaagggaggactgagggtttggcaaagtgttcacgagacggaccctacctttcacagatttcccaatactgtgtaagtgagtgacagaactgtagttttgggcaacagtcttcaaaaacgcttccatcccttcctggcggtggtagttgaaatccagcgcagctaccaaaggcagcaacagccctagccagaggcacgggaagtccatgttctagagatgaataaaaataagaagaacctgagaacacatgagggcaggcgggggcatcaccagctacgtctcggtactccggtctcagggtctcccgacactgacgctccctgcctcctaaggaggcaaaagctggaagcaacaccttcgggagtgagccgtgcaaccagagaccgggagcacgggcagcctcggtgccctcgacccagccgcccgcgcctccctctcctcctcctcctggcgcctccgccgtccggcagctgccacagctgcgcccggccccgcgcacccccagcctcaccaggtcccaggcgcgcacctctacccacccgcggccgcccggcggggccgggtgttatagcccggtcagagggcgggcgcgcccgggccccgcccccggacgtccctccggcccactccggagccgcgcgggtgcctcccgggcggggcctcagccgccttcgcacctaggagagacggcgcccgcgcggtgcgccctttcgtggcgcggctgctggtgcccgcggccgggcggctgagctgggcggagggctgcgggcatggagtcgccgctcgcggacagtctttgctggagccccaggtcagaagtgtgtcctcgcctcggccacggctgtagcctgggcagccacagggcgctccaccgagggacactctctgtcgcagactgcagccgcttgggagacgtttagggctcggcgggtttcctgcggttggcggtgccggggcccacctggagccgggacgcatgcggagtcctgagtgccctgagccccgcgcgggctcctgcgggacgggcggcgtcggccccggcagggcgagccaagctcccagcagtgccaagctgcccagcgaggctaagcaatcacggggcttcgagaaagaacgcgcgcgtgtgtggaagttttaaatgccacgaagtgcagagtgcaggacattttccaacaagtttacatagtgggtgggatttgtgtaaattagaattgaatttaaaactggaagtcacatcgaagaaggcaggaccactgttgtaaatccgatgcttcctccacctgcacctgagtcttaggccaattacaggtctctcgtcctaaaacgtcctaaaatgctcctttctggaaggatggcatggtctctgcacgagagagaacgaaggcttcactcaaacctgagaggtggtttgtggcacgggccaaccccctctacctctctaaaagattcattctcattcattctctctctctcccctccccctctccccttccctctctccccctttctcccactctctcccggattgtaagtaaccgtgtcagggtattgggggcccgtgtcaaggtccgcagaatataaaaagtttgaaaaccactgatttgagataacattccacttttacagactaaaaatacggatgcaagcccacgactaattgaatagaatttttctcgtggaggcccaagaaagtgtatttttagagaggaccttgaatgaatctaatgtgccttcaagagctgagaaccgttagattccctgccccttctttcttacagatatagatacttttcctagaattgcgcactcaggactccctgagacttccagtgattctgccgcagcatagaagagtggtttaagaactgaggcgctctgcccttgcgatagtttgctgagaatgatggtttccagcttcatccatgtccgtacaaaggacatgaactcatccttttttatggctgcatagtattccgtggtgtatatgtgccacagttgtgcacatgtgccctagaacttaaagtatatataaagaaaaaaaaagaactgaggcgctcacgggatgagtgccaattcttgctctgacactcagtggctgtgtcgactctgtgccttattttctggtgtgtaaagtggaagtcttaattgtacctacctaaataaggttggcaggcacattgtaagaactgtgcgaagcgtttattacataaataaaccagcttaattcgtaactctttaaagggaattttccaagagttggaattttttttttaattttttatttctttctttattttttgagatggagtctcaattctgttgcccagtctggagtgcaatggcatgatctcggctcactgcaacctcctctcaggttcaagcaattctcctgcctcagcctaccgagtagctcggattacaggcacctgccaccaggcccggctaatttttgtatttttagtagagacggggtttcaccatgttggccaggctggtctggaactcccgacctcgggcgatctgcctgcctcggcctcccagatcgctgggattacaggcgtgagccaccg

SEQ ID NO: 916104 - DNA, 4001 bp, Homo sapiens
gctcaagcgatcctcctgccttagcctcccaagtagctgggactgcaggcacatgcccccatgcctggctaattttgtgttttttgtaaagatggagttttgccatgttgcccaggctggtcttgaactcctgggctcgagtggtccacctgccttgggtctcccagagtgctgggattacagatgcaagacacagtgcccagcctaaattttttattacatatattttattttagagaagaggtttcaccatgttgcccaggttgaccttgaactcctgggctcaagcaatcttcccacctcaacctctgagtaatcaggactacaggtgtgcaacactgtgcctggcttatgtattttttattttaaaaacaactgtataagttgaatgagccaggcatggtggctcgcacttgtaatcccagcactttgggaggcagaggcaggtggatcacttgaggtcaggagttcgagaccagcctggccaacagggtgaacccccatctctactaaataaacaaacagacaaacaacaacaaaaaactcaacaactgtgtaggttgaaaagccatcataagtctatttaaataagcaattaaaaaaatatttgattatttttaatgtttaaagtgtttcgtggtctttttaaaataggttttaaaaaactgtggtaataatggccgggcgtggtggctcatgtctgtaatcccagcactttgggaggccaaggcgggcggatcacgaggtcagcaggtcgagaccatcctggctaacgcggtgaaaccctgtctccactgaaaatacaaaaaattagccgggcacggtggtgggcgcctgtagtctcagctactcaggaggctgaggcaggagaatggcgtgaacctgggaggcggagcttgcagtgagccaagatagcgccactgcactccagcctgggcgacagagcgagactccatctcaaaaaaaaaaaaaaaaaaaccaagtgtgataatacacacataacacagaatttaccatcataaccatttttaaacctacagttcagtagttttaagtacattcacactgttgtgtcactgttgggacatggaaaacaacaccctaaaatgaaggcctcagaagcagcctgagaagcaaaaggttttctctgaccttctcctgctcgcctcctgtctctcagtcccactcttccccgagggcagccatagaaactagaatccctcttccccacgtgggtcctagaaaccagaaccccttttcccgaaagccagctataaaacctaaaaatattatcaaacttttcatccgcctttcttgtaaaccaaaaataaaattctaagtactccaaccatctgaacagactcctcctcttggcaagggcatcccaaagttaacctgaaaaacaagctcaggccatgatgggaagggggagccagacatgcctcattgtaccctcttccttttagaattgttgatagaacagactccttaagtctgataagaaacatttacaatctgttctctctgaaggcttaacctgcacgataaaaccttcgtctccacaatcctttatcataacccagacattcctttctattgataataactctttcaaccaattgcaaatcagaaaatctttaaatctccctgtgacctggaagtccccactttgagtggtcccacctttctggaccaaaccaatgtacatcttacatgtattgattgatgtctcatgtttccctaaaatgtataaaacaaagtcgtggcctgaccaccttaggcacataggcagggcctcttgaggctgtgtcatgggtgtgtccttaaccttggcaaagtaaactttctacattgatcgggacctgtctcatatacttttggtttacattctgtataaaaactggtcataaggaaatgatcggacctaccttgtttgattgtaggtcataagacccccattccagaaagggtcctgtcccatacgcagaaggaagaaatgctgctcagagaggccaagaagaatctagacagacaggccttgctgggtttcctcactccatctgttaaagttacatcatacccttttgtccagtcatatttctaaacagctctacatactttttgaacctaagcataaaaatgtgcactttcctctgtcttcattctgaaggttcccatgtacacattaaatgcatttgtatgttatttctcctactagtctgccttttgtgagttgatttttcagtgaaacttcatagggagaaggggaacttttcccttggcccctagataactaatctccagaacattctcgccttgcaaaactgaacttctatggctattacacaacttctcatttccccatccccctagtgcctgacaaccaccattctactttctgtccctataaatttgactattttagacactcccaccagtggaattttatagtattcatcttattgtaactggcttatttcacttagcataatgtccacaaggttcatgcatagtatagcatatgtcagaatttccatcctttgaaatgctaagtaataatagttcatggtatgcatataccactgtgggggaagaaaaaaatgttttcctttaccttcttaggttcagtatctggggccctgcaaattagactgacaaaagacagattagcaggaggaaaggtttatcatgtatatatacaggggccttcctagaaaagtgaaggggcagagaagcagttagacctaagaggtgacacagcattttgacaaacagtgatacatttgatacattgcagagattgacaagacaaaggaaaagggggattcctaatggtggtaacttgtgggaaggaaatatatagggaaataaatagaagaaaagggtggtttagtaaggtttgttatatacattcctctccaggtctttgggctgaaaagaatctagagtcatctccagtgatgaagagtcccgatgattaatgaaaccacctttgcgaagattatgacagcaagaggagtctaacatgaccaactccatcttgcttctagcctcacagactggctgtcttcacgcattcctgggcataggaagctaaccatggaagggatttagtttctagtttaatgtggaagcaaggatgacaatccctccctaaaactgatcccctccttgttcaggagctgaaaccacctttgtaaaactgatgaaagaccgcaagattagaactatgggagtggcctaaattctgctaaaatatagtttctataatcccttactactcaggagtcatgtggccagaggtcacaagatttgtgacttcccctattgctcctatagataacattatgattgtagaacttaagattgatcttttgagatgtttttcagacttttgcattttggccactgaccgacgctactgactcatgactcagccggtcccatggcccccacccagaggcagactcagtgcatgaggaccatcttccacaaccctatgattgtatcctcagtcagtcagcaacacgtattccctagtcccctacccaccaaggtatccttaagaaaccctaacctccaagccttcaggaagactgatttgagtaataactccatcttccatgtggccagcctagtgttaattaaactctttctttactgcaataccacaatctcagtaaattggatttgtctgtgcagagggtagaccaaatccatcaggtgattgcattaagagttgttctcttccttggcaagggagaggacacctttataaacgcataacctaaaaataaaatcctaagcccacactgactgaacagatccttcttggccatggagacacaaaaaaccttaagaactgaatttccaaccatgacagcaagtgaggttgaacacacttttttatactccctcccttctggagtttaggcacaactgaccagtattaatgttaaaatagagatcataagactgacaaaacagactctttgtgacag

SEQ ID NO: 916105 - DNA, 4001 bp, Homo sapiens
caagtataggccacatgccattcagactttgcagactgttgagcagaggataagaactctagtaatgctgttattgtaggacttccggctatccattatctgtatataccagtaacttccctctaacatcgaaagcaagcttcagagaaaagaaaaaggcctaggaatcctctaaagagttttccaaacagcttcacctgttccattgacagaaaaatctcaggcagcacttaaagcagtgacagcaatgaggcaagagcttaatgatagctatcattatcagcatgattatttccatagtcccagatcagtcttaagaggcggcaaacaatcaggtgatatagtttcagggctagataaaggctgtcccctaccctcaaataatacttctactacggttgctggtgctcgaattttcacccccagaaaagaattcctttggctttaggctcagtttgtgaaaatgcaaagtcaagattgatggaattttaaacttatttacatcaagatcacccaaatttgttagatatcttcaaggcaagtttgctaaggaaaggaaagggaggatgtgagggcataaaaacaatcttagggcaaaaatggataaatgaggagccagttttccagtgagacagacccaattatgcaaacaagggagtgggctccagggtcaatattaattcgcaaattagtggccagtaccaatttagcaccatcgctcatctccttctcaaaatcatctatgatatagcggtgatgctgctttatttacagggcaactaaccgaaaggtcaggacaacgagtttgcaatttacagtctctggacagggttgaaagtcagtttttttttgttttttttttttttttgagatggagtcttgcgctgtcgcccaggctggagtgcaatggcaagatctcagctcattgcaacatccacatcccgggttcaagcgattctcctgtctcagtctcccgagtagctgggactacaggcgcgtgccaccacgtccggctaatttttgcatttttagtagagacggagtttcaccatattggccaggctggtctcgaactcctgacctcgtgatccacccgccttggcctcccaaagtgctgggaatacaggcgtataaactgtactgagccactgcgcccggccgagagtcagtttttacaagcactcagatgtgggcccgaaaacaaatcaaaacaaaagtcgtgacttcccagatcttaggtaaggcatagattcgtctgcaaggagggccgaaatctctacctatcaggcaaaaggcaaaaagcccggaagggtcggggagaagcaagctggaaggctccaggaagtgggtggggaggaagctgccggggttggagccaaccctagcaacagcaggtttgcacacgcctagcagaggaagtcccgggcctaagcgtgcagcggtcacaagagcttttggcagtgctgtccccttcgattccggtcatcacccaaccatccagcccgggtttggggcggaaaaccggcttgtaaagtgggcggcggccggtgttcccacagctgagtcacagcccagccaacttttacagcgtttcccagaaagaaaatacaaagtctcagtcccggagcccaccgcttctaattcccgctcccctgtgtcacctgacccggggtaactccagccccactactgagatatttcccactcatggcgcaacttcttgcctgcgcaaagcctcgtggtaccccgagcgctctccaagtgctaccaaccccacagatgagagggcaggagagaggggaagggctgcgtcctcacctgcaggacacggacacctccacccgcgtggccgggatggcagcgctcagctggttcaagtccccgatgcccgcagtgctgttgtagcggctgtccatattgggaggaggcgccttggacttgtccggcgcccacaaccacagctcgggcggactgagggctagctcccgtcaggcggggatgggggttgagggtggaggcagaagaaggaggcggaggcagcgcgcgggatgggggagggaagggaggaggcggacctccgcgcagagccacgagggaaccgctagccagtcctgggtgaaactgacgctgccaggcaagtggcgcgcggggatcccggtttcccagcccccttccggcaggcagcagcccgggcgggggacacactccgtgatcccctcctggctggaggggtcaggcttggtggacccagcaagcagcctgatggagaaggtggcaccagacgcagacccctaccgtccaggaccgcaagccctcgccggctctgcgtgcttttaggttttgtctccacctctgcacacccacactcgcctcctgggccgcgacagcttccttctgtcaatcaggtgtggacgggaaggtctcgaagtttcctcgcctgagttgaaagctggaggtgggggcacctctgcccgttcctaactgccccgttataaggtccccctccccacaattggttctcacctcgccctcggagctcttgggagatccctccgtccctcctactgtgccctcgggcagatgagtctggtcccagcttctggactgcccactgtcggccacttgagagttggggacggtggggcattgtgacgctctccaaccttggaacacggtggcaaagtggccgatcaatatatgggacaagtgggggcgggggggcggactctaaggtggaaaaaacaatactacttgggatttaaggaagcaatctggattctgtctccccttggttcttcggagcttagaggtctaacggcgacattcctcctacagtaagggctcttctgggtccctcgtttccaaaggcatgaaagttctgacctgaaaatgggggccggggagggtgatgtcacaaccatataacgcagctccttcagccgactcccacccgcaagaactgagacctgacggataaaagcagagaggagtcagagtgagcgctgcgtttgggaaactgcattccagggcagcaagactggtgccaagacggagtcgtggcaaaagcatccggaggtagacgaggcgcccctccactgcagggacctttgttccccgcgccttccctcctgcctcacccgagcgcctgcgggtcccgggagctcgccaccaggcggcgacggagaacaggatgcggcgcagctggaaggcagagggtggagagggggcgggtgtccgtccgatttaacgctccaagcacggagtttccagctggttgggctaagtctgggaggagcagtttttgcggtggaggacttgccttgcgttgtaacattttaatccacttgcagcctcctgcctagagaatctatagaggcgggtgagagtgtgtaggtgcagtcttgccgattcccctgccgagtgtacttcccctgtttcttcttgctttcctttcctgatttccccacccaccgctttttcttctttttttttccttcctcttgtcctattacaaattaaactgtagtttactgcgatttggaaatgccctaaaaccccaggcatttctattatgctgctcaaagttaatttggcatagagatctaggtttttttttaagctcaccagaattttactttacagaagcctactgaagagatgaaacttgagaactttagtagtcaacatgtgggatacttacatccaatttgtttccacttcagtgaggtataacatatataatgaactgcacttaaagtgcatccatcattcgataaatgttgactcatgtatctccctgtgaagccatcaccaaaatcaaaataatgaatcattccatcacccaaaagttttcttacgtcgtaatcagtacctcctttcatcactgaaacaaccctctaagcaaccactgatctttatgtcactatagaagagtttgcatttttaaaaattatgtatgtggaatcataaagcaggtagtatttttggtctggcttcttcca

SEQ ID NO: 916106 - DNA, 4001 bp, Homo sapiens
aaaaaagcttaacttctaaaattgagacccaattcttcttttattgtgcatagaaaggtgaaccaatgtattatcttgtaagtaaagctaataaaggcagtcttgaacactcaatcgttgttccttgcagttacagccctcttttaaacgcagttatattcatttgataaataaaaggaaaaaaatttcctagaggtcttataagcgttagaacctgtgttgcactcgaggaatgtatctgatttgtaatggacacaactcaagtattattatttaaaacataagcacaattttaaaaacacaaagatttaaaaacttaacctttgattacaatgtattacatttaaacaaatccagtctttaactgaatagcaaacatttaaagccaactggtatttttctgttttctaatatttaaaccagaggcacaaagtcattcctgaaaaataaaacagtaaagatctcttgagtttccttgttttttaaaaagcctgagcaactagtcacgaatatgatggttaatggaggtgggaaaaccacattagccagtaatatttcattaaacttctcatagggacctgggaaatacaaaaaaataaggcttttaggaacattgcagttaagcacaatttaattgttttaaatgtgttactacataaaatgcagtagatacgaacagcaggttcaaaccttaaacgtcactagcaacaaacgacatcttttgcaaggatgcccattaacagacatcacagccccgcgttacctctaagcaacgtcgttcaggaaaaccttgcattctcactttcgctcaacctttcaaaaggtaacacggggcccgggggtgggggtggggggatttaacactttgttttcgaaaatagggtcttatctataactctttatttttaaaccacatcataaggatttggggtgaacgttctttcattttaatcactatgagatctgtgggtgagctaacatctttttgttccatccaaccatcgcgcttccaattcttccttttggtccccggccactcatcttcacaggtattttcatcacaaaggccaacaacgactgggcttcaaagcactgcaagccctggattaatgaggcaggaccagcgcaccgacttttatctgtggctccaaaagtcaaaggacttgttgcaaatgagcccgcacctcagtcgccttcagaaagtgtgaggggaggaggaaggcgccacgccgaaacctgtcgcaaacccgagaaggagagccccggggactgggcgcgcgggatacaaagggccgtgaacgcggccttccatgaggcgacagtgcgcgggcagggagacaaaatggagcgatgggaggaatcggagcccgagcggcagcggcggggaaggggcggcggcggcgggcacgcgccccgccagggcttcctcctccgaccagcgacgggggagggggcgcggcggcggccagttctctccgccgcttacacgcggccccaccgcccgggcctagcgcggcgggaagcgccagccgggtgccgccaacaatagggagcgaggcagcgccggcgagggaggagccggcggcagctgcacagcggcccgcgtccgcgctccgggccccgcggcgactcgccgcgcccgcggcccgtgaaacgacgcggtagaacgaggggcgggggggcgccacgccaggggtcggcggcgcggcccagaggcggcaagggcgcacactctgcagtcgcttcggctcgcggccgcagcgggccccgggtcagcttcccggccgcagcgccgcccgcgtcggcggcggggacctgggctctcacgtacctggttgaactcttcgccgacatccgcgtaaatgtctatgtggtccacgccgtccgccatcttccttcagcctcggccgccgccgccgccgccgcctcctgcaggtctgcccgccgcggcagcagcagcggatctagcggcggtgggggggcgcttgcgtcacttccgaggcccgagggagggaggcgcgggcgacaggggccggccgggggcggggactctgcagcccagccgctctgctggctgaggaaaggctgcgcctctgagggcagaggacgtttcttttgtgtctgggtgaggcccgggagtgggggccaatttttttgtcctactcgcgcatccagcttagcagtgggtcccacctgtttccacacaccgtcttttcacgtggcctctggcatactcagacgttttgttaatattttcatttatccgttgttcttatctttctcacatccaggacttttaaaggtggaagttatatgtccgtgcttaaatgcaaagtgtaacccccgggcattctgtgaacggcttaagaccaaaaacaatgtcttgtttctgcatcctcagagaccagcagagttttatttgcatcgtaaacgctagatacccgtcagtggttatctttgcatgctgtttatgttgccatttccatctctaatcttcgtgggcttctttcccccccaccttcctctcgcattcattgccattcattttttcttccttagatctacagtaggttgtctctggcgtagttcagatgcttctaacatgaatgcagtcatcttagagcacacccaagagagtggaggtatcttgaggccaggggggcttctctctcagaatcctagaatgtcccaacgggaagggaactggaaaggtgtccttaggtctaaacatctcattttacagaagagaagactgaggcctaatagaacctaagtgatttaaccaggtcacatggtcaataaaggtaggaacattcagccacgatactttactcaaagatgtctctccagtttgaaactttcccctccattcttaatttctttttcactcattaaaaaatatactgtagtagagcgtgtttcctgagaaactggccagaaatcattcatagaataacccaaacaacatctgtaaggttgggcatctctaatccaaaaatttgaaatgctccaaaatctgaaactttttgcgcactgacatgatgccacaagtggaaaattccacacctgatcttatttgccaggtcgcagtcaaaaatgcaatcaaaactttttttcatgcacaaaataactaaaagtattgtatgaaataatcttcaggctgtgtgtataaggtatatgtgaaacataaatgaatttcgtttaggcttgggtcccatctcctggataatttatgtatatgcaaatattccaaaatcccctcaaatccaagcatttttgcataaaaaagactcaatctgcacttggtatggtggaaaaagcatggttgcagtcctggaggccagtctggtgatctgggtacccatttctaatcagacattttatcagctagatgacctcagtcaagttttcaactctcatattcaatctcagaatctttaaaatccaagcaataatatctacctcaccaaggttgaaggttggtgatactttaaatgagttaatatgagttaatatgcaaagtgtcctgtcctgttccaagaatcagtatttaaatactgattcactttctttcttggggcattatagaagaaaagagacactgacgtttaaaggtgagagtattttctagattggtggtgtggtagaataatggcccaccatagatgttcatattctgatccctgaaatctgtgaatatgttacccttgcagatatgattaagttaaggatcttgaggtagggatagggataccttgattgtccggtaggctcaaagtaatttgcaagggtctttagaagtgaaagagggaagcaatagaatcagagaagatgcaaggatttctattgcagtttatcttctttcaatacaattaaaaaccattccagccagcatggtggctcatgcctgtaatctcagaactttgggatgccgaggagggaaaattgcttgagcccaggagtttgagaccagcctgggcaacatagggataccttgtctc

SEQ ID NO: 916107 - DNA, 4001 bp, Homo sapiens
attaaatgagattaaacatgaaaatctcctaccacaggccctggcacatggcagatgacttttcccctacccccaagccttttagccccttcctgtccattcccaccagccctgttcaacccctcatggtgactgcaatgggcttcttcccaggttctcttcccacagcttcctccactgcagtacatcccatacccaggtgcagatgacatgttcttctgaacccagctccaggaacaacacttcccttcttagaaaccatcaaaatatccctaggcttaataatgaagtttctagactcgtaacactccaagcctctgccatctctcccaggcagcactcctcaccggattgtccactacattactccttgctcctcaggtacaacccaccttcacggctttgctcagccgtccttccccaagatgcccagacccagcctcctattcaaggcccggcctcagtgccacatccaggacgccctctgcgagtcactccttccagaagtaacctccctcctccaaactccctctacacactttatagtatagaaccgagaggtgacaggacctcggaagccgtacctgaagcctctcacttatagaaccgagaggtgacaggacctcggaagccatacctgaagcctctcacttatcacttaaaaactgcgcatgaagtagctcttatgggcaaatactaaaccatgaggttgtacatattcatttcacctgaaaaggggcatgaactctggacccttcaacaaaaatgctgattccacgtggagcaaactgctctgatttcatatccctatgcccacatccttgataaaaagactcttcggtacatgctgctttcttccagagacaaggaacccatcacctcatgagttaggttcttcctcctgaccctctgaccaccctggggactcccacggattggctctttctgtcctcttgagtcacacagaacgaattcctttgagactcctggtgtcctccacagagccaaacagggcaggttcctaagcacactgtgtaaacagataaatgaactcagagggctttcccacgtggcagggtacattcgctgcatcccgtgcatgcatgggtgcacagacacacactcgcacacacacggacacacacacacacacacggacacacacacacagacacacacacacacggacacacacacacacggacagagtcagcacaacgcctctgagccacacagccaggccagcacacgcgggggccagggcggaagccaagccccagcagccgcccacttcctgacctccttcctttgctctgggaggttctctctctgtgtctttctgactgtctgtctcggttctttgtttctcggcatggcaacagttgtggatgctgcctgcgtggccagggctcctagtagcactgacctgcaaggtaggagttttggttcttagacttgagaccttgggcaagtcactttaccattctgagcctcagtttcctcatctgtgaaatgaagaggctggatgaggctggagggttcctaaggtcctttcctgaccaaaaccctagtgcttctcggctctcctccagtcccgttaccgagtgacagggaggggagcaagggccaggccaggcctgggggtggcaggggagccagctgttcccccccaagggcacacagcctccatccaggccctctgcgagttccatgtgcggcagacacgcgctcacacttcgcagccggaggagcaggcaggaagcgccgccccccggccgccccggccgcccaccctcaaccttcctccacgttaccttgggcgtgtaggcttcccgtggacctgcccgcgccgcccgctcggctctcagctgtcaagcagccgcctgctccgcccgactctttccgctccgagccgcgcgggctggaccagcccctcagcggagctgaacgggaagcggcgccccctggacgccctccgggacgtgcgcgcgccaagcggtggggtccgggcctgcaggcgcgacctgaggccgccagggaggctgggtggcgagggcggggcggctgccgacttagccggcctgactggtcgggcttccggggtcccgctgctccctaggccccttgccccgattcaggctcccaaggtggggcatcagtccggccctcgctggctcactggagaggtggtgtctgggagtgcacccccgaaaacccggcagcagcccggcgtcactccggctgttacctctgggagcagaaactaaaggggatccttattctttatacttttctgactcttctatatattctactgtgggcatgaatcgttaaaaacaaaacaaaacaccaaaaacccaatacgtatttgttaataaagcactgagtaaatcttcaaaggcctcccgaggtgctccggctgcaggataacccctcagcttagcgcacaaggcaaggcccaccctgccctctccggccacaacctaattttccagcctcaccctctctccctcacacacacacaacactttcgctctggacacactagctgttgccaaacaccagctgttcttcatggctgctgggagttcttctttttgcctggaacaccctcccctttcatctctgcctgttgaaatcctactcatccatccaggcccctctgaaatgtcacctttttggagaacccttccccagacactgcccctgcagagtgccccagttctttcctggcaagcccatctttctggtactggtttatgtagtagcatccccctctcacacgcgctaagtcctattccaaggtggagagaaacaaattagcacttactgagcagctgttataaattactctgtggagtcctttcttctccttgcagcccagccagccactagcccacaacctccctccaccctgccagagtttcagaaggctgtcaggggctctgaggcctgccctctggtgtgtccctactgcgtgccttggcttttctggctctgtcctgggtatgcttccctgtgtcaactcccaaggtctgcaagctggtggcttgaccttctctcagccttatgtgaggaaagaaggacatttcattatcagaatctgagaagtggaaggggcctcagagattatccagtgtaaagcctgcccacccattttacagagcagaaaactgtgaccagagagataaggtcagaggcatcggaggtacctaccattgttattgttgtttttaatagtgttaatacttgcacgtttagatcgcctttcacttctaaatcaatgcgttgtcattcatttgccccttacagtctcagaggtattacagtggttagtgcacagactctggaggccaaagccctgggtttgaatctcagtgctccaacttgccagctacgtccttggcaagttactggaactttctccatcagtacaatgtggatagtaacagctcctgcatcatggggtgttctatgaatcgaaataaatgtgtatctttaaagggcttagaatagtagtaggttcattaaaaatgccaaatgtatttgctcttatcaaatttttgttattgttaattgtatcacttcacagttggaataacagaggctcagaaaggctgagactcatccaaaaaattgctgctttgaggatggtttctcaccaaactccatgcagtcatctttgtctctgatgccattctgcttcctgttcccttgtgtctgagtctaaccacctatttaatagggaagaaaagcaactgtcctttagcccacctcagaacacctagacatttcatgttgcaaacattaaccacatcttctggcttctatggggatgtctctaatttgctggcgttttctttaacagaacaccacgcctcatggtgcccttcagaatcacagagccatcacattaactgctgcaagttcagcttgtacattcgtgcctcttttactcttggcccgtggcagaaaagcgacagggaaaagatggttcttcc

SEQ ID NO: 916108 - DNA, 4001 bp, Homo sapiens
gaggtacggagttcgagaccagcctggccaacatgatgaaaccccatctctactaaaaatacaaaacttagcagggcatggtggcaaatgcctgtattcccagcaactcgggaggctgaagcaagtgaattgcttgaacccaggaagcagaggttgcagtgagccgagatcacaccattgcactccagcctgggcaacagagcaagactctgtctcaaaaacaaacaaacaaataaacaaaaaagcaaagagcatagttacaacattttggagctggttcaaagtgatctttctgaggcctacctgcaggcaggtcggtcatggcctcttcccttgccttcttcagcttctccctgacccagggaaactcctgtagggaatctaggaatgtatcaaatgctttagggcccctggaaggtaggatatccagcaggagcattgttttccggaggcctgtggtttgagcattgatttcttgaatatggttttccgtcaagattccttcctggtagaggtactgaagaaccagtccctccaccaatacctctgcacccagctccaggcgaagtgagcggagtacttgtttgtctctggcctccatttctccctggaaagagccaaaatcacagctcaaattacagacatgttgatgtggccctaaagacagtgtcactgcaatgtaagttccttcaggtcaagcacatctttaaaccatagcagactgccaggtcatggtatttaattcactgattaagccaagccaggttaattttgaatgtttcctaacataatgaacaacaatgaagatgaatcatcttttctgtttctgcttttcacacaatggggtcccagctcaattcctcgttcaataaagaaatttggaaaaagaaaaaaaaaaagtgggtcagagacccttctgaacaagcaatttttatctgaagattacagagcagcactaattttaacacgctggagaagaaatggtggttttattttcacattgccctcatcagacctgcaccaccaccaccaaggcagaaactgccaaggtggacgcaggtcccctttttttgatcacaagtatttgcaaaacctgatcagtaataggagtgcaggacagaaatcagcaggttcagaatttaaggctcttttcgctaaaagtcctctacacgatcacctttaagaaaattgttgtttgtgcccagtctacaataaactttacacaatatacagtcacagactccattccttcccactaagaattccgaatctccagcacaacactgtcgtggccgcacatgcatgggacattttatgggatttttttctttcaaaaaaagcacacaccccagcactggtcagtagccaggcacgatttgaaggtgcagttccaccacccctgcaccagtgtgctgtggcttggttgtgtgtaaggcagtgaaggttaagtgaccgggaaggcaggcagggatgacagatggggcttcagacacacccgggcagtacgaccacggctaggcgacacccgatcccacactccccctcgcaaccctgtaaagttcaggaggtgacaggtgaggaggggaggtgttcacgtttggccgtgagcgcccattgggaactatttaaaaaggctctgcttcggccgctgaaacccttgtatcaaacaggaagactacgggcggtttctgcggcaacttgacccgctaaagagggagtgctgggaatgaactaaagagcggaccaaggggagagcgggcctccggcactgccgcagccacccagccttggcccggatcggaaatgcggagcaagttagcggggcggggaagcccccgcagggcccaggtcgcagacgctacaatgcaggactttcaaagaaagatggattcctgttacttacgtctgcaaccacgtatctttggggcgggggagaaaaactgcaaccggaatcctgactgttagggaacctgccccataagcaccatctttgttaatggcgaaaaccctaaacaggaagtgttgacaccatctttgttgagggcaagtacaggaagtgctgtcgccatttttattgagcgttcaagggtcggatcgaagctcttcccgccatgcttactgtgggtaaacaattcaatagcggggagatggacaaccgtagtgtcacttaaagggtatctaagtaatggagtaattgaatcattgcattttaacacagtaactccatcagggcctcgcacacaattgacctaacagagaggcaggtcaaaagccaccctagtagagaagccttctctgacctatctgattaaaacggcaagacagctgcgctcatttcctgcactccccattaaccagctttattttttacgcatcaccatcttattaaaacttttcacttattcatttgtttatccttctgcttccctccattaaaatgcaaggtcatttatttatatcaagggttcctgcccgcaaagagtttacaaatctgtcagtcaggatttcattgcagcactcagctagttactcctagtcagaaagggattcgttagggggaattggggacattcgaaatcattggaaaggctggagaagggctgagctgaacatccatggatgactacctagataagattgctgattgtggctgctgcccacaatcaggaagatggcgtcaggaagttgccatgcctggtccccaacctcctctcaacaccgacagaacaattaacaggacactggaacagtgctgcaaaaaacggtggtctccacggctgcatttgccagcagcaagaaaacagcacctgcaaatcttgctttgctgcgtgccattggtgagaccaatctgacatgcagaatattagcagcaaggatgtctagagcatgtagttggtagctttccagcttgtgaaacacaaaaaggtatagtaaatgagggaaggcctgacacttaaagccaatctactgcatccaccacattttcaatgtggaaagcaagaaaaaatgcatgacccaaatacagagaaacacagcaatgccaaattgggtgtccttcctcacattcctttgtgaagcgaggcaggcgatcaataaatacattcattgattcatttttaaatcaattggatgatacatacagaaagtcatatgcttactaaaaatcagttgacagtacagggggaaaaaactcctaaaatattatttctgcaaaggttttcacagccaaaccctttggtggaaaatgaaaatatctttgttaagcaaatcaatggagaacagttctgaacctccctcctcaaaaccttctaaaaattgtattcaatttacagcattactatgccagttaccattttactacaccgttaatgacagtatttttacctatgtggcaagtattattattattacagtcatgcattgcataacaatatttgggtcaatgacagactgcatatatgatggtggtcagagcaataggctatgctatatggcctaagtatgtagtaggctataccatctaggtttgcataagtacatcctattttgtttgcacaatgacacatttttcacaatgtatctccactgttacaactgttttagcatttgcatgtataaagactgtggaatcagaatggtcaattgtcttaggcaaaatctcacagctaatatagagcaaaacttgaagtctaatgaagtttctctgatttcatgctctttccaatacaccatacaaccttgtatagtgaagagtttattgttctaatgatagccaaatattatttgcaaatcatcctgttgccacctcccattcttgatactcttgagttccaggtgctctcttttctctctcccttttccccttttgcttgagaatcattgtcctttcctcagcaagatttcccatctgttcatagacaaatgttagcaccattctttgtcttcatccagataaagtgcagaccacttgcaacactgccaagcgttgaagtttacaggtt

SEQ ID NO: 916109 - DNA, 4001 bp, Homo sapiens
atgttactatagtaaaactgaagagtctacaatgttatcccgcattctgttgcattgttgtaaacaaacaagggcaagattcttgtcaagggaattaatgtgtgtactgagcatattaagcactcttatgagctgatagcttcctgaaactcgccccccttctgtcttggaaataccacttcctattaagaggggtttactacttcacaagcaatccgttcctctaggtgagtaacaattccagagtactgcactgggctttcccttccatctgtcacttcctcacagccttctacatgaagaggaagagaaaacaagaaggaaagaataaaacaaggaacacagagaagttggaaattttttgaatctctctgaggatatgtgaaacaaaaactgcagcagcagcaaaaaaagacacccaaacaaaggacaaagctatcgtaaagagtatgccaaagactgtgaaacagaagacgctgagaagcacaaagaaggacggtttttactttaaaaactggcaaattttagaagtctgattccttaaaataaaaaagtccaaatccaaaacaacctgaaacatcaataaacaaatctttgaccatccctatcttcaggaaataaaactaaacaacactaatgtgggtagatgtaaagagagaaaggcggccaggcgcggtggctcacgcctgtaatcccagcactttgggaggccgaggcgagcggacacctaagattgggagttcgagaccagcctgaccaacatggagaaaccccatctctaccaaaaatacaaaattagccgggcatggtggtgcatgcctgtaatcccagctgctcgggaggctgaggcaggagaatcgcttgaacccgggaggcggaggttgtggtgagccgagatcgcgccattgcactccagcctgggcgacaagagcgaaactccgtctcaattaataaataaagacaaaaaggctatacatagataaactatttggattaaccaataatgaacattatctattattttataatcataaagtaagtgatttggacagggaaattggatggtgatgggctattaaagttaacaagaggaaaatcagtatttttttagagaaggctttctagtggaggttaaactccacactggccaaatagcaacaggagcttagcggtgttccaaccaaccacaggaaatagctcagagggggagtgaactgattatatgaatggggcattgagtaagggagcctgagagaaggggaatcgtcaaggggaataaggctggttcagcgtgcactaaagtctccaaactggagagaggaggcagcaaaaaagtgcaagaagaaaaagtacagtagtttcttatctcgacaggcaagttaaggactaggggttgcactacctggaaagctagcaaacgccctgggagtgaaaaatttccagagagggcccttcctggaaaaacgcagccccggtgttccctgatttcctggctgggtaccatcgggcagtggactggagaggcgcagggatgttttaggcaggtgtctcttgggtgttggcgtggactacatagcggaggttcagccgcgggactagcattgagcgacaagaaggcggcggcgcgtgcaaaccacaagacttaccttactgtcatccatcgcggcagacaggccggcctggccaggcactccctcccggagccctcccccggctcagccggcctggcccggcccccgccccgaggaagaaggggatatggttctggctgcctcctcctctcgcctaacagttcgcttccctgatgccagagtcacggggacgagggaccagttcaggaatggcagagcggaccctggaggcggccccaaacgcctcccttcgccgccgccgcctcctcctccccctccatgacagtctctgggtgtttacagacgctctggagagccgccgagaccggagggtgggcgggagcgctgcacacggaatggccccttcggctgccgtagcaccgcggcattctgggaattgtgatttttcttatcacagtctctgcgctactgactggaaaaaaaactacgatgtccacatagcctcattaaggggcagctgttttccttttgcctactagctagcgctgaggaggcggggctgggctggaggcccaaagtgcgcctgacctgaggttttggctcctaagtgccagggcctggaatggcggggacgggagtttggtgctctgcggaggcagccctgaaggcggggtgccggaagcaggccctcctctgggacgctgaggaaaccctaaaggttctttatttaaaaaaaaacgaaaaacaaaaactaagtatgtaaaatagtgcagctactttgggaagaaatttggcagttcttcagaatattggccactcccatacccaagagaaattaaaacgagtgactacacaaaaacttgtatataaatgttctttcctagcagcattattcataatagtcaaaaagtggaaacaacgcaaatgtcctttactggatgaatggataaaccagtgtggactatacaaattaagaaatactggccaggggtggtgggtcacgcctgtaatcccagcacgttgggaggccgaggcgggaggattgctttagcccaagagttcgagaccagcctgggcaacatagcaaaacctgtctctacaaaaaaatacaaaaattagtcgagtgtggtggcacatgcctgtaatcccagttactggggaggctgacatgagaggatcacttgggcctgggaggcagaggctgcaataagccaagattgtaccactgcactccagcctgggcgacagagccagacactgtatttaaaaaaaaaaaaaagaagaagaagaatgaaagaaggaagaagaacgatgaaggaagaagaaggagaagaaggaagaagaaagaagaaggaagaagacccatatagtaagatgcagtctctacaaaaaaaattaaaaattagttgggtgtgttacaaaaaatttaaaaattacttgggtgtggtggtggtgcttgtagtcctagccactcgggaggcccaggtgggaggatcgtttgagccctggagttggaggctgaagtgagctgtgatcacggcactccagcctgggcaacagagcaagactctgtctcaaaaaaaaaggaaagaaatattattcagcaatgaaaaaaaatgaagggatatacacacttcaatatgtctgaaccttgaaaactttatgtgaagtgaaaaaagccagacacaataggccacatattgtatgattccatttataatgaagtgtctggaacaggcacatctaaatagaccaaaaaatccattagtggttgccaagggctagggttgaagaatggcagggatggagggatcctggaaaggagagtgacggttaatgagtactgggtttctttttgaggtgatgaaaatgatctaaaattcagccgggcatggtggctcacgcctgtaatcccagcactttgggaggccgaggtgggctgatcacctgaggtcaggagttcgagaccagcctgaccaacatggagaaacccatctctactaaaaatacaaagttggccaggcctgggagagcatacctgtaatcccagctacgtgggaggctgaggcaggagaatggcttaaacccaggaggcggaggttgcagtgagttgagaccgtgccattgcactccagcctgagcaacaagagcgaaactccgactcaaaaaaaaaaaaaaaaaaaaagaagaaaagaaaattatctaaaattgattttggtgatggttgcacatcctgtgaatatattaaaaaccactaaattgtagtttaactgtagttaaaccactttaaatgagtggattatatctcaataaagttattttaaaaataactggctgtgtcctcatttaataaagtcagtgagcttgtttttactgttgtttttgttttggcctacctcgggcctttga

SEQ ID NO: 916110 - DNA, 4001 bp, Homo sapiens
ctgctcaagtgtcaccttctctgtgacttttcccccgatcatacttaaaattgcaaccccatccctacccttgtattctttatccctttactctgctctatttttttccacaatacttatcaccacctaaaatactacatattttactttctgcttgaagacatgactttctgtctttcactcactgctatatccctagcatttaaatcagtgcctggcacatgctaagtgatcaagagtctatctgttgagctatgcttttatttccaccagggggcctaacaatcatgtagcctggtgtttcaggaaaagatcataaagcatctctaagatttctttcagtgctctgatccctagaaggactacaacttgcctagaaagaaaaactgtgctttgtctcggcaaccacaaggaggagttgagaaaaagaaccgagcagagaaaccagataatgctgtttcccttgcttttcccacagtaacctcaaggtggaagaacactggatctggagcctgctgtactgaatgaatgatttttctccatactatgagttacctagacacaaacgtaaacaggaaacatcacaatccttccgaatgccacaaaaaggccaagggaatccatatacaatggccactaaggacaggaaaggtgtttctttaactccagcactaagaattctccacaaattcaggggaggagctccagttagcacagaaagacacataactcactgatgaagaccgagtgtttcaggtcgtcagtactctttggccagagaagtattaagtcaattctatttaatacttagggcacctaaaattcgtaagcggtataagcaagacagtcccacgtctaaattcacagatttggcggatcgcatggaattcattaacatcagactcattaaacacccaaatccatttcccacgggcttgtgactcaccgccacctgttgatgcccacattggaggagccggcgaaccaggggtccaggatgtagacgcagcggatggtgtcggcgccctgaatgcactccttcagggcggggttgtcgtggagccggagcccctttcggaaccagtgcacggcgttcacccccatgccggggggcgcggcgggtcctccacggagaaattcaaggaaggaggctccggctcatagccgacaccttcgcttccaagagaattgcctcacccggggcgtgaggaaagggcggcagagggggaacaggaaaaaatgactccgaggaggggaccggagaaggcgggggcgccggaggcgcagtggaaagatgaatggaggttgcctagtcggcggagtccgggtgtgacgccctttaggagcccgcgcccgccgcaaccgcctggaggcgacgcataacttcgagggcctcggacctccggagcctgagcaagttccaggagctcgagccgccacgacggcccgagccggcacggacggccccaggagattcgtcacggaaacctcgccccaccaaggcggcccctaaagacaaaacggcccgcccgaggtgagtcaccgaggagaaccggaggggaatgagcccctgtcggcgacgctgtctctcggcccgggagaaaggaccgggaacggaggctagaggcggtggtcgaggccgctggacggttgccggccggtgaccggtcccgaggctgcccgggtgactctgccgccgccgccgcgtcagcggcctcggccccgcccccggctcctcattggagggcgcgctcccctcgtgaccaccggcacctcacgtttctgaagtgtgtttactacactggctcggaggggtaatctgctcgcgcttcggtcgcttttggaggagcggcagccgcttgatcccaaacttgttgaccctcgtccacacgctgaactcactgcctctgcccctttcctgtgccgactggtggccgtcccttggaagcaaatcgcgttgaccacaggccccttgtgagggaaggcttagccccgcccccaagggccatgagcggccaccattggccgaggctcgctgagacccggatgagcacggggatgcggggagcttgcgggcgcgcgcgctgctccgttaggcgcgcgtgcgctctcgctgcgttccagagggtaagggggcggggccggcgggcaggagcgcgctcggcgattcctcccgtgggatttggggagggcctggaaattgtccggtttccttcaggagccagtggtggagtcgggcggagagtgaggggaggatggagtggaaggaggagagtgggaggctccacgtacatttcaagtccaaaccatgtgcttcaatcctgctttggccagagaaccctactttggagattgtggagctgtgcccctccactctcctggcccttgggtgcctcctcccccttgtacatactctggggaaaagggtaattggcaggacggatgccaggcattcctggacttcctggaatttttttaatactagcgatatatatcatcaacctttcacccctcgtctcttacatttaatgtagtttaccggtctctttgaaactggacgtttgtctacttttccagcgacagtgaactgcaggccatggcatcccttagatatatgatgcccttaaattcattcaatgattactttttgaatgaactaggcactgttcaaagcactagagatacaggagatacttaataaaacagactaaaaccccacccctcctggggtttacaatttgtctcttaacctttgctgttttttcctctataaaatactcttctttggaatccagtactcaatattaccacctttgagctacctaggatatttctacgcatccctttagactcagatgaaataataactaatttctgaaagtattcctgatccctagggcaaatttaggacctccctgggttctccaagtatgtttctgttacatcacttttcacactaccgtgaaaattagttgaaaagtgcccattcctagcaataccaactcagtaatagtacttattatcataataatgtgcctctgattccctctgaagtgtgatttctcaaggactgggtctgtattcagttttcttttgtttttattttttgcatcaacaccagaacagagcctgacataggcaaatgcttatttaatgaatgaatgagtgagtgagtgagtgctgttggccaccagtgtgtttggcaaagttaaaagaaagaaggagatggcaattcttattggttgaattgtgtgtccccaaaatcatataactctcaatgactataaatgtggccttatttggaaataaggtctttgtacatgctcaagttaagatgaggtcattagggtgcaccctaatccagtgtgattggtggcctcatatagtggagaaatttagacacagaaatacatatacatacagggaaaataccatgtaaagattggaactgtgctgccacaagccaaggaactactggaagctaggagaaagacctggaacagatcctttcttagcaccttcacaggactgtcgcactgctgacaccttgattttgaacttctggcctctagaactgcgagacagttagttcctattgttctaagcctcccaatttgtggtgcttttttacagcagccctagcaaactagtgcagcaataaagtaaattcaatactctagagagccaatctgtctgaatagtcttccctacttctgcttctgttgccacaagaagtatatatcagcctttctttggttctgtaagaatacttttaaaattatatatatgaatgatatggtttggctgtgtccccacacaaatctcatcttcaattgtagttcccataatccacacgtgttgtaggagggacccggtaggaggtaatttaatcatgggggcagttaccttcatgctgttctcatgatagtgagtgagttctcacaagatctgatggttttatagggggcttttcccccttttgcttagcacttctccttcct

SEQ ID NO: 916111 - DNA, 4001 bp, Homo sapiens
ttatgtagctctgtcatcccaaaagtgttctgagcttccctatgggcttaaggaggaaaataaattcaataggtaaatcccaaggctttttcacattcactgcagggttagactatctggtctgggttagcagctcagaaatgagctaattatagtgtcccccattctgccaaaacgctatctagaacttgcttcatttcccaagaggtttccttacccttttccccagcagcaggagaagcaacagccaagtaagacaagcatctcccaaatgctcagctagtacttgccactgggtgcctggaagaaccaaggtaaatcttacaaatttcactttgtgccaaccatgaaaaataacgcacagcaggccaggtgcagtggttcacacctgtaatcccagcactttgggaggccgaggcaggaagattacttgagctcaggagttcaagaccagcctgggcaacataaggagacgctgcctctactaaaaatcaaaaaagattagccaggcgtggcggtgcacacctgtggtcccagctactcgggaagctgaagtgggaggattgcttgagcccaggaggtggaggctgcagggagccttggtcacaccacaagactccagcttgagtgacagagcaatatcctgtctcaaaaaaaaaaaaaaattacatacagcaagccaaaaccatcctaaggctttcctttccttcagatgctgtcagctttaaattatccgcaggaaaaactaagttctttgcagaagtcaaggtcacttgtgggactgtcccctgcttggattagagggctgggactccctcagcacagcagtttctgtctaaaagggccaagttacttagaactaaaagtactgcaatttgaaattgaaggcatcattacctgcaacagtatttctatgtcccaaaaggcaatcaataccaagtaaaggaccccaaagaaggagagaaagttcctggataaagtagacttaagatcaacggcataacctgggtaagcaagtagtatgacggtcatgtgaccttggcattagtatctcttgccgaggatcttcatttattggcttgcagtttggtggaaacacctttctggttctttctgcaatcatgtatgatagtcatgcaggaggttgtacagaagtgctccaccccacccaagctcctcctatataaaaagtgcaagagtcccaaggacaaagaggagggcctgaaggacccactcttgtgctcggcgtggtcaccgaaggcttaaataataggcttggagaaatggaaacaggcagttcgggaactgacaaggcccttcctacaaagcagaggacgaaattagccactgctccagagtgagcacatatcttcactcccgctccctccaccaaactgactgtaactccagtggaacaccacatctctagtctctaccagaggttcctgtctcggctccttgctatttcagggccacgcatcccttcccctttcatttcagacatgcggggtgacagcagggtcggcctcctcacgcgttctggactgcgggccgagggcgggcggcgtgcacttcacccccaggagccagaagggaagcgcggcacatggtcctgtagcttcacgcagggctggcggccagccaagcgcagggccctttaaggcgcgcagggtgcgcacgggtgtgggagggagaccccggcgccggagggcctgcggtcgcctcagccccaccctgggacggcgtgctccctcccctcgctgctcaccttggttcccaagagccgggcggccgcagtaagtaaagccatggcgggcgatctccgggatctggtggggaggtaagaaagggagagagctgcggcaggaacaggagccgccgccgctgcaccagaggccgcgccgacgggttgacaaggttgaaaggaggcggctgaaggaaagagtagacgaaccggcggcggcgcccagcccggggtcctcaaggaggccccgcccactggccggaacccgagcccgcccctctcaagggactctccccgggcccggccattggtccggtatggaagcggggcgggaccttagcccttgacagcagttgtgacggggaggattggaccgcccggattagggctaattaagggtggatgggtggcgggcggggaagtgcgggtggctaaataggtgcctgataactcagttaacttccctcttggcttttccctttgaccttaacacttttggggttatctctgaggcgaatgctaaaggagacgctccaggactcgacctctgaaggtccttggagccaattccgtaatatgatcatggaaactgatcattgcctgatccttctaccgccttggcgcgctttcttgaggaatgtctttggttaatggcttcacggccatggaggtgacatcatgtggacaacaggctaggatgccagagttagctgctcggtggagatcatttgaggtcagcagaggccacgatattatagatactaacagaccccgatatggggagaaaagcaaaagcaggagcctgaatatccagtgctttgtgagctgtcagttctgtgtgtaatggcaggaaatccaagtcttaactgcgcccttactatgaaggctttccgagccagccacagcttctgggtcatgggcattagtctcactgccactctggtcacgtaaccccacacagcagctcaccccactttagccacagattaggagccgcagactagcccctcatcgaagatcccctttggtcacattctctagggcctctgggccacttctcctacttggcagtcttctatgctctcttatcttgtgctccccagagaccatgacacgaccctgaagtgatattccgcaccactttctaaatcctctgggtagacgaggcttcaggacttttgtgcctccctaagcctgtcgtagtcattgaccccaaggacaagagcatcttatctacaaacctccagccccaagtgaaaagccttttttttttttggagacagatcttgctctgtagctgaggctggattgcagtggtgcgatctcagcctcctgagtagctgggattataggcgcccgccaccacgcccagctaatttttgtattcttagtagagatggggttttgccatgttggtcagactggtctcgaaatcctgacctcaggtgatccacccgcctcgggctcccaaagtactgggattacaggcgtgagccaccgtgcccagctgtgaatagcccttttatctcaccacatagcagtaacaaggatcacaggtctcagtatccacctaagccaggtttagatagatctcctttacaaagaaccgagtttctagcttggacttggaaaaagagatagaaaacccctattttctcttcttaattttctttatactcagcttcacacctaacaaccaatgctcttctggcctggggatcagatagttaggtctcaggaaaaaactttaggcaatgctccagaggagcactgacctcagctacctttgaagaccccggtgacttcaaagcttcactgatcaatatttgctccccatttagcatctcataaaggatttccacataaccctagaatagtctgacctggttccttttctctggttaattatccacagagactaaccagcagaccacaggactgaacttcagtgccccaggatgagactaccaaagggacaattattgagaggccacaggatcatctgtcttggagctttagtgattgggtggggaacagcaatgctctaagcctctcgacactgggtcccagagcccctagtgccatggggactttatggacttgttttgaagttgtccaatcctgacatcgactgctataagggcaattggaaagcacaggatcaaagcggctaactggcatctcccaggagctggcctagattccttctcaacactgatgggacctggggaggttggagagaatgttaaggaagaaa

SEQ ID NO: 916112 - DNA, 4001 bp, Homo sapiens
aggcacgactctcgcctcaccacaactcccgcctcccgggttcaagtgattctcctgactcagcctctcgagtagctgggattacaggcatgtgccaccacgcccggctaattttgtatttttagaagagacgcggtttctccatgttggtcaggctggtctggaactcccgacctcagatgatccgcccacctcggcttcccaacgtgctgggattacaggtgtgagccaccctgcccggagcaaaaagataactatttaaggatgttcattattgtattgtttataaagcaaaaaaatctgaaacctaaatgttcatcaagatgggacaaggcacacacataaactggaatactgtgcaacagttttttaaatgttagctgactcagatgtctaaaatacactgtatggcgcattacaggtgctcaataaatactggttgaaaagatttttgtatgaacacagaaaaaagcctaaaagcatatataccaaactggtaagaatgattcccttcaggagcatgggataagtagagggggagaataaccattttgtgtcttttatacttttgcgttgtgtcgatttgtaaaataagtaggagctaattttcaaaaaagatttaaaagacttattcctggtgatgtttctttatctctctctttctccattttgtctctattttagaatgatcctaaaacacaaaaaacgtactttcaatggcccaaatcatggagtggctcagggaaatgaaatctgtctacaaaaaaaaaaaagttgagaatccttgtctttttttcatcatacagttttttttttcttttggtatcaccattacttctcctaaagtcacgacataatatcacctacagcagaaatgaggacttcagtggaattgacatctccttccatcaagcgcatttgcagtccatctttagcaggacctctctctaatggctaaggctaggcagaagaatttgaagacagtctggtttccattttcctaatgcagcctggcccaagagccaggactcccataagactagtctactgtgggagtcagggtcttttccacgtgtggaggctagtgtttgatgctggacggcctggagtaaagggcgaaggggagaaggtaaccaaccaggctggcctcgggattcgcagaggagggctggggctttgacttctgcagggaggtgagcagtgtggccaagggctactcaaggaacgcctctgcgagaattcagactgtggttgagcgcacaaagcaagagtgtgcgaagaaaagttaacgcctctcccagctgaccccaaaatctgctaatctgggcctgacggaaaaaattcggagaagaaccacctcggccgagttacgtgaaaaggctgggtacgaactactctggctctacttggggcgccggctcagagcgatgggcaggacgtccgcgaggaagaaagagtgacgatgatttttcaaggagtctgaaccagctcacccagcaaaccctcctcccatcgagcacccagcgtacaatcatcgaagggccgagggtcctgccctcagtctcgatggcggccggggcgcgccccggccacggcgcacgcgccggcctcagcgctccctcctccatgccctcggcgcacggcgccgcccactcacccagctgcacctctccgtgcgtccccaagctcacccgctctgaggctgcccccgctagtctagctgccgagcccggaagtggatgcagccgctcggcggagaggacgagggggagggggaagtgcttccggggaaacgggccggggttggtgtttgtaaacttgcctcggtcccggtgggggcagccgcggcggtggggttggcagggtgtgctggggcctggaggaggcgccgcgcggccagggagccagcgggaggccgcgcctggcaggtaggagcaagccccaaagaccgcagcgtcgtccgtacagacggcagcgcttcagtagctcgcaagccgtggggtgccgcgcgggaagggggaggggaggggaggaggggcgcgtggcgaagggagggggatctccgggggagggaggggaaaggccgtgcgcgcacaccgccccctgcccgcgcgtcccgccgcgtccccggcccgggagagggctctcggaggggacgcgggcgcgagcacgcatctcgcgcgcttctcggcactctccggctctgctcccggttggtgcagcgggtgcagaggctggctggccggagcgaggcgggcgacacgccgcgccgggcttcgcctgcctgtcctccacctccgcagcaagtttccctaccttcgggcggacggggagaacgcacacgtgtgggcactgccagtcccgtttctgcccgccaccgaagcacccagcgatggcccttgagctttcctccaccctagtcttgccgcctctgtaaagtgcgagcttttcgggccggcccactgggcacaaaagccccaaagggtctccgcccccttcttccattcctgagatggcaaatccaagcaactttccttttggcagagttcctccataggaggccccaattacttttgctcctgttggcttccactccttgcccaggagaccagttcctcctattgacctagaaagaaaactcttcttgactcatgtcctcgttctgagcttcacagagagcgcccagcaaaaaaaaaattcatatcgcacgttgtaatggcctgaagatgttgcatttagcagcccccctcttcctttctggtttcaggtttctgaaacagatcgtgagcttcatcaagagaattcaactggaaaaccaagactggtagactctctttttcttcagacaataggcaggagccaggcagagtccagggattcttggaacacctatcttttcttcggaggacactaagttctatttgaagacaaagttcaatatggcaacaggactgatgggacacgaaggagtcgctaccgtgatttggtgacagttcttcaaaacgacagtgtctcaaggaaaggtggacctaggaactcctgaacttttgggttgccttaagtgagaaatcagcatggctcaggtaaaaagctctagagtcctcctccaagataactgggaagcctgtttgcagtttcactcttgaatgctgccttagtcaacatattgaccaaccccagtgatccaagctctgtattaagcaccagggggagatctagaggaaggaaaggagacaggccacagcccctgccttcagggagcttccagtcaaatgaaggaggtaggctatactgcatcacaggcactgatgggacatttgcaaagcaacgtgtactcagtttacatttggtacattaagtgctgaggggtgtaagggagtgaatagtacggtgaatgcttcttttgtttttttccaacaggaatttattgagttcctgttgcatgcaaggcattgtgctgggaatacaaagatgaatacgattgtccttgtccccagtgagcttccaggctagttggggtcgggagagggatggaaagccatttatttttatattcacaatgccttgtatagtggctggctagtagtagagactctgaatctgttgattgaggaatgtgcaataataggggtatgtacataggagagaacagtacttctgcttggatagaaaaagaagatggaggttgaaagatgcataggattttgctaaacaagcgagaagggtgtttggacaaaaggaacagcatgggcaggagcttagagtcatgggaaaatgtgatgaggttccgagtactgcaggttgtttgatagttacggagtaagggatttaaatggggatagttatggaggtagtattgacagtgataggtgaggaagttgttccctgcagtaagcagagtgtaacccaaaggccttttatgcctcgctaagttaagcagcagagtagcatcagatcagtgttatgtagaaggtcattattgtggaggtagaggatggact

SEQ ID NO: 916113 - DNA, 4001 bp, Homo sapiens
ggcagcagaggttgcagtgagccaagattgtgccactgcactccagtctgggtgacaaagtgaaactctgtctctaaataaataaataaatttgaatagtacaaaagtttatgcagaaattgaattagtaatttttaaaactactacagctggatgtggtagctcatgcctgtaatcccagcactttgggaggccaaggcaggagaattgcttgagcctaggagttcaagaccagcctgggcaacctagtgagacctcacctctacaaacgaaaaaaaaatacataggctgggcgtggtggcttatgcctggaatcccagcactttgggaggccgaggcgggcggatcacctgaggtccagagttcgagactagcctgaccaacatggaacaaccctgtctctactaaaaatacaaaattagccaggcatggtggcacatgcctgtaatcccagctactctggaggttgaggcaggagaatggcttaaacccgggaggcggaggttgctgtgagccaagatcacgccattgcacctcagcctgggcaacaagagcaaaactctgtctcaaaaaaaaaaaaaagaaaaaaaatagacaggtgtataggggtgcactcctatagtcccagctacctgggaggctgaggtgggaggatcacttgagcctgggagatcaaggctgcagtgaaccatgattgcaccactgctctacagcctggtcaacagagtgaggccctgtctccaaaaacaaacaaaaaaaatctaccacagtgggagtctgaggcaggaggatcacttgagcccaggtggtcaaggctgcagtgagccctgatcgtgccactgcactccagcctcagcaacagagcaagaccctgtctccattttttttaagttaaaaagaaaagaaaggcccaggcagagatggctttgctgatgaattccatcaaacatttaatgaaaaattggtaacagatcacaaactcttccaaaagacagaatatacaaaaatcaattgtatctctatacacattagcaatgaacaatctaaaaatgaaattaagaaaacaatttcatttacaaaaacaccaaaaaagaataaaatacttaatctatttaacaaaagaagtataaagcatatactctgaaaactacaaaacactgtggaaattaaagacctaaataaatgaaaatatgtttcatgttgatgaatgaacacaattcctatcaaaatcccagttgccctctttgcagaaatggacaagctgatcttaaattcatatggaaattcaagaaacccagactagcgaaaaacaatcttgaagaaaagaacaaagttggaggactcacacatcctgatttcaaaacatactacaaagctacagctgaatcaagacaatgtagtctacaggatagacatgtagatcagtggaacagaactgagaacccagaaataaccctcacatttacagtcaagtgatttacaacaaggatgccaagacaatttattaaagaaagaattgtcttttcaacaaatggtgttggaacaactggatatccacatgcaaacaatgcagtttgaatgcttttctcacatcacaccctcaaattaattcatattggatcacaggcctaaatcccagggctaaaactataaaactcttagaagaaaatataggagtaaatctttgtgagcttggattaggttaaatataacaccaaaagcagaagcaaccaaagaaaaaacagataaattggacttcaaaatttaaaacctttgtacttcaaaggacactatcaaaaaagtgaaaagtccaatagcaaagacatggaatcaacctaggtacccaccaacagtggattagattttttttaatgtggcatatacaaaccatgaagtattatgcagccataaaaaagaatgaaatcatgtcctctgcagcaacatggatgcagctggaggccagtatcctaagtgagttaacacagaaacagaaaaccaaataccacatgttctcataagtgggagctaaatactgagtccacatggacagaaagatgggaacaaaagacagtggggactataagaagcgggagggaggggagaaaaggttgaaaacatacctattgggtactatgctcactacctgggtgatgggttcaatcgtgccccaaacctcagaatcacaaaatatacccttataacaaacctgcacatgtacttactgaatccaaaataaaagtttcaaaaaagtgaaaagtcaacctagagaatggaaagaacatatctgaaaatcatatatctgataagggacttgcatctagaatatatgaagaactcttacaactcagtaataaaaagacaacataatttttttaatgggcaaaggatctgactagacttttttcaataaagataaataaattgctaataagcacatgaaaagatgctcaaccatcactaatcattagggaaatacaaatcaaaactacaatgagttaccacctcacacctattaggataactactatcaaagtaacagaaaatgaggggatgcatggctcatgcctgtaatcccagtactgttgagaggctgaggtgggagaatggcttgagcctaggagttttgagaccagcctgggcagcacagcgaaatggaattttggtagagatgtgtctctaccaaaaataatttttaaaattggccaagtgtggcagcctgtgcctgtggtcctagctccttgggaggctgagatgggagaatcatttgagcccaggaggtcgaggctgcagtgaaccatgatcgcaccactgcactccagcctgggtgacagagcaagaccctctctcaaaaaaaaaacaaaacaaaacagaaaataacaagcgttggccaggcgcggtggctcacgcctgtgatcccagcactttgggaggccgaggcgggtggatcacaaggttgggagatcgagaccatcctggctaacacggtgaaaccccgtctctactaaaaatacaaaaaaaaattagctgggcgtggtggcgggagcctgtagtcccagctactcgggaggctgaagcatgagaatggtgtgaacctgggaggcggagcttgcagtgagccgagatcacgacactgcactccagcctgggtgacagagcaagactccatctcaaaaaaaaaaaaaaaaaaagaagaagaagaaaataacaagcgttgacaaggatgtgaataaattagaacccttgtgcactgcaggaatgtaaactggtacagccactatagaaaacagtatggcagttcctcaaaaaaattcaatagaattaccatatgctccagcaattccacttctgagtatacacccaaaacactgaaagcagggtctcaaagagattccaaacagcaacccaaacagataaatggataagcaaaatatggcatatatgtacaatgaaatattattcagccttaaaaaggaagaaaattctcacatgctacgacgtggatgaaccttgaagacattctgctaagtgaaataagccaatcgaaaaagacaaataccaccgggtgcggtggcccatgcctgtaatcctagcactttgggaggccaaggcaggcagatcacaaggtcagagtttgataccagcctggccaacatggtgaaaccccgtctctgctaaaaatacaaaaaattagctgggcatggtggtgcgcacctgtaaccccagctactcaggaggctgaggcaggagaactgcttgaacccaggaggtggaggtggcggtgagccgagatcgcaccattgcactccagcctgggctacaagagcgaaactccatctcgagaaaaaaaaaagaaaagaaaagacaaagacaaataccgtgtgattccacttatataagtacttagagtagtcaaagtcatggagacagaaagtagaatggtggctgccaggggctggaagagggggtaatgagttgttgtttgatgagtatggagtttcagt

SEQ ID NO: 916114 - DNA, 4001 bp, Homo sapiens
tagccgggctggcagcaggcgccagctactcaggaggctaagccaggagaattgcttgaacctgggaggtggaggttgcagtgagccaagattgtgccattgcactctagcctgggtgacagagtgagactccatctcaaaaaaaaataaaaataaaaataaatttaaataaaagcacatatcctatctataaatccttataaatgcaaaaggtaacttttttttcttttttgagacagagtttcactcttattgcccaggaaaggcacgactctcgcctcaccacaactcccgcctcccgggttcaagtgattctcctgactcagcctctcgagtagctgggattacaggcatgtgccaccacgcccggctaattttgtatttttagaagagacgcggtttctccatgttggtcaggctggtctggaactcccgacctcagatgatccgcccacctcggcttcccaacgtgctgggattacaggtgtgagccaccctgcccggagcaaaaagataactatttaaggatgttcattattgtattgtttataaagcaaaaaaatctgaaacctaaatgttcatcaagatgggacaaggcacacacataaactggaatactgtgcaacagttttttaaatgttagctgactcagatgtctaaaatacactgtatggcgcattacaggtgctcaataaatactggttgaaaagatttttgtatgaacacagaaaaaagcctaaaagcatatataccaaactggtaagaatgattcccttcaggagcatgggataagtagagggggagaataaccattttgtgtcttttatacttttgcgttgtgtcgatttgtaaaataagtaggagctaattttcaaaaaagatttaaaagacttattcctggtgatgtttctttatctctctctttctccattttgtctctattttagaatgatcctaaaacacaaaaaacgtactttcaatggcccaaatcatggagtggctcagggaaatgaaatctgtctacaaaaaaaaaaaagttgagaatccttgtctttttttcatcatacagttttttttttcttttggtatcaccattacttctcctaaagtcacgacataatatcacctacagcagaaatgaggacttcagtggaattgacatctccttccatcaagcgcatttgcagtccatctttagcaggacctctctctaatggctaaggctaggcagaagaatttgaagacagtctggtttccattttcctaatgcagcctggcccaagagccaggactcccataagactagtctactgtgggagtcagggtcttttccacgtgtggaggctagtgtttgatgctggacggcctggagtaaagggcgaaggggagaaggtaaccaaccaggctggcctcgggattcgcagaggagggctggggctttgacttctgcagggaggtgagcagtgtggccaagggctactcaaggaacgcctctgcgagaattcagactgtggttgagcgcacaaagcaagagtgtgcgaagaaaagttaacgcctctcccagctgaccccaaaatctgctaatctgggcctgacggaaaaaattcggagaagaaccacctcggccgagttacgtgaaaaggctgggtacgaactactctggctctacttggggcgccggctcagagcgatgggcaggacgtccgcgaggaagaaagagtgacgatgatttttcaaggagtctgaaccagctcacccagcaaaccctcctcccatcgagcacccagcgtacaatcatcgaagggccgagggtcctgccctcagtctcgatggcggccggggcgcgccccggccacggcgcacgcgccggcctcagcgctccctcctccatgccctcggcgcacggcgccgcccactcacccagctgcacctctccgtgcgtccccaagctcacccgctctgaggctgcccccgctagtctagctgccgagcccggaagtggatgcagccgctcggcggagaggacgagggggagggggaagtgcttccggggaaacgggccggggttggtgtttgtaaacttgcctcggtcccggtgggggcagccgcggcggtggggttggcagggtgtgctggggcctggaggaggcgccgcgcggccagggagccagcgggaggccgcgcctggcaggtaggagcaagccccaaagaccgcagcgtcgtccgtacagacggcagcgcttcagtagctcgcaagccgtggggtgccgcgcgggaagggggaggggaggggaggaggggcgcgtggcgaagggagggggatctccgggggagggaggggaaaggccgtgcgcgcacaccgccccctgcccgcgcgtcccgccgcgtccccggcccgggagagggctctcggaggggacgcgggcgcgagcacgcatctcgcgcgcttctcggcactctccggctctgctcccggttggtgcagcgggtgcagaggctggctggccggagcgaggcgggcgacacgccgcgccgggcttcgcctgcctgtcctccacctccgcagcaagtttccctaccttcgggcggacggggagaacgcacacgtgtgggcactgccagtcccgtttctgcccgccaccgaagcacccagcgatggcccttgagctttcctccaccctagtcttgccgcctctgtaaagtgcgagcttttcgggccggcccactgggcacaaaagccccaaagggtctccgcccccttcttccattcctgagatggcaaatccaagcaactttccttttggcagagttcctccataggaggccccaattacttttgctcctgttggcttccactccttgcccaggagaccagttcctcctattgacctagaaagaaaactcttcttgactcatgtcctcgttctgagcttcacagagagcgcccagcaaaaaaaaaattcatatcgcacgttgtaatggcctgaagatgttgcatttagcagcccccctcttcctttctggtttcaggtttctgaaacagatcgtgagcttcatcaagagaattcaactggaaaaccaagactggtagactctctttttcttcagacaataggcaggagccaggcagagtccagggattcttggaacacctatcttttcttcggaggacactaagttctatttgaagacaaagttcaatatggcaacaggactgatgggacacgaaggagtcgctaccgtgatttggtgacagttcttcaaaacgacagtgtctcaaggaaaggtggacctaggaactcctgaacttttgggttgccttaagtgagaaatcagcatggctcaggtaaaaagctctagagtcctcctccaagataactgggaagcctgtttgcagtttcactcttgaatgctgccttagtcaacatattgaccaaccccagtgatccaagctctgtattaagcaccagggggagatctagaggaaggaaaggagacaggccacagcccctgccttcagggagcttccagtcaaatgaaggaggtaggctatactgcatcacaggcactgatgggacatttgcaaagcaacgtgtactcagtttacatttggtacattaagtgctgaggggtgtaagggagtgaatagtacggtgaatgcttcttttgtttttttccaacaggaatttattgagttcctgttgcatgcaaggcattgtgctgggaatacaaagatgaatacgattgtccttgtccccagtgagcttccaggctagttggggtcgggagagggatggaaagccatttatttttatattcacaatgccttgtatagtggctggctagtagtagagactctgaatctgttgattgaggaatgtgcaataataggggtatgtacataggagagaacagtacttctgcttggatagaaaaagaagatggaggttgaaagatgcataggattttgctaaacaagcgagaagggtgtttggacaaaa

SEQ ID NO: 916115 - DNA, 4001 bp, Homo sapiens
cattttccaaagttatatgaaatagttaagatccagagcacagaatacatcaggctagcacctaataaacagttccaccagaatatgtatattttagtactagatctaagtttttttcaggcctaaaaggattcctataaccaccaaaacaaacaaacaaacaaacaacaacaacaacaaaaaaaaacagcatatgtgagagcagcaagagggactgcccaggcaaaattttctggaagaatctatttgcaaagtttaggtaatataagtctctttcttaaatgagtccaaagtaataagctacatctcacaggagaaagcctcttcacttgactggaacccaaccttctgctaaaggtcaaggaatcaaaacctccagtaagatggtcagggctaccatctgtagctgggttggaaggaaggcttgctgctgtgttaccataaacctgaataaaatgacctgccctgtttctccttttacaagatactgtggttgtttctcatataccatgaatttcatggatccatgtgtctttgtgatcaccaggatcatgaacttacaaagcacccaagtgaaaaccccccgcttaagttaggtgtttaaagaaagccgtgcactcaccacccccactccccgatttttacccattcactaacacaaggttagaattttccatgcctaaactaccatcgtgtggaagacagatctttgtgggaactggaacatgatgctgcattaactctcaaggatatccagtcatttataacaccggcacaaccaacatcctggctttgtggatttgcaagacagaaagccagtgaagaaaaaaatctgaactatgaatttaccttgaactgaaaactgcaggacaaggggacagtgttgtcttgtggggataacttctagcatttcattctgaagaacagtttgtgtgtcacactgccactctcaacccctttaaaaggatgaatcaagaccacagcactaaaagggacgggtggcagttggctgcgtaattgggcctatgaaaaaagatcaagctagcaaccagggcaattgatgctttcattttcccacacgacgccagaaatatgggagacatcaggaaccggagcgaagggacatgtcaagtcaccagttccttttaatgaacactcctgccgaacccttcagctctcggcccacttccctctgattcctgctaaccttcccgctcattccaatcctctgcagcccctacccagccttccgcatcccttcctgcctgctactcacaaattcccaaccactcctcccacattttcctctgttccccctccccttccttcactttcctccatcctacatcattctccactccattccgaactcaatcctcatctgcaatcctgcaggcttccaagccgcccatcggtctcccgcgagctgcccccgcagtccgggccagcgtcctcggtgcccctcgctcccacgcctcttcccgactcggttccttcccaacggcacccgacctccccgccccccgaccgctcccgtccgagcctctcatttctgacccctccatccgcacggctctgggcttgaccactcctccacggccgcccgagggccgatcccgagaaaggacgaggcggcaccctccgccccgcacccctaggcccattaccggccccgccgcagctgcctcctcccgtgatggtctctgccgcccccgctgccgccgccgccctagcccggtgggaaggagggaggagcgagcgagtcccgggccccgcggcgacggccggggagctcccagggcggcagggcggggagggagggcggtgggcagcccagccggcaggcagagagggccgggcgtctccggcaactcgggcgcccccggcagcagacgcccagaaccgccccggctccggctaacaataggatccggccgcagcgcactggctcttataggcgccggcacgtcctgaccgagacccggggctggctgggaaatggagtctacgggccggcccacacccagcagcatgccgggagttgtaggcggtaactgctgcaaagccgaagccggcgcgcaaaccggctcccgaggcggcagctctgctgcaaccttttaatgggggaagagaggagactcagctacagatcttaaataaacgaattctcctccaaagctccctttttctttcgtgtcctgaccacacgccattaggaacatgatccccccttctcctcgctcatggggtcttagtcttcagcaatatgacttattgcagcctgcgcaggttataaagaatacaagcaatatcttgagttatctacttatatgagggagtgctttgagtgttttctttaaaaaaaaaaaaattgctgccgggcgcggtggctcacgcctgtaatcccagcactttgggaggccgaggtgggcggatcacgaggtcaggagatcgagaccaacctggctaacaaggtgaaaccccgtctctactaaaaaatacaaaaattagccgggcgtggtggcgggcgcctgtagtcccagctactcgggaggctgaggcaggagaatggcgtgaacccgggaggcggagcttgcagtgagccgagatcgcgccactgcactgcagactgggcgaaagagcgagactccgtctcaaaaaaaaaaaaaaaaaaatcttctcaactttgcaaactaatttatttatttaaatagaaaaggggttttcgccatgttgccccggctggtcttgcactcctgggcccaggcgatccgcccgcctcggcctcccaaagtgctgggattatacgcatgagccaccgcgcccttccgcaacctatttttaagaaagggcgccaggcgcggtggctcatgcctgtaatcccagcactttgggaggccgaggcgggcgggtcatgaggtcaggagttcgagaccagcctgaccaacatggtgaaaccctgtctctactaaaaatacaaaaattagccgagggtggtagcacgtgcctttaatcccagctcctcgggaggccgacccaggagaatggcttgaacccgggaggcggaggttgcagtgagccaagactgcaccattgccctccagcacggtcaacaagagcgaaactccgtctcaaaaaaaaaaagaaaaagaaaaagaaaaaaaaggggaaaaccaagattaagaagtcaaaagttgtatgtgatttgccaaggacacatagccttggtttcttctttgttgtctttcccttgaactataaggctcggcaagctcgagctgcattctcttgtcccccgacccccaccccgccccctcattttgttctgtcatcttgtttgcttctactttcccccttccatactctgcttgaatacactggcctcattgcagctccttcaactgggcaatcattctcttacctcagggccttttgtctggcttccaccagctagccacatacttactccctcacataatatctgctcgaatgtccccatatccgagatcttccctaaccatatttctttttccctgcattaagagacaggatttcactctgtcacccaggctggagtgcagtggcgcaatcacggctcacagcagcctcaaactcccgggcacaaatgcctaaccatatttctaaaatggtgcttctccttagtttctatccctgtgccttatatttcttcttagcatccacgtatttgtttttgtcttgtctcacttgactaaattcggtgagagcaaggaattgttttgtttactgtatcctcaacacacagtacaaagcctagtagttgacatttaagagtatgatagatatttattggatagatggatggacagcaggatttaaactcacgttaggctggttccaaaacctggtacatttttcactgcaaccaagaaactatgaagccagatccactagctaccaagccatctcagctttagaagtgagaggctggatggcttgggaaaacatgctaagaatttcag

SEQ ID NO: 916116 - DNA, 4001 bp, Homo sapiens
tcctgcctggcttcgttcctccccctttcagccatgcctcctctcccatagggggctcccttttggggttcatttgattcacctcacttttgacaaagaagaaaacctagagacccagatcactatagcaatttagtgtcagagttgcctctggactcaggcttctaaaactcctcatttattgctgtcctctactctacaccaacattcttgctgttttaggataaaattcaatctcccccaaatccaagtgattttgcaatttcatcaggacaggcctccagcaagtactgctttcagcacagtacttagcctataccagtatcaatcaatatttgttaaatacattcggagaaatgcattaaaaatttatgatacgaactttagatcaaatctgcaaacaaatacctattgtgtgagtcaaattatatttttgttccctataatcacaaccttattcgctccttctttcagtcaattgtccaaggtacccaagcaagcactgtgagtttcaaagactcatgtgatgcaggtctggtctcaaaggtaacacagaaccaaaagagcaaagaaaactacaatgcagaggagaaaggacccagagaaatactgacaaagtatcagtgacaatggacgagagcgatgaccccaggagtactgggggagaccacttagtacttcacaacattctttgtagcttggcatgcagttctgaaactatgttagattctccctttcaaaatctatcacccaattctttcttgaaaaacgtgagtcaaagtacagccaactttgtggctgtcctatttgaattcttggcattttatgaggagagttttaaaacaggttaattggaaaagtcaagaactaaatacgacgattttcgctgcccgggttaaaaaattactaactgcccccgccccacccccccaccccccaaaaaaaattctgtaccgaaaagcatttataaagggaaaatgtgcttggtttgcagactgcaaataaaacaggttaaacattttgggtagccatttaagtaaaaatcgtttaacaaatgtcctggcttagaagggggaaagggatccgccggtttagaaagcccgcccccgcccccagggggtgcctacgtggagctcctgaatctggctctggagaacccagaatgtgattcgcaggacctgtcgcataatttcacaaccaagcattcttgcattcttctttgtacctgaatcgtagaaagttctggaaaaagctaggagtaagtgattgacattccctgctgttccttcaacatagaggggttcggtgctgggtgggcagacaccaccaaacaatggggatgccaggagcccggtacggcggcaggagcagtaccctgggctcggggggatgtagaagccccattccacccctaggggacagaacccagtaaggtcgccctcggtgctcaccacactccgggcagagggggccctgagactccgacccccaccccagagagagcctgccgctggacgaggggaccgacggctgctaagaggcggattagcagaaacgcgaaactcacaacccgcctctctcccagagaaaccagtatggagaaattaaaggtcatataagattatttacctgccccgcgggcctgggatcccagggcatggcctggacggcctcggggacaagggcaggtgtgtttgggggataagagagagaaaatctggggcgcagggatgagaaggctggcaggggcacaaatgcggaccgggatggggatgtcggaggagaccggggcgcgccggccgggcgacagcacgaccccgggaggcggtggaaaccccctgcaactcccgccccggggttggcggcgccgcggaaccgccccaccgcccctactcacttgagtcggaggcgggagcacgtaccgcaggcggagctagcgaggctgggctggagggagggtccagggagtccgagatcccaggcgaagcgcgcgccggtgccttttaaagagcgctcggtgggcgcggcctgtgtccgccccgccctcctcccagccccgcccgccggattcccggagccgcttgccgggctggggcgtgtagcgggcgggctgccctctgcccgctccgggctagccaccaggagacaaaaggcaggaggcccgcctcttcctgcagcttcccgcccgcccggcatcttcccacgtcccgggaccgctccctcccaaagggacccggcagttccaaaagccactgggacttggagagggacttccttcccctccagggaggcccggcggcgggacggtcccgctggaaagtggcccccgccgccctgcgtcggacctgtccaccgcgagcgccgatccccctcttcgcggagacagtcatgggccgggaggctccagcagtagaaagtcagccaaacggggctttccgccacctcccccttgccttgtccttgtcagtaaactcaacgtgattaacttccctagttaacgcatattctctcgtccgatttccagcttctgggaatccacaacttcttattcttaaagagcaaaattcatctagactaaataaatgacgttacgaaaacgccccattcccaaagtgtttcgctcttcccctccaccagggcacagcacgcgatgctgagggggaagaaacctaaacccaggcagaaaccccgggcgccacaggccctgtatttatatgtgttgatgtcagaaaagcacaaggataccgtgacatccgaagggacctaatgcctaagctacaggatgatttattgttttagatgaaaaggaaaataaacaatgcaatctctatctggttcatattctaggcctcctcatgacctctcctgccagaagcaatgatcccggagaactgatacttgcggagtggggagttcaaaaaagtcagtgaccaaaaccccctcatgccataaatgctattgcctcctctggtccagagtttctcatcctccacaccattgacatcttgggctggataattctttattgtagggggctgtcctgtgcattgtaggaggcctccacccactagatgccagttgcaacctgcccccgacgttgtgacaatcaaaaagtctctggacattgccaaatgccctcttggggagagggcagggagcacatatccgcatgacaacgtacagaaccgacttataatattattattgttttattttatatgctggggccaatccaggataaactcattatagctgccttgttctctgtccaccaagtactgtccaaaaacacatagtggtgattgacatctcctgatactgtggcaggagtctggaaagcattcttgcctgctgtgagcttttctaaatatgggcaatccttatttcagtgatatcagctagtgtaagtgacttgactcacgggccaacaggaaaattcagtccctcagattctacattcgctttagctcagctgcttacaatgtttattttttcttgtataagtttgcctagtgcttctactgaatgaaactgtatcagtgagtctcactgcagcaaaccactgccctttctctcctaccctgagttcttctcaatgcctctttgtggaaggggcctcccaaacctgagctgtttgctttccgtcaagctcatgttgtccctaaattccatagccatgtcttatcatttgaaattgggcttgttggccgggcgtggtggcacatgtctgtaatcccagctacttggaggctgaggcaggagaatcacttgaacctgagaggtggaggttgcagtgagtggagatcacgtcaatgcactccagcctgagtgacagagggagactccgtctcaaaaaaacaaaacaaaacaaaaaagaaattgggcttgtttctgacctaaaagtgtttctgctgtctgtccctgtatgtgtttgtctccgtgtacttcacactgagtctgcagatgatatacaacgtgtgattttgaacaaatctgtattt

SEQ ID NO: 916117 - DNA, 4001 bp, Homo sapiens
accaactcagcggatttgcccctagggaagttgggggagctccttggaacgtgaaccccaggaattagtgacctgctgactaatgttgccaaacggggagacgtggggcgcacgaggccccgaagctggccgcccaccaggctctaggcctcagtgtgttcaactgcagcaccggcccttcgcgctcggtggagaaggggagggagcgctccggcttcggccccaggagccagctcccgccccagcctccggggccaggtggccccggtcggggggctctctagagaaacgccacactcgtccttacaccccgcggaaaatctgccgctattttggacacattcctcaaggccaaaagaagaacgtggcggagggggaaagagtttcgagtctcccactgtgaccaaactaagaggttccaccctcgggccccagctttctcccgccccgggagaggcctcggcctccgcctcacccccgcgagggcctgcgggccccctcgcgcctccacctgacgctctggaaggcgggggccgccagccgctgcccacagagaactcgcactttttcgctgcgcgattcagaaccacgccgggtctgatgccatccggcgaattatgtaaccagggacaccgctcccgggctaaacaaacgcggctctgtgtgtgcagcgccggccccgggggagcgcaccgggcagggaggggctctggccgggcctcagggtcgggcttgtttgctcagcgaaactggtcagaggcagccgggagggagcccgacgccgccaaggtcccggggcctgcgctgagccgggaacccgccacgtctggtgcgccagggcccgggcccctcccccaccgcgaccgcccccgcctccaagaggtgaacttggtcccaagtcccgccggacgccgtcaccgccagctagctgcccgaacgacctcgggcttgggggggcctgcaagtgctggactccagtctcggttccgttccacctggggctccctctgtcaccttcctaacccctccccgcgatcccggggcagccgcgcgcggcggtgaaggaaagtgacgaccccacccccaactccggaggcggtggacgcggagtggcccagtgcttcgagagctacccctccgtctctcagccccgagggggaggggttgcgggacagggtgacagctgcgccgaagacgccctttccgctcgggcgccgggatccccgtgcaacccccacggaggtctgagtgccagccgggatgcgggggcggatggaccggaggggtccagtcgggatcgctggctctaagccctggaggtcaagggccgagacctgggttcggggctgtgctagccccctccgcgcccgggggcgacgcaaagttttgggaagttgctgcccctaccttgcttggtgagcaccagggcgtcttccctccgcgcctgggtgatgatggagccgtgttccatctaacaatcccgcgggcccgggctggctgggcgggaggacgggcgggcgcgcgggctgggctgggctggggggcctgggcgggggcccgctccggctcccgagactccgacttccacagctgttcacatcccccctctcgtttcctccccggaccgggaagggaggcggcctgtacaaagggcgggcggcccgggcagcggctcccccgggtgcccccggccccgatcccccagcggcagctccgggctcctcagtttgggtccaacatggagaatccggagcgaaaacaagaggaggaaatgggacacggggcggtttccaggctcccccctcccctccgtactccagataaacaacccgcggctgcagcgcccacccccgcgcgcctcccggctctcgactcggcctcttcacggccagctggagcttcccgctgggggctgcgtcctaggccctgggaccctccatctgtgagcggccggggctgcggacagtcgggagctttgctattttgttacggaaaaagcgaatcctcaaggggggtggggtggcgggcgggcaggctggcgggggagacttgaaaccgttccggtgctccgattggctctcttggagaaaaggggcgtggcccctccttactatgcggtgagaggacctaacaacattccaggcgccacggccacgcccccgggccactccccccgcgccagactgcggcctcccagtctcctcggccacacccccttcccaactatttaaaaggccgctccgaagctcacgttctggtgctctgtgctggggtgttcttttctcggagggcgcactcggggaaggtggaaaggtttcccccttcaggggtgaccaagacaagccgctaagcctaacctgactccagcaggggatggggcggatcggaagttaccttacccccctgcttagccctagaatcaaggacgtaccaagtcacataaaagtacaaccgtcgaggccaggcgcggtggctcacgcctgtaatcccagcactttggaaggccgaggtgggtggatcacgaggtcaggagttcaagaccagcctggccaagatggtgaaaccccgtctctactaaaaatacaaaaaaattagccgggcgtggtggcgggcgcctgtaatcccagctactcgggaggctgaggcaaagacttgcttgaacccgggaggcggagattgcaggtagccgagatcgcgccactgcactccagcctgggcgacagagcgagactctgtctcaaaaaaaaaaaaaaaaaagtacaaccttcgaatcccgaaaggggtgtgtgcgtgtgggcggacctaggactccagagtataagagctggaactgacctcgggactgtgtcccccaaaacactgaaaatgagacctgaggtgctgggctttcctcacacccaccgacttactcccatttaggcggccccgactccgcccctcctccctacctccctcatcctacccctctctttttgcccccacagtcccagcttcctttagatggatggaggtctctcggaggagcttcagctttgtggactcaggctgccttccccacttgctctttaggcctcggggcacgctccgctggctacagctcctggagtctctgctcaaggttgtgggtgcttttgttccccagcggtggtagctccagaaaggctggtttcagctcaatatcaggtcttttccagtgatctacatctgtccacaggtgacatgggctgccttgggacaatggtagctgttcaagtcaaggccggcaagagtggtgtagagtgagattgcactgggtgacttctgagctaaatccaaccccaatattctgtgattcagtggcactcaccctgccaaggaaggggcttccttcctgctgcagttcccattgcccaacatgcatcaggtcttactgatgattagaggacaactaggtcacagctaagcttgccaggtactatcagacacctgcttcctatggtcccttcctcatgaggacaggtgaggtcatgatctgcatatgcctgtgtgccatacagtgatcatgtgtgcctgtttctgctgttcctacgcacgtatacaaaacctttttatataacatcattttaatggaaatgctgtttttccaaaatgaaagtggctgttacagatctgaatgatgcttatgtaactttaaacactgaatttgggtagatcttaattcattaacagaaagggaaacggaggagttctgacatacccacctcccatcattaaaacaataggatctttaaggtaaatcttcaatagtcaggttgctatgggggcctttttagacccttcccctgccctcttctaaggtagattagttgcagtgggaggaatgcaggcaggagctgaggactgaggatttagaggggcctgctacccatagcactgtagggcaggacacttcacttcgttatgcttccatttcctcatccatagagacaatacctccccttttgtaatttacaaagtacttt

SEQ ID NO: 916118 - DNA, 4001 bp, Homo sapiens
acgattaccattggccttcgtgccaagcccaatgtggctgcccaattctccctctctctctctctctctgcctccataacccccactcttccagaaaggccactttagcatcatttaagccggcaggcacagctcgcagccctgcccgtctcagttggccaccaaactgtagccccaactcgagtgcggacccggaattgcaaggcactcggcagttattaactgcatgcctcagtgccccgattttctccccagctcaatggctttgggggagggggagagcgaggagtggggcgttcggaaggacggggactgggaagcggccaggacggggagaaggcgcgggtgctggaaccacttatcagaagaaacttaacgagatttgccggcggattaaaaaaaaaaaaaaaagtgggtccctttttatctccagactgatgatctcgcgtcttccgcgaatgtcacggtcaaggcaggatgctctaaccgccctgttatccgcaccattttcccgcccctgatccccgccgcacccgccgagactttgcgagactccaaggctggggggccttgccaggcgcgtccggggcactccgggaaagaacagaggccggagccgcgcctccacggtgcgttctctgagattccacctcccagccccggctcctacggggtccgcagagaacacctccaaatctaggggaggcacacagactcccacaaagggaggatggggagaaagtgatggggtttcgaagagtcgccctagggaaggagagagaaagagcagggaagagaggaaagaaacagaagaaaagcagagacgggagagaggagacgaggggagcagcggggagaaacgcaggaggcagaacaagcaaggaaatctctcatttaaaagttcccttgggcccgagggctgggagtcacctgctctgcgccgctcccggctctccaccgccctggaggcaggagcgcaaacttgcgagcgcccgggcccacctccaccgcccgtctgcatctagacttgggaaggggatggaaggggcgggggggtaaaggcaagaagcaagacgaaccccaagaccccggcccgaggagaagaggtctgccggcgcttgcggccagtccggcggcggcggctctggcggcggcggcggcggcccccgggtggcggcgcgtccgggctgcgcagccaggcgggcggcgaaggctgaggtgccggcgagcggcggggcgcggagccgcctcctcgccaaccccggctccctcctcctctctcctcctcctcctcctctcctcctcctcctccctgcccgccagctccctccctccctcgccggagccccagccgggtgcggactggcaagcggcgcgctccgcggcctccccgggcgccgcgaagttgggaggcgcgcaaagtgcggctcaggggggaccgccgggggttcccgccagcagccccctgcccgaggccgtagcccctgccttccccgctcctcgcccggccgcctggccgctcggccgctccgccgaccgagggctcactagcgcttctccatggtcgcggcagctaatcgatgactgaaccgaacaaagagcagcggcgagatcaattcctaatacctatcgatgggcagcgggcggccgagccccggcgagccccggcagccgccgcccgccgccccagggcgtccgcctgcccgcccggggacctccccaatgcgcccagggcgcgcccgggggctcctcacggccgcgcggccggcgctgcccgcactaacctggagtcgccgtagatcaaatcgcttccaatattgaaacatcgatcccacattggcggccatcttgggggctatcgagacgcgcacacacaagagtttggcttttctcaatggctgcactcaatatccgggctggactccccccagccccggggccgccgccggccgcccgggccctgagcgccgcggcccggggcccctcgggcgccctccggcctcctgccacccgctgcccctcgccgccgccgcgccgccgccgccgccgccgccaacgggcccgggagccgtgcgcccccccgacccccggagggcgcgggcggagcgcgccgggcggggagctcggcgcccgcccgggggaggcagccggggatggggtgggaggggaggggttggggggaggcagcctctccgagaggcgccggcgccgccgctgccctgcctgccgccggctcccgggcccgcggagcgctcgctgcatctcccccccaagtccggggtcggtgtgccgcgcgattgcacttgactttggctttttgcaaacttatcaatactgacgtaacgtgctgatcaatgcaaagggaagtttgggagggggcgctgcgggaggcgggcgcgcggggcgcctacccccgcttgcacctgtctacccccagctcccggcattgcacgcttaaaaaaaagttaatagtttgaaatgcatttttttttcttttgcaatcggagcacacacaacacgtgcctcgggctgccgccgctccatcgccagatatgcttgggatccgagggtcgcagccagcacttggggctgcgtagacgcgccggccggagggagggtgggagccgcccgggggcgccactgagtcgtgggaaatgtcaccaccaccgcccacagtttccgcgccattatattattattattggcggggaggggggcttcgtctgagtagtagctcagggttctttacgggcgggggccgagggcggggcctcaggtcctttggaatagggatttctgttgttattatctggggggtctttaacccaattatagggactcccccacagctttgcaaggtgaaacccttttactgtgatgatgattattggaggttttgttatttggttctgaaccaaacctctggagggccttttcccccagtgggcttgttttattgttatgactgttgagggtgccctacccctgctgtgggggctccggatccttaaaaacctcggaggtttctgctgttgttatcatcattattatccggggctccgttctttgcaacatgacattcctttattgtgattgtctttggggagagggtcttcagcatggctagagggaggttccggtcctttgcaattcttcggactcttgacaaccggggtgactggatttcttgttttacatttttctgtctgcttttttgtttgtttgtttgtttgtttgtttgtttgtttttgcctctgtgcaagctcgaggtcctctgtttccacttcccctggaggtgagatgtcacctccagggggaactcatactcccagccccctccatcaccaacccccttgcctatccctgccaccacccttaaaggtgaggtcacccttcctctctggcttattcccctgatacatagcaccgcaccctcttccccactcaaaaaaaggggacatgtttttcctttttctctgatcaaaagatttgcttttatggacagcaaatggaaattatattctttttatgacccagcctagacttctgacatcactcttggtctgggacaatagatcaatacagtgggttataaaaaagataaagtttagaagagttataaagaagagagaatcatgatggatatttttgatgattttccaatatttgtgtctcagagcacgtgctttgaggcaattaaagtttttaatgtaatgtaaataattgtttcataaatgcttcggaagaaggtgtgatctttctgagcaatcatttgagctgtttaaaaaatgaaatgtgatttaaacaaggatacagtatttctgtttccattcccatacattttccatgaggtctgggtaaatatattaatgcaggagttgaaagacgcgtaagaccaaaagtactgcattcaccgagatgtaatgaattaggcctagttagcaattccgagtggcctgtttccctgccagattaaattgcacgtgatgtgtggtttatct

SEQ ID NO: 916119 - DNA, 4001 bp, Homo sapiens
gcagaaccgcggcgatgccttgtcgggagggggcgccgtcagggttccgggaggctctggtagggcgcccccgacgcctgcccagctctgtcctgggactcaccttccagtccgaacttgtaaaattcccccgccacgtcccgaaccagggcgggcggccccgtgccacgtccccgctggcgcctcagacgccgcacaaggtcgcagactacgttgttcagggttccggcgtagcgggcggccgcttgaggccggaggaggagcggggccaggagactgcggagcctttgccattcttcgccttccctgcagggttgaggagagagtgcgcatcgggaaggtggggacggctcgacgggactggctgcagtgaaggagcgcgttcggctgcggtggccaggagagggattgcgtctgcccccttggggtacggaaacctgcaccggcctgcgcctgtcttccagcccccttcctctttactcatttcctgccctcaggggccggggttcccgggtaacttgagtcacagaaccttacattcattccatccagatccttgtaccctagcccaattcctccggttcccccagttcccaggattcgggcctcaaaggataaggaggtaggcggggagtgaggttggggctcaacctgagtgtgggtgaagcagactgggatgggaaccccaagatgcccaatggtagagtgggacagccgacctcccaccatgcccccagattgatagtttcgggacccgcagcaggagagggccgctgcagggcgtctgggcttctgggggcagagaagactcacgcagtgagcagtccgcaagcccgctggcggcagcggcggtgctccgtccagggcgagaagctgcagcgctcgggccggggtccctcctgtcgcagcagctcctcgacgagtgcaggggcagccacgtacacggtgcgcactgtcccaaagctggctagccacaccggcccgaagtgcgcggcgccctgcacctgggggagcggacacagcggacacttggatacctgggcggggactttcagcttgacctgtgcccacgccaagggcgttgactgggcttgggaatagggagcttctgctctttctcgggtgcccaactagtgtatgcctttgatactgcaaactcctcctctctcatttcccatccctagaaagtttgagtgtgatgggcaaaaccggaactttgtgcaaggcagacattcaggacctctctgatcatctcggtcgaggagaaatctctaaaagttccatgtctggactgtccatctcaggacgagtcctcagtgaatgaaaaggaacccatgtagctttaagccgcaagcaggcggagggtactgcccactccggcctccccctcccgcgcacttgtactttatctgcaggatctccacacctcaggacagcgagaaggcgctttcgcagcgccctctgctaagagtcgggacgggctctgcccgagtgtagccacaccgcccccagcctcaactcgccttttccttatttcatgggcatccgttctctctggctgtcccacatttgctctgcactagtcagtcctttctgacgctgtcaaaaccagtttccccagcactctgtctcgggaaaggcgtcccttcctacctgcagctcgtgtagcctcgacagcccccccttgcagaaaagttcggccagaaagctgggcgtagaggggcctgggatgtctgccaagctccggcgtgctgagtggtactctcggtagcctagggaggcgcccaactcgggcgcccagcggacgcgatggaacactctggaggcgtacttgagggtctgggtcatggtctggttcagggtgctcgcgaaagaaagcgcttctcctgagcatcatatctcaacccctatttaacctttgggtgaggtgatgacgccccctctccaagctcctcagccaatccctcctcctgagtggtctgtgctggggattagcacccaggaacagtaggcggggctggggctgacttcacaactcccttgggtctcatgttgcaatgaccctcatgggagggagggcctaagattttcctcctgggagagtgcctttgtctaggagcctcaaagtctcatcctaggaaaggctataaggctttttagtagggactaggtgaccaagctacactagtcagtctctgatattcccacttctaccagtgagcccagcccctttaggcccatcctcaggaattccccatctttcagctcctccaggaagggaagcaggggaggcacagctgtaactgtccccacattcttggcttagtgggttgtatcttctctgcattattttcctgcactagccacacctccccctcctcctgtacctaacatatactgggcagatggcaggtgggttaatgggctaaaatggctcctagaacctccatctttctttcttgaggataagggggtctcttgggtatacaagccccctccttccagacatgggaatttggggcttgagaagcagaaatgaaactttttgtacattagttaagttcagagattgtctgtggggtgttagaggagctaaatggatgtggatgttctaattccccagctgactcggtctcctctggggggctttctggttagcagctcctttctacttttagcctcagaatcctgtggtggctcatgcctataatcccagcactttgggaggctgaggcaggaggatggcatgaggccaggaggttgagacaagcttgagcaacatagcaagactgtctctacagaagaagtttaaaaattaggctgggcacggcagctcatgactgtaatcccaacactttgggaggctaaggtgggcagactgcttgagctcaggagtctgagaccagcctgggcaacatagtggaactgtctctacaaaaaatacaaaaattagccaggcatggtggcgtatgcctgtagtgccttgagaggctgaggtggattacatgagcccgggaggtcaaggctgcagtgagttatgattgtaccactgcactccagcctaggcaacagagagagggcctgtctctaaaaaaaattaaaataaaagaatctcccacagtttacctctctgctccttactccctcattccccactgcaactctatcaggctctgtgccagtcagctagctctgaagttctggaattgaaggtcaatgtgaaaaaggagagggtctccacccccacaccttcccaaggactctccagagacaacacttagggaacacagattccccaggtcaagtcttacgcagggagaggacaggaggatggtagaaggcatatgatacatactccaccctttcctgagaaatggcagaataggcatgtgtacacatatacatgttatcccaggatccacaaagcaaacagaagtggtaattgagcctagcaagcagtttagatggactacattcctcattccagctgaggagagatctcacaaggagaaaggagtgctaaggaagagcaagaccccacagccttccaaagatcccctatggtccaaagtcctttgaccatctcagtcagctgctttgttttctgttggcagtggagggacaaggtgagaggagccaggggtagtcatgaacaccagtgggttctgccctgggcagctccccaccttctttaagagagtactgtgtctcagctccagcagtctcaactgggaagacccaggactcctgctcttttctctaatccctgggagacgaggtccagctaaggtagagtaagcagtcagtgaccaggcaggctggtttgggaggtcactgcctggaggacgggatcttgtattcttcggaagatggctgggaaattcttccctccattacgtagaactttcttcccctcctcagttgaggtgcctagatgtcccacaacggggtcttcactctgggagaaggaagggtccaataagtccttgcccactgttcag

SEQ ID NO: 916120 - DNA, 4001 bp, Homo sapiens
gtaaatcacatggtttgaaaaatctgagaatcaagccggtaaataggaacagctgaagcttcagagtcctgcatttcaaacataaaatataatataaaataagataaaataaaataaaataaaatgcctgtaggaatttttagagtgttggtaggaatagaatggaaaatcaaaaaggccgggcacagtggctcacgtctttaattccagcactttgggaggtcgaggctggcagatcacttgaggtcgggagttcaagaccagcctggccaatatggtgaaaccctgtctctacaaaaatacaaaaaaattagcttggcatggtggtgcacgcctgaaattccagctactcgggaggccgaggcaggagaatcccttgaacctgggaggtggagattgcagtgggcagaaatcatgccattgcactccagcccaggtgacaagagtgaaactctgtcaaaaaaaaaaaaaaaaaaaaaatttaaaaggaaaaaagtgtgagtcctaagtcaattatctttttttaaaaaaattcaagatatgagtcaaagttgacactgattatagcaacgtgtgtgtgtgtgtgtgtgtgtgtgtgtgtgtgtgttttaaaatacaaaataaatgcatgaggtcctcatgacaagccagagacagattgtcagatgtggcagatccagccttaggtaaaatcattcatgcgtgtaggtaatgagcttttggacttaaacgcacccagctcagttattcggttggacattttcgtgttgttgctgatgtttttattagtgttgccgttctcctctgttttacatcattacttcaacccagcaagcttggagtatgtatcccagaagatgcaaacagctgggattattatatttgtgtgtgtgtgtgtgtgtgtgtgtgtgtgtgtgtgattagaatgtctgtgtaagtgtggagcaggaagggaaccaatgtattttggtctctgccacttgccagacacctgtagatgcagtaccgacataatcctctcaatcctctcaactgctctaggaagtagggaaggttaccgccctcattctggaggctgggactgaggtttagggaggagaagtcacccacccaaggttacgcagtcagtatgggacagcattcggacctagacccagttctatcggcgctttctgcactgctccaaaaaaatatttaggcagttggcatgcagttgccacttgatgctttctgcttgtctttcagtcttgcatttatctgcctaggacctcccttgtcccctagaaggcaatctgagacagctgatgcctttgattgctatgtgcccatagcaaagaatatgaaagacttctttttaaaaaaaaaaatcagtaagccagagatgaggcatttgaatgaacataattagttctccctggttgcaccacacggctacttctcatgaagttatttgcagagtttatccttgaaatggaacagaagctataaaagtttgagaaccagcctaccaactcccccaccaaaaataataataactaccatttgagtacttgctatgtgcctagatctgctctaagcactttacatgcaccacctcttttaacactcagactcacgctgtaagaggggagttatgatccccatgttccaggtgaagaaactgaggcttggggagggaaaaatcacttacctatggtctctctgctggatgtttgagaggctggatctctcctttcctgtcacctgccttaggctgtaatgttgagccctgtctttgacattgggaggacatgaaatcctttgcctctcccctctcccaacccctgtccccagctcaaaggtgcatctgccactcaccggaagtaccaaactgctggagagaccagacaactgcagtgcggggacacaggatgctatttcctgaggggaagctcctgattctggagcgtcttgtttccagccctctgtccgccagcccggactggagtgcagggtcaaagtctggagctatggacagggcacggcttgaggggtggggctcggcactgcactgcccacagagactggacccaggcccggccgggagacctcgctcccagtccctgaaaagttgcctgacttttctggctgatctcaagcccctgtggacaggccttgggggaaggagggagggcaggcattcttggagggttgatgagcacaagaaggtctgtctctctggccagctggagaggatcccctttcttccttcttcctgctgccaccctgggggagggtcaggacgttccatggggcactgtaggcctggcctgcggtgggggtggtcagcctggcagcccctgaggggaaaggagaggcacaggacaggggctccctgggccagcccgatgccattccaggacgctggggagatgaggccaaggagagactggaggtgacgcctgtgtgggccatgaggatgcgtggctctttgctcccgtatcccagagacgcaagcagcaggactccaggcccttcctctgccagggataaacatggagctgtgatttttagagcccagagatctgcaggcacctcactgtacagatgggaagactgaggcctgagagagagggaccaaccagccctgagggaggcattctttgggtcagctttagcaatccagcctctaacacctgcctttagtatcatcaaataaaaagacgaagatgaaataagaaaatgcatgcaaaatactcactgcatagtattttttccttttttaaaagagggtcggctgggcacagtgcctcacacctgtaattctgacactttgggaggccatggtgggtggatcacctgaggtcaggagttcgagaccagcctggccaacatggcgaaaccccgtctctactaaaattacaaaaaatcagccaggagtggtggggtgtgcctgtaatcctggctacacaggaggctgaggcaggagaattgcttgaacctggtgggtggaggtagcagtgagccaagatggcaccactgcacactccagcctgggctacagagcgatactctgtctaaaaaaaaaaaagaaaacaaaaaaaaagaaaaagaaaagataacagacagggtcaggccaggcgcagtggctcttgcctgtaatcgcagcactttgggaggccgaggtggatggatcacttgaggttaggcgtttgagaccagcctggctaacatgttggtgaaaccctatctctactaaaaatacaaaaattagccggccgtggtggcacatgtccgtaatctcagctactcgggaggctgaggcaagagaatcacttgaactgggaggcggagcttgcagtgaaccaagatcaagccactgcactctagcctgggtgacagagtgagacccagtctcaaaaaacaaaaaaaaaaaaaaaaaaaagagagagagagagagagaggatctcactctgtcacccaggccagagtgcagtggcgccttgaactcctgcgctcaagcaatccttctgcttcagcctagccaggactacagatgcatgccataacacccagccaaattacttactttttgtaaagacagggtcttgctattttgcccaagctggtctcaaactcctggcctcaagcaatcatcccaccccgacctcccaaagggttgggattacaggcataagccaccacgctatgacatatttttttttcttcaataataaaaaatggatagggtgaaacccactttttactttatatctaactagtttgaattttaatacaatagtcatgtatcacttatataacatatggcccttataaagttccctgtgtgtttaattcatcatgggagcacttgaacattcataaaagttagtccaatatcttcatgctccccactgccatcacagcaataatttacgttttgtaaattgcggtgtaccaattctaaatacctggattttctttttttcttttttatttttttctgagacagagtctcactc

SEQ ID NO: 916121 - DNA, 4001 bp, Homo sapiens
ctcctggatcactttctgctatagctaatgttgggctcacagaacgcaaattcatcttctgcaccttagcctgtgccaaataacacaaaatcatcaaataatgcactttcaactccgacaaaaattgccaaattatatagtgttttagattattcatgttagcatttgtgaagagtaaatatgtgaagtcagatttagctaaggactaaaggaccaccctaagagtattcccagctagttcaaatctggcaaactggaagcacctctgagtaggcaggtggagcatcggtatagggtggagcctgaggaagatgcaaggtctgagggtatactggattcccaggaggctgcacagggtaggttggctgtgttggatattgacctgaaagacaagaaaaaaatgaaggttgcctactacacagagctaccaaaatgaggcaggtcatatcgggtagctaacttagtgggagcaagcagaaggggatttgcaaatagtctgccccagagggcctgattcctggaactaagaaaatatgcattgtctttgcacccttaaaatggaaggtgctggattctaacgagacaagaaaggcactgctcactgctcctactaacataccgaagtaaggggttaagtctacctgggcccaagttccctccggaatgcaggacaggtctggggttctggcctgctgctgttctggcttatcaagggtgcctctgctctaggtagtctccacagcctgtctacaaccagcccagacttcgtgggtaacagcagttctgattttccttacagattactattcaaggtcgacttccaaacaaagggtgtgaatgatggaagtgaaccgtgagactgggaaaagggtgcagggctgaggggtgaggaggaatatcctcactggaaaagcgggggatcaggtttggttttttgtttgttctgagacggagtctcgctcttttgcccaggctggagtgcagtggcgcgatctcggctcactgcaacctccgtctcctgggttcaagcaattctcctaccccagcctcccgagtagctgggattacaggcgcccgccaccacgcccagctgatttttgtattttttaatagagacggggtttcaccacgttggccaggctggtctcgaactcttgacctcaggtgatccgcccgcctcgacctcccaaactgctgggattacaggcgtgagcaacctcgctcggccttttttttttttttttttctattccttttttaccccctcaacctattcctgcgttatgggaatcatgttccgacagacacactggtacaaccacagaaaaggggagaagttctgatcccgtcagcgaagggcgagggggtgcgaagggaaggaaaagagacctcacaggccccggcccacgaaccaactccagcaattcagtagttaagttcggccccgctgggggttccggagcgcggcgccccgcctccgccggctctccattggcctacgcgaatgcctgcgctagcgctctatttgctcctgcggatgcccatcatgtcaagcccccccaccacccgagcccgcagctccaaactgcgccacagagtttacggaggaaagggcctggaggcagcaagctgccgtaatttgggtatgacgaaggcgtcaggcgcagcgccctggactgcagccggccaaggagcatggcgcagcccaccccaaacctggcgtttggtgaccctgggctccgaatccgctcgctctgggccagcagtactccccccgacggcctctgccaccctcggtccttgcctttgctgttcatggtggttgcgggtccggtttgtctcggcgtcgcggacggttatttttttcgtcctcttcctgttcggagctacttccgtgtcacatgatggtccgtccgcctagcgtcacccgacgcccgagtggcgctgccgccggaaactccgcccctgctccgggcctccagtcggccgcgggagggtccgcgcggtcccgcccactcgccttggccccaccccctgctcgtttctgtcctccccccccctaccggtgtccctcagctggagaaaaaccaaatgcaggtattgtctggaaacaggatcttttctctgttggacgctcggatgcagaacgatgcaagcattccccggaacctttttccacctacacgcattcactcaaggtcacctcaccttggcaaccttccacgaggggcttagatttctgcaaatttgtcgcactgcctgaaatcggctccccacaccttagtttatcatgcgtccctccccaccaagcccaacttaagcttcagctctgttaaaatttattttgccactccagctcacatgtatcctttcctgaatgagacctgcactggaatcttcgctgccctgtcttccccaggacagtcgttgcctttctcacgtacaggaaggggttatgttttccgtgctgtacgcaacacctggcactgaaactgacataactgcactacccatggagtgtttgtggccctttcctttttttagcacctgttgcaggtgacctgtatggtacctctatttttctctatgtatggcttctctttctaacctaattatccttaagggcaaagatggcatcctttagggcagcgattaagtgttttcttttctttttcttttttttttgagacggagtcttgctcgcttgcccaggctagagtgcagtggggcgatctcaccacagcctccacctcccgggttcaggcaattctcctgcctcagcttcctgagtagctgggcctacaggcgtgcgccaccattcctggctaatttttgtatttttagtagagacggggtttcactatgttggccaggctggttttctttctttctaaaaaaagttttaattttttcttttctttttttttttttttttttttttgagatggagtcttgctctgtcgcccaggctggagtgcagtggcatgatctcggttcactgcaacctccgcctcctgggttcaagcaattctcctgcctcagcctcccgaatagctgggattacaggtgcccgccaccacgaccggcaaattttgtattttttagtagagacggggtttcaccatgttggccaggctggtctcgaactcctgacctcaggtgatccacctgcctcggcctcccaaggttctgggattacaggcataagccactgcgccgagccttatttttatttatttatttatttatttatttatttatttatttatttatttatttttgagacagaggcttggtctgtcgccaggctggagtgcagtggcgcaatctcagctcactgcaacctccgcctccagggttctaagcgattctcctgcctcagcctcccgactagctgggattacaggcacgtgctattcattttttaatacagagatggggtctccctgtgttggccaggctggtcttgaatttccagcctcaagcgatcttgccacctccattgtccaatgattaaagggttaactcttaggacccaggaactctcctgggcctacctcctgctcatgtaaactgccctcagattggtcaggcctactttacaggttgttgggtattttgcttgtcacagtgggacctgggcattgggaaaaccagggcagagccaaatgagattactaacaaaaatgaaagagttgcaggccagtgctttctctggcaggtggaattaagaagtaaatggtggctgggtgcaacagctcacacctgtaatcccaacactttgggcagcctaggcaggaggatcgcttgagccaggagttcagaaccagcctaggcagcatagtgagacttcatctctacaaaaaaaagtagtagtaattagctactttcttgaacaggatcaaactttggcattttcttcattctcgtagattccccaatgagatgaagatgtttatttggtcatttatcaaacattctttcttacattaatttaacaa

SEQ ID NO: 916122 - DNA, 4001 bp, Homo sapiens
tctgtgaaatctgcaaaggttaaaattaaatatcttttcatggcggagacaattatgattagaaaaagcttaggaatccttgaaaaataacttctatcaacacaatgccaagccaccaaaagttatgcaaatcaacaaattttctggaaaatgttatttttatgaaatttaatttattaactctcttccaagtgaatctgctttatgcctaatttttctaatacttcaaaaagaacagagaggcccaaatttccataaactttgccttaactgtttgttcctctttcagggtgcaaaaaaggttccctagcatttaggttttacactaggtgaatgagaccggtgttcatatagttatatttgttccattctgttagtaaccatttcaaagtgaaagaccaagacaggttctaaacatgttaaattctataaagccattagcaataaatttgatccggcagtttgctgggacaatggaaactgctgaaaaagcgtctattagtcattctggacaaacccatcgggattaaaagaatgagttaagatcgtttaaggacgcagccaaaaaaaaaaaaaaatccaattgggtctcagtttctgagtctctaagaggcttttcccttttatcactgacaatttcaggaagccctacataatatttgctaatatttgactaaattgtcggcatccttcttcccagtcccactagttaggttttatacggtgattaaaataaacccaaactgcccttctttcggtaaattcttatttattggtgaacttcctactccagttgccaattcagctgtttttcagctcagcacaaataaaaagtcggccttcatttctttgcgcctaaagtgatccaaaatttaagagtggagaaagccagaactttgcgcaactctccttccaaagatctttgcgcgcgttcctgagctaccccgaccatcctaacagtttcagtggcaaaatctccccaagttgggccgcgcaaagctctccttgtcaagaacttttctgagagctggtgtcgtgcagcccgggaaacaggaccgggcaggttagaaacgttgaacttggtgaaaccccttgagactgatccaggcaggccgtagaaccctcagagtttcccagttaaggccaaaaagttaagcagccctaccacctgttgaaagaagggaacagcaaagaagctggtggaatgggatgggatggggcaaaaaagaatcacagaaagtggtgtgcctccgcctgggccccctactcccgaagtggcatctccactaaagctcgagatgctccaggaagttcccaaaccggctctccctgggcgcagtgcgcaccgccggcgctcccagatccctggaccacccggcctgggggcgcgggcgcggctggggagggaggggagagctggctcacctggcgctgaaggctggaaggtacagtctcggtcccccggagcccggcccggcagcctcgcactgtccgcagagggactgagcacttgaaaagcccaccgcgttccgtagggcgccccggcggggctaacttgttcggctgcggggcacagctttaggggaactgggctagcaggcaggggccggagctgcgcgcccgcggtggccagggcggtcgccgggtcgtggggcgcgggcggctgcagcctgggcgttggggcgcccccgacccgcagcaaattctcgatcaggaaactcttgcccaggttgccaaagccgggcgcagcggggaggttgaggagcgcggaggaagccacaacgtcccagtacgcaccggcgtgggctgcgaccgcgctggggagcatagtgcggcgccaaccggtctgctgcgcgcccgccttgcgcccgcctgtcgcccgggcgccccgcaccgcacccagagccgcagcttctcgccgccgcctcccgcagggctggagcgcgcggagccaggcagggaggaaaggccacccgggacggcggcggacttggaacgatattatttatttgcgttgggcgtttttttaagggatgggaggagtgagtgtgggagggggaagctgtgagtttctctggccgacagcgtaggctctgggagcgcaggggggagtctttccccctctctatgcagatctggacgggttttttttttgttttttgtttttttctggacggacggaaggtgtgtccagcccatccattcatgtcaccagccccacaaagtgacagacgcggccaacaataagggtagtgctgtggcaaggggaggggactcgtagtgggaggaggtgggcgtggaggcgacgtgaatcgggcgcgctcgccacctccccgctgccgtgcagagccgtggcactctcgctagagcccaagcagtcccccaggcgtggggtctggtggacgctggcctggagcgcccggagggcggggtgggggtgggggggacgcgctgtcgtctggggtgtctccgcgtactcctgttgggcgaaccctggctctccggtgttggttgtcacttgagcaactgatgggcttccaggggaagtaaacggagtcgctagtggctggaggggctgttatcagggtcagtggaaggtatcaccgagactgttgtagctgtgccgcccttgaaaagttacctctgaaagagtgggttgtttgcgtattaaacgaggcccttatgttataagggagaaggagatgtgtttttctcggagaccttttaagaaatttctgtttccagtgactcatttccggtcaccttttaataagatttgtttttaaggattgtggggagagctgcatacagctccttcactctagaagagaggatctaatacgttttgatctagagaaggagctcatagtcggagttggttaaatgccagatgacagatggttgcgtccaaaacctagagggaaaaaaccaccaccaggtcctcctagacattggtagttgtgtacgtctctgcagggagacggggatgaaaacactgcgttacttaggattacagctggtctttttttttcttctgaaaatttaagtattttaaaatttattaacagtttgctaagtgggaactggacagatgaaaagcatggttgtgtgtgtatgtgtatgtgtgtgtgtgtgtgtgtgtgtgtaaataaagcttgctttttaaccacaagatgactttgggaaggctgctcctttaggaaactctgtaacagtggagtgttaaaactgtgaactctctgccaattaacacttaccattgctactctcctgtccaaatttagatgaatttattctgaatgagattttttaaggatgcctgtgaagtttggagtcacattatatttttcctctttatcctaagaataatttggtctctggcctcaatttagttaaaagctagccagagttgccaggttagtaagataaatattctttttaagttcaccttatggtgaatttaaatgcccagcttcatcaaagatgagcgtaggtaactaaattaatgaagtttgttttttttttctaagctggtggacaattttatgacgtgccgctaaatgggaggaaagttatttgcaagactgatttatactaccgatgttcattcacttgttgagttagtcagcagacctttactgagcatttcatatttattgaacacttgtggtggttttgggaatacatagaagaaagatctggtccttgcctcatgggaattcacagcctactgggaggagaaaaacaagtaacatctgaggaaggacttctaatttggaaggaaaaacgtgagagaaaactttctaaagacagtctgtattgtcattcagttcgaagaattttttaatttccatcttgatttcatttttgacccaatgatcattcaggagcaggttatttaatttccgtgtatttgcatggttttgaaggttccctttggagttggttttcagttttattccactgtgatctgagagagtgcttgatataatttcaatttt

SEQ ID NO: 916123 - DNA, 4001 bp, Homo sapiens
catacacaccaggcagggagggcttcagagagcagctgggacttgaagcttgttagagcacggacaggtaggggttgaaaaggtacccaggaagaggaacgttgggtagtagaaagttactcatgctgtctgatgaaacaaatgtataacgtttgatgtggagaatgcaagcagtggagtctagggaaattatatttgaaaagtaccctggatctagatcatggataccctgaatgtcaggctaggaggtgagagtttcgtgatgagaaatgggaaaccacgtgaaaggtttttgaattgaaattgttggtgaaggtggggcagatgaaaacctctgaacccatctaatgtgaagttcctcctcttgctcaagaaaagtattcttttctttcccatttttcttactccacttctacttccagacagggccaccctttcccccatgctctgtccttctccagtgcatgagtctctcaggaagtctcccttctccatgtctcctaaaagtcggcctcccaactctccttccccggaccccccttctgcttctctgacttcctccactcatatcccaagtcattaaccctcccacccaggactggggcaggaggaagagaaaggactcacggttccccgatcctggggcagaggcggcctctggatcatctgcaaaggagggaacagtgaccatgtcaagtagggcacagttgcatgagctgtatccagccagggctgcctagaattcccaggcctctaatctcaggagtgtggcagtggacagacaggagagaaatctctgcttcacaaggggcccactagaaatgctttttggtatctcaaccaaatccctctctctgttatcctccctagacctaggctactcagaacatccctatggaaatggaatcattctctgactctcttctatgtcttagatgtccaagtttcataatgaaagttgaaggggcatgaccacgagggcatgaccacagcacctgctctagtgacagggcaggagttgttctgattgtcacctgatagaatgacctcagaaggaccttccctccatttctttattcttccaaaagcatgaatgaagcacgcattatgcaccagacatggtgttagaggctagagatacagctgtgaggaagacagacagtgtaattgctcggggaagctgacagtcaatgggggatttggaggaattaacataattacataaacaattatttaattacatttgtgatagtgctaggaaggaaaaatacaggaggcaagaaaatgcaaaataggggccaaaatgattctggggcttcagcaagcctgctgtgaggaaatacatggacacagagagctagcagggcggacacttggaaattgagtaggaaggaggttgacgtgggtgggtgaaataatgggcaggggaaaagacaagaggatgtgcaaaagtcttggcagtgggaaatggcttggttcattgaggggaaaaagaatgccagagtggttggagcagagtgggccaatcacagactgagaggagaggcaatggagagccaggctggggccacagggctcctggcttcctctgaccatagagtccctgtgtggagaacctagtgggaggcaggagtgggctacagagacagacttgggtgaactgcctctggcgaggaggggaaggggaaatgaaggcagggcccagtcttcaggggactatatggttgggtgtcggggaagagccatactcacaggcacagaccagggctcctgccagagctgtcaggaagaggagagtcatgaacctcatgcttctgtgtgctggagtgggtatgccaccaaatccttggagatcttgggatctagggtgtcaagactgcctctctgggcctttttttaagcatgacagggaccaatgggaaccagtcttccagtggtgtgttctcctcctcctcttctcccacctcagagccacctgttaagtcaacaaaggctggctggggctggctggtgcccgccttccctgcaggtaggtcctggacagcagctctggagttggcactgtcctgactggcatccttttcctgcctctccccttcccatctcgcttgtccctgggctcccatctctgattgcatctggggtcctggggaagactgtgagaggtttctggagagggccctggcaggagggctgtgcccagaaggctctccttccacctggaaacagaaggggggcccaagatgtcagatccagcctccttaggagagagtgggggtggctgaggcttcccttgagtgggttaagcccaccctagggggctgccctcacagcatttggggatcccacctgactaaggtccagagaggctgatgtcctctctaggggtctccatgtggtaaccagagcttcccagcctcagtaggccctgaccagggtgtcttcagtcccagctaatgatcctctaccccagaaaattctcctggtaagttaaccagaatatgaagtcagttcccagtttgcccttcatataggggagggaggccagtggtgtggataatccagagaagtggagaatccaaaggtgcttctctctgcctcagaatcccttcctgcggacttgtgttttcttcgaaatggcagaaagtcctggagatgtgggtttatgactcgattttgttgtttactagctgtgtggccttcagagaggcaatttacctgccccacttcaattgtttttctttcttcttttattttatggtaatatttaaggtgtaacatgaagttttgatatacatgtatttagtgaaatggttactataatcaagcaaatgaacacatccatgattttacataattagccttttgtgtgtgtgtctctctgtatgtgtgtgtgtgtgtgtgtgtgtatgtgtaagagcacccaaaatctgctcttccagcaaaaatcccaaattcaatacagtattattgactccagctcttgtgttccacttcagctgttttgcatttgatggtgagaaatgatcattttaatcctacaggtttcgtgtgaggaatacatgtgtcaaaactggtcagctccctcctccatctattccagacccaagctggggagctgaggataacttggaaccttagtttctgctcctcacaaagccagttacttccttgagatgtcttctctccacggagtggagcctgcccttgccctgttcctgggaccttggtgaaaatggactgagatttgtttcctgaggtgctctgtctgtgccagacaccgtgttggacccagacagataaagatgagtagactgtggtcttgccttgaggggatacacagtaggcaaggatctcagacagatgaagggacaattgatggtagcaggggactctgtcctggtagacaaagcatgctcttcctagcctatgggattgaagcaaagttgtgctccaccacttagaggctgaatgattttggcatgtcacataatctctctgactctcatctccacagtgtgacccagggtacttgtgaaattcgaacaggaatagctcagatccactttctgggtcaactttctggggctcttccctgttctctggatgtctacctctcacctccatgggaactcagtccatctgagctctcaccatctctcctgttgtgtggttcattgtgagactttcttggcttttttccttcaacatacagacatcttaaaaataagcaaaatgttccctttatactctccctatctagcttctttccaatccttctgcaaccaagctttttgaaaacaactccattttttttttggcctcaacatccgtgttttgctttatgttcttatcaccctgtaatgtttgcaccaccatccctggaaccgagatacatccttgccaaggtactcggatacagtcgccacttttcagcctttatcttatctgatctcggtgggctctgacactgttagagccactcatcttttgaggtgctg

SEQ ID NO: 916124 - DNA, 4001 bp, Homo sapiens
aaatggtacaaattctccaaacaatattctttttgattgaagctgaatatagacaggcagcttataacttcaatcaccgacctttatttcattttcatttgctcgtgtgtgtgtgtgtgtgagagagagagaatgtatgtgtgtgtgttcatgtgtgtgtgacagagagagagtgtatgtgtgtgtgtgcatttaaccctgactgtactgtgaaaaaataattgcatgtccagaaactttgtgcaaaatcttccataaaatcatctgttttaaattagtgtcatggtacttcaagacccagcatcttaaaacatttaatgtgggctgtcaatactgataattcctttcgtcatttccttctttccttaattaatcagaaatataaagagcaaagagcagctgtccaagtagtaaccaaagagattgttattgagatgatatgctgtttaaattatactgaaactgttttaagtagtctaaaaatgcatgacaatgtccaagatgctaattactaatgtaatatcactactccactgaagctagttgccatagtttacaaatgttttaccaaaaataataatttctggttcctaaaactagttaagcccattaaatgaagtatgtcatccagatcaacatttgcattatgttatctatgcctctggtgtcactttcaaagtcaaaatttaaccctcaagagataagtgaagctataaatgcaaaacaaaattaaaatcctacagcactagatgattaaaaacttcaattataatatatgtaattttaaaataaagaataaaggcggcatttatccacaaacaagggttactataggaggcatttggctcttttctggttagaaacagcaacaggaaaaaaaaaagccacaggtatttacatcactgggagcccacttaatcagtggtcactgtgttaccctgttttaaaattagaaaattaacccacatcctcattttatagtgaatgtatcttaaaatttcacttgcagtgaagatactgactgggacactttacatttaagaaattatacagcgtttttagtatcttaggcatttaataacataaatattttcaatgtttattttcacttctctggtgataatttctgttcatttctggggttgaagaaatatacattaggtattttcagctaatcaccagagttcagttcttctgggcttttaaaagtccttaaagcaatcaaaaattcaggagaaaaatacattttttaaatatataggtcaattacagatatgctacttcagaatacttttcggttaccatctcttgaagagctaaacattcattaatacaaacacaaaaacattaatatagagagtcatggtgttaggttacagttttttaagaagcatctttgcaaaaacagaagagaaagaaataaaacaatgcattcaatcattttatcaaatatttaacttctgttttcaaataatacttgtttaaaatgttgcataaaaactataaaagtttaacagttttttttttccttttctttttctcaccaaataatcccttttgctcgcaacttgaccgaagttttattagtctgtagcagagttcaggacaattattgaaaaccataccttttaatccgggaatttgccacaggagccctcaaagctgagatgtaattacactaaatattcagcccaagtaaaagagtttgcaggtgtggaaaggaggagggggtaggtgctgctctgtgactaggttgaaaacctcctgcttctactccatagcacagttaaaaaataaggtttccctcaatgaacacaatccggctgacacccacattagatcatatggtaatgatatgtctcttgtattgtagccagaaactttatcggccttttttttcctcccatttgctttattctttttgcatctgcttaagattctaaactgcttatgcagtatagtggagcaacttgatttgaaatttgtcttattgtagattcatttccctaagatattgtaactaaagggtttgtttccccaccccccatctcatttcattctccaccctttctagccttgtttacaagtagcatttattatacttccaaaatgacatttttttcttgcttttgggatgtgtaagtccagaaaaatggaatgaaattaatcttgtagttgttttaaatgtggactgcaaaaataaatgagtagccttatgtgaaactactcattcggattcctacttgccttggaatgtttgtgtaaattcaagcactatgctgtggagtttttctgtatattttggacatatttctaaagtgtcctgaaagaaagtcatggttttatatgaaaagtatgtcatctatcactttcattaatcatagtttaaaatctttctccctgtccaccagtttttaaataaaatacatagataacctgtagttgatcacaacatagtttcatcctctatatatgaaaaatttgattttcatagattatacttttatgtaaactagaactttgaaaaggcaatagagtctatgtgtctttccaaatttcagtaaatgaaaagaaaaacaagtgcaactacaaggaaaggtatttatttagccactggaaatcttttttgagcttttataattcccttgctggatgctgttagttgtctctgtgtaggtctctgtgttttgacttgtatcattatgctctggcccctaggctgttaccaggtggaaactggaaatcaacagtttgaaacatgagatgatccccctcccatcctccagcctccttccttccctcctccagccatcaaagtatattcttccacagtaaatattctttttcctcaaaaaaacttagagaaattaaattctcaagtggtatctaaggagggggaggcgtgttaccacgttatagtttgccttatttcctaagcccagcctctcagataaacaatttaccctactctgcatctccttaacatttaataaccacatatctagttattctgatagtttagacaaaggcaagcactattgtccctggacattggtgcaaaagtccatgatcccctttacttggaatttattaatttcctttctgaactctccttatatggcatttatctctttttgatgacatataatcactcctgcctcatattataattatttatgtacgtgtcttactccaagggaggaatgacattgtgttcatgtttgtagaatccctgcacccagaatagccatggtatatactaagttaccaagatacatttgctaaattagtaaagacaatcaaatgattggctatggaccgtacccggactggtgttttgccccaatcctggcttactgtttatcaaaacttaaccctactaaagtgtatatgacaaattatggccatcattacaagacagagagagagaaaaggaagtattaaagaaaaagtagaagaagaaaaatgaggaggaggagaaaaaaagacataatgcctttttatgtagataattttacttttataaaagcagaaccattatggttaagatttagatcttgttccttccccccgatagtaagctatatgaactcaggcaacttgcttaacctctctgaatttcagtttccatatctgaaaaatggatacaaattcttacctaactcatagtgttggagtggagattaaataaggcaatatatataaaacacttaactcagaacttaatccttataagtgaaaatctctgtaaatgcaagcttttattatgtcttgacatatttcaaaacaatcctttgagttagacaagataagtcatatttactatttctgttttacaaatgagaaaattgaagcccagtgacttgcccaagttcacagagctggcaagaaacaaagcagaaactaatatccaggtcttctcatgcctaatccacttttcattactaaactatactaaactataatgtatcttaagaaagaggaagcaaattcttacatat

SEQ ID NO: 916125 - DNA, 4001 bp, Homo sapiens
tcttctaagtgtaatgctcttggaatttccagaccaaatttttctgaaaagatgataaatcaaactgtctttagggtgttaggctaaagatatatgtaacacaattatattgaatatttacaccataccttagtgataaatatttcctttgaaactttctaaagaatataagcagctggattacaaaatgtcaaaagtaaagacaaaactaagactcagagattaagggagtattttgatacttgaaagataagattttgtcataaaatttgatgtgttttgcttttgataactgattattttacaatttagtaatgttgaaactctgttgtctgggctaagtgaatagtagagagactgacctgattttcttaatatctaatattttataaaagcatattatagaattaagattaaaccattactctgaaattttagaacataagacttttttaattcaaaattttattttgtagaagaagggatataaagctcagaaatatttttaaaaatgatttgtccaagattgcaaagtaatggaggaaaaaaggaagagggacagagagggagagagagagagaaagagagaacaacaacgctacttttctttctatcctgttctgcttcctttactcctcattaggtggcactgtctctcaaatttagagagattaaaactgaaaatgctaaactctcagagttgccattcccaagaataaaacaagtaaggtaggtaaagagaaactgcatcccactcacccaaatcagaacactggaccactcgaagatggcattgacagcggaaggggcacactgggcctagggagggctcgaagtcgcggtcatcaggaacttctgggcctatcccagaagcctcatcttctagcataaagtcaaataagcctctctgttgaaacggtccagcccaggaaacttgtgcaagcagaaggaggatgatagtggccttcatgatttatctcatgtattttcacaaccagggaacctaggaaacaaatgagagatttaagaagagtagcactgcctaatctgtgtgtcgtttcttatataatatgccacaatacagtgagcacagagaaaagatgcaaaataatatttcatttgttatcaggaagcagagcattaaaaatgtattgaaagacaatcaggtacattatagtatcatttgcacagctatttacttaggatgagaaatctgagtattatttaaatctgcttgtttgaattttgggtctaaactaagatgatatactatatatccaaatcatttgcaaaattgtcatggtaataaatcatgttgggcttttcaatgctcacttaacacatggtcagataaaattatctctatccacataggagatctccaatttctgcttcagaaatatctctggaagccagtcacatctctccatcctaccacaattattttgatccaggcccttctcatctctccctaaactactacaagagcttctaattcatctctgccttgcatatttcctctatttcagtccatcttccattttgctgcctgagtcatcgtctaaaaattcaattttgtcttattaatttctactataaaccatttattaacttcctatggcttatcaatactgtccacagtccctgtgctgtatgtcagaccactcataaattggtatgaattaatagctctagccacattccttttcattgtcactccattcccagtcctcacctgaaccctgacaatcaaagctacttgccatgtagaataccgaccttgcaagagagttgtaaagattaaatgagatagtgggcttctcttctgtgtcccctggctcatccaggcaagatgctgctttctccctcttctctgctcccaaagcacgttgctcttacctcttttaaagaacttatcacattatattgcaatttgttttgcgtgcttggtctgtccctcactagacgatgtactccttcagggcgtgtcttattattccttgttctgtacccgggccttgcacaatattttgcacacaaatgactcaattgaccatcactttattgacaagacgatttattccatttgttccaagcaatcagtctgattttttaaaacacaaaattagctttttttcagtatcgaatttctgatataaaaaaagcagattgaaaacctcaacttggtataagcaagatcggctttaaaaaataaatcaatttcctagtttctcaaacattatgtttaataagctaataaacacatatggaaaattctgatttttatgtgatgtatatatgatctcattttgctaacagggcattttgtaaaaaaacaagtattgttttgataaatgtattccatatttatccattcattccacaagcacgaatctatgttgttaaatcaactgaagtgcactaaataaatctgagtgacaaaatcgtaataaatctgaataacaaaagtacttgattatatagcagcaaagtcatttgggagatgaaatattttttaaattgcattgaaaccattctgatatctccaaaacatagtagatatttagtcccatcatagcagatatttagtcccatcatctctaccttgaattgtacacttagacgaatccatattaaagctgtacgttcgtaagtagaatcttacagctgttttgagtcattatccaattgtagcatattaaaaaaaagaagaaagaaagaaggaaggaagaaagaaagaaagaaggaagaaagaaaaggaaagaaagaaagagaaaaagaaagaaaggaagaaagtgaaagaaagagagagagagagagaaagaaagaagagaagagaaaagaaagatctttgtatgatctaaccttaaggtatcttctgggaatttttgcctagattctctagagaagaaacaaatgtttttcagtttcttacatgtttgttcttagtttatatttactactgatatgtgtctaaggcagcacatgttgaatacaggcttgtggcttttcatttaacaaaatatcataaagattattattcacactgccactttaagttcaacattaagcttcttctagcagcccactctcattcagttactgagtatccctttaagagaagacttttgttttggcagcctgttcctttggattgtatctgagggagtggttttgtatctgtttcccattaaaaatgcaatgtttatggtttaccacaagcttgctagccttgcatatttaatgtcttacaagtttaaaagaaaaatgaagcaaagtcattgcagatttaataaatagcaacgacagttaatgcagatgtcactttgaaatcttttctccagagcagaacatgcctggttgtttcactaacaacccacaaaaagaaaatgttgagtattagctgagagaaatagtattataatttatgtttgtttactcctgttaaaatggtacaaattctccaaacaatattctttttgattgaagctgaatatagacaggcagcttataacttcaatcaccgacctttatttcattttcatttgctcgtgtgtgtgtgtgtgtgagagagagagaatgtatgtgtgtgtgttcatgtgtgtgtgacagagagagagtgtatgtgtgtgtgtgcatttaaccctgactgtactgtgaaaaaataattgcatgtccagaaactttgtgcaaaatcttccataaaatcatctgttttaaattagtgtcatggtacttcaagacccagcatcttaaaacatttaatgtgggctgtcaatactgataattcctttcgtcatttccttctttccttaattaatcagaaatataaagagcaaagagcagctgtccaagtagtaaccaaagagattgttattgagatgatatgctgtttaaattatactgaaactgttttaagtagtctaaaaatgcatgacaatgtccaagatgctaattactaatgtaatatcactactccactgaagctagttgccatagtt

SEQ ID NO: 916126 - DNA, 4001 bp, Homo sapiens
tacataacagagaattggaaaactggcccagtgctttcatcagggtcaaggtttatgagctattttttcatggaagcaaaggcaaactatatttacgaaaaaataaaacttcactaaagtgactggccaactcttctttccttaaaaatatcaacccttcatttttgataatacatgtagcgagagtaataataaattcttttaactttttctcagaggcaaagtgaaatttaattcgcattacattttttgggaacttcgccattttagtaacttcagaaaagattatcctgtgtatatccatcaaatggtgatttctttgttcagatttttttcaaccctgttattttcctgcccaaggcaataatgcaggtcatctctagatgcttataaaatttctgaagagtaatccaatctcccctgtggcaaatacacaattcaaaaagtaatagtcaccaccactagaacataagatccacaagaactagggccatatttgtcttcctcatcctttctccccatgcctagagcagagctcatccatgatgggttcccgatatagcttctgaatgactgaacaaatagatccattggaattatcctgcggccttttgaaagtcttcatataacatttgtatttgggttttaaatagctatacaatatatgtgttgaagaagctatttcaagtgtttttcagtcgttactactgaatatactttatattttttctgggttcctataggcagtttattccaattgtagaagttgcatttttcttctgcaaactactgctagaaagcatgttctgagtaaatataggacttctgaaagaagtgcctgatcatagtatggaatttcttccagaaggaagtacacatggcggaatcatgatataaagatttttttttcttttcatctccagtaagaaaatacaccccttcaaaaggaggaatgtgaatgagctgccatgtaaactgagttcattcccctttggcccatccactgagcttcaatctttctggagatttatcttctaagtgtaatgctcttggaatttccagaccaaatttttctgaaaagatgataaatcaaactgtctttagggtgttaggctaaagatatatgtaacacaattatattgaatatttacaccataccttagtgataaatatttcctttgaaactttctaaagaatataagcagctggattacaaaatgtcaaaagtaaagacaaaactaagactcagagattaagggagtattttgatacttgaaagataagattttgtcataaaatttgatgtgttttgcttttgataactgattattttacaatttagtaatgttgaaactctgttgtctgggctaagtgaatagtagagagactgacctgattttcttaatatctaatattttataaaagcatattatagaattaagattaaaccattactctgaaattttagaacataagacttttttaattcaaaattttattttgtagaagaagggatataaagctcagaaatatttttaaaaatgatttgtccaagattgcaaagtaatggaggaaaaaaggaagagggacagagagggagagagagagagaaagagagaacaacaacgctacttttctttctatcctgttctgcttcctttactcctcattaggtggcactgtctctcaaatttagagagattaaaactgaaaatgctaaactctcagagttgccattcccaagaataaaacaagtaaggtaggtaaagagaaactgcatcccactcacccaaatcagaacactggaccactcgaagatggcattgacagcggaaggggcacactgggcctagggagggctcgaagtcgcggtcatcaggaacttctgggcctatcccagaagcctcatcttctagcataaagtcaaataagcctctctgttgaaacggtccagcccaggaaacttgtgcaagcagaaggaggatgatagtggccttcatgatttatctcatgtattttcacaaccagggaacctaggaaacaaatgagagatttaagaagagtagcactgcctaatctgtgtgtcgtttcttatataatatgccacaatacagtgagcacagagaaaagatgcaaaataatatttcatttgttatcaggaagcagagcattaaaaatgtattgaaagacaatcaggtacattatagtatcatttgcacagctatttacttaggatgagaaatctgagtattatttaaatctgcttgtttgaattttgggtctaaactaagatgatatactatatatccaaatcatttgcaaaattgtcatggtaataaatcatgttgggcttttcaatgctcacttaacacatggtcagataaaattatctctatccacataggagatctccaatttctgcttcagaaatatctctggaagccagtcacatctctccatcctaccacaattattttgatccaggcccttctcatctctccctaaactactacaagagcttctaattcatctctgccttgcatatttcctctatttcagtccatcttccattttgctgcctgagtcatcgtctaaaaattcaattttgtcttattaatttctactataaaccatttattaacttcctatggcttatcaatactgtccacagtccctgtgctgtatgtcagaccactcataaattggtatgaattaatagctctagccacattccttttcattgtcactccattcccagtcctcacctgaaccctgacaatcaaagctacttgccatgtagaataccgaccttgcaagagagttgtaaagattaaatgagatagtgggcttctcttctgtgtcccctggctcatccaggcaagatgctgctttctccctcttctctgctcccaaagcacgttgctcttacctcttttaaagaacttatcacattatattgcaatttgttttgcgtgcttggtctgtccctcactagacgatgtactccttcagggcgtgtcttattattccttgttctgtacccgggccttgcacaatattttgcacacaaatgactcaattgaccatcactttattgacaagacgatttattccatttgttccaagcaatcagtctgattttttaaaacacaaaattagctttttttcagtatcgaatttctgatataaaaaaagcagattgaaaacctcaacttggtataagcaagatcggctttaaaaaataaatcaatttcctagtttctcaaacattatgtttaataagctaataaacacatatggaaaattctgatttttatgtgatgtatatatgatctcattttgctaacagggcattttgtaaaaaaacaagtattgttttgataaatgtattccatatttatccattcattccacaagcacgaatctatgttgttaaatcaactgaagtgcactaaataaatctgagtgacaaaatcgtaataaatctgaataacaaaagtacttgattatatagcagcaaagtcatttgggagatgaaatattttttaaattgcattgaaaccattctgatatctccaaaacatagtagatatttagtcccatcatagcagatatttagtcccatcatctctaccttgaattgtacacttagacgaatccatattaaagctgtacgttcgtaagtagaatcttacagctgttttgagtcattatccaattgtagcatattaaaaaaaagaagaaagaaagaaggaaggaagaaagaaagaaagaaggaagaaagaaaaggaaagaaagaaagagaaaaagaaagaaaggaagaaagtgaaagaaagagagagagagagagaaagaaagaagagaagagaaaagaaagatctttgtatgatctaaccttaaggtatcttctgggaatttttgcctagattctctagagaagaaacaaatgtttttcagtttcttacatgtttgttcttagtttatatttactactgatatgt

SEQ ID NO: 916127 - DNA, 4001 bp, Homo sapiens
ctgctttttgatgaggctttaggtatctaataaacatctgtaactatcttaaaaaggtatctatcacattgataagggtcaaaagcctataggaaacaactattattcaagagaaatgctctactctctttatactgacagtttcttgggattctccagactcgaatcccagtgtcaagtcaacttacagaactatacatccctggtcctcatctctctactacggaattacttttacaggattataacattatacctttagcatttttctacagagcagcaaaatagccatatgtagaatatctttttatatatttttaattaccatggaggaaactgtctatgttgctcaatgttctttatgtaaaaacgaaggtgacacctcgaaaaaacaaacaaacaaaaacaaacaaaaaaagtaggtgacaaattcccctggaaactagggggaaataacctctttctcctgatcaagaggtacactttctattacagaagaacgaatattaaagagctcttcctgttctccttttgtgtttggctactaggagagcagacctaaattctttgccccattccggcaaatttcctccgttaagaactttgggcaaaactgtttgtctaccccattcttgcttgtctttttatttttatgttaatgattttcaggtgagttttttactacaggctgctgaactatactgcagataagtaggcttatgaatgtgggtgttaaaaaaaatacagagttgttcaacatggatgttttcctagattaagttttgatgtttatacaaccgacttgaagaacacaaaaagtttatctgaaatccattcatcaaggctaagttctccatactgttttgtaacttattttaaaatgatggatatcatgtatgtgatacataatggatgatgaatattatttggacaaaactcattatgagtaaagaaacaaaattacatgtctctacattcgagtgggtgggttacaaaattacaagcagcaatccctgcaacaggattccagtgttctaggcttctaccccattctaactatgaggaaaatgaaatttcattccattaccatttactgggactctgctttgagaagagcactaaaataatttggctcccaaatgacctccaatatcgaacttggtgtgctgccgtgtaataatcttcccaagagcatcagcttccttctaagtgttagaccctgccccattttgtcttttatttgacgaggttggctcttttcttggtgtttccccttaagtttacaacttgcagatttctccccttctatcaagttttgatttctctttgccccatctaagactgacattccaaaatcagaactctgcacttttattcgtctgctgtccctgcctcccccatagccacagattcactgtaacagaactctgctctactttctcgagcacatcggtcttccggccataaggtatcaggtccttcctttccttcggctcttatggtgccgtacccgatcggtctggtctcccagcgttgggtacgttagagatttaagtcttttccccaactccaggtagctccacagatccgccttccttcccccaaacccccgagaccccatctccacaacttcggcctcagtccccagatccacccacttccagggcgtcaacgtctcctccccctcaccgggtcctcaagtcctgagtctgacgccccccgcctccaccccaaccctgggctgcactgctccgccgcgtccgcacgcacccactcgttggcccgatggccgaaggtgtacagagccacctggctggccacgtccacgatgcggttgatataggggtcgtggcgctgcagggccgctaggctgatgtcgcgcccctttcccaccaggccgcctgccgccacggctgccatcttccctccctcccagacataggcacggggctcttggaagccactctcaatagatcgcagaacgagcgagctgcctcgcaaccgagaacccacggcgaccacacggcccgggaggccttccggctccagtcacccccaccctcctgcccgccgacagacgcaaggcctcactaatcgatggccgcgccccgcccactgaggatcgttgccactggcaacgacaagcccaggcctgccctctgcatcccgtttctttctccaagagctgtttttctacgcgctcgagcctttgagctgtgtgtgcggtaggatttccttcttggatgtgttcgaccccttggcatatcttttctttggcgcttcagtgatcaaatctatcacaataaataagcctcgagcatcaagaactctgaagagaaagagaactgaattgatttctgaatgcgctaacacccagtggttctcaaagtgtggtgtggtcctggaaccctttgggagtttctgagaccctttcaggggatctgcaaggtcaaaaaaaaaacaaaaccttttatgacaatgctgagacttacttatttgacttgttcactgtggtgacgttttgcagacaatggtggttaaaagcgccggtggtttaacccaatcaaggcaggggcaccaaactgtattgctagtcaaagtacgcgtcactaatctgcactctcagttacaaaagaaaaaaaaaaaaagaagaaggtagagagccagtgtcacctgatggtgttcttgataagcagtaagaattattaatttcattgaagcttaatccttgggtacaattctttttaacattctgcatgaaaaaataggaaataggcataaagcacgtctgctgcaaaatgaagtgtgtcatatttgtctctaggaaaatacttctgtgcttgagttgtaggccgaattcatgtttttatttttattttcataaaacatttttacttgaaagaaagatgggcaaactatgattattcaaacaggtacttgacagacatttttctgaaaataaataaagtgtgcctgtcactttcaggaaaacaagggacaattactgctgccaatgataatttttaagccttcaagccagaattaaaagtttagaaaatgtgtatctactgccatgagcttgacatctcagtacttaatgtttttttttctgatgagatcagtgatgatattaatgagcgcaattttaacaaatcttgtataatggaaagtgtcaatatctcaaagatctgcttaactcagtggtccagtattttccaaaagaccaatgtctcatgctacataatcatgcacaggcaaaagatccattcaaggacaaggtggactaatggatttttaatgtaacagtatgaaaagttaataggatttcagatagtacattgcagctaagctttgagaaactccagcttgtcaagttttggtatattatccaagaagaatatccacaattgtctgaaaaactctattaaaatatccatctcttttccaactacattatctacatatgaggccagagtttcttcatatactccaaacaaaacacacatagcccggggtctttaaagttatttttaatttccaatatggtaaatataggtgggtataactcacataaacaaaagttctctgagggagtccttaataatttttaagagtgggccaggtgcggtggctcctgcctgtaatcccagcactttgggaggctgaggcgggcggatcacaaggtcagtagttcaagaccagcctggccaacatggtgaaaccccgtctctactaaaaatacaaaaattagccaggagtggtggcaggtacctgtaatcccggatactcgggaggctgaggcaggagaatcgcttgaacccgggaggcagaggttgcagtgagccgagatcctgccactgcactccagcctgggtgatagagcgagactccatctcaaaaataaaataaataaaaagtaattaaaaaaataatttttaagagtgtaaaggagtcttgagactaaaaagttgagaatggttgatctaaaccatttatctagc

SEQ ID NO: 916128 - DNA, 4001 bp, Homo sapiens
taattccccattagtctggggctcattgggggcagagacatttcttcctctgcattgcacaaaaaaaaccacagaatgaacacactcaataaaccatactaaatgtttcccctcacagttaaaatgtatccgtacctaattactccatcctcagaattctcggatctaaaaatgcaaccacagtctcacatccgctgatgtgaaatatttacattcttcctcaaatttgttttgctctaaaatcttggaatcactttcttaattccttgcccaatggatactggatattcatatggaaaaagtatttctccatatttcaaagtctagttcttggtagcagtttattacaagtgcccaggcttcatgattcatttccatgggttagaacccaggggcctaagtcactagctccaaacctgttttgagatatttcaattttatttaaaaggcccaagaatcagggctttgcaaacagatgttgttagctgtaattccgctgacttgactctccctcctgccattgctcattggtggctgcaagcccagcaaggtctttgcaagccctgcaacctatataccacccaggctggggttggcatacccgcttattgctgtagctcccccgagaaagggaaggacctgtctaggggagaaaggtcagagtccggaggagtctgtggcagcacacattcttaccgcatcgaactccgcttgatcatcctcaggtaggtcgctagtttcataaacatctggctcattcctggcctgcaggtagaagcagtgaccacccaacctcactacccagcatccaacaacaccccttcccccactccatttgaataagctaacagagaaggcggggtgtgatgtcagggttctgtcctttctcctccacctgccccgtgagtcaacagtatgtcagttcccatgtctcaaggggtagggatgacagcggaaacaattgggacctgacagtaaacggtgagtgtaagtgatagcaacgatgttaccctaaatctagaggcgggcaggtccttggcaatcactattgccaaagaaggtgaaggctatcctccaattaggccccgtacaccaccaccctggcacaaggattgagagtgactcaggaccttagtactcaaggtcctgtgtcccaaccctcaccttgagaagcaggcagggcagcacaaaaggaaggtacacgccaggattgtcatgggagtgggggctgggggagggcataggttccctcaaggatagagctccccatctggcacaagagggttctgccagatggcagaacctcttccttggcaggatgaaggccatcgttaagtggtctggtgtgtgtgtctggggtagcgatggggtcttatggagagatttgggggggacatgggaggcgttgacacggatggtggaaaaactcaggcacaagaggtcagtacccggagtcgatttctgggccgagctaccggcgactgccggaaagggggcctggtgcgccgtccggcggcccggcccagtcgggtcagaagagttcggggggtgctgaggccgatcggagaacgagcggcgggagcccttgggcggaggatgggctgcaggcgggaggggtcgcgggctggtttctgctgggggtccttgggaggtcgggggcgcggtcctggggagccggggccggtcctgtactcacaatgccgggaaggtcggcgtatttagggtccgccatggcggcggcgagacgggctgggggacccgggcctcggtggagccggggccggtgttcgggtaggggagaggctgggttcgggtcccgggctaaggcggcggcaaagggagcggcagatgagcaggaagtctcgcgacagcagtagcacagcagaagggtaaagcaaaagtcgcgagaacagccctgctgccacacccctggagaggccgggattggggagaacgaggccagggaatgaggtaatggccaggggacgccgcctaggattgtgggatgtgtagttttggtgtactggagcttgggcggggagcgacaataacgaaccttggggagctatttcatacagccttttctctcacttttacagcaagtcagtgaaagaacatttataattcctgtttggggctcccaggaataaaatgactagattaaatgatacaggtagtcatactgtgacacagccggggtttcaaaaacaagaagtttgcttgatactgtgtattataaaaacaaaataaaaacaagaagtaaaatttagtaaacgcgtagtgtatgttaggaatgaaaaagttaggcaatcttctcaagtaagggctttcagataatttgaatttcagataataagtaggtgtgtgtgtgtggtgtgtggtgtgtgggtatactaaccccccaaaaattaagtatctgaaattcacatttaactgggcatcctgtttttgttttttgtttttcaaatctggcaattctatctgaagttcataagtaggtaagtggtgtctccatgtctgtctgaacactctctgggctcttaactacttcgttaatagttctcagacttttatttatttttcaattttttcaattttgtgggtacacagtaggtgtatgtatttatgggacacatgagatattttgatacaggcatgcaatgtgaaataagcacatcatggagaagagggtatccatcctctcaagcatttatcctttaagttacaaataatccaattactctttaagttattttaaaatgtacagttgagttattcttgactatagtcaccctattgtgccatcaaatagtaggtcttattatactttctaattttttgtacctattcaccaaccttaccttccgttctcagacttttaaatttcatcgttcaataaaattaaaacaactacaaaccttgaagatttgcctttttattttatcaagtaagtatattacaaatagaaaacctattatttactgtcaccatcattacttggtagaaaagcaagaaggacacactcagaataaaagatagtcctttgaaacttatcaaatccatctttatattaaaaaaaaactcaccattgttcttttggaggtgagggcatactcagtgaacttttgtctctgaccagtgaccctccatggactggcattttgaaacccctttactaaagatgccaccttggagcccctggggacccaaggatgggatgtttcccaggatgtttcctgagcttgcaggatgctgcaacacttagaaattgtgccaaaccaagtgactagagagttcctgagttcggaactcgttgtctttctttctcctggctcctccccaagcctctatccctttctccatagtcctacagctttcctgtcccattccttatgttggactcttttctttcagttcccttaagattcaaggtaggttagaggtgtagccccaatgtgggaaaccccctgagttctgaatagttaggtcttgtctggccaggctatcagcctcttacttttgtcccatagtgtcttaagtgaccttaaccactcaccagacagttgctgagcagaactttcctttcctcctccttctcccatccaccctgcccttcctctttgcctagaacctcaactcctgcagtccaactctctgttggccagcagaggcctgtgacatggagaaaaatcaatttggccagcttcttggtggttctttccaggggctgcagcaggagtctgacccaaaggaaggaaggacaaggaatctctgggcttggcatttctttcgtttttcttcccccacacctttttttttttggccagggaagggggctgaagtattgggactctatcctccaatggttactgagacagaaaacacacactcccgtaggtatctgaatttgcctgaaacccaaatgccggctttgcctcagacttcaaagtctctctggccttacccatccccatcattgcccctccttcactgctttctga

SEQ ID NO: 916129 - DNA, 4001 bp, Homo sapiens
aaaggcaaactcttgctgattttccccttccaaggtcatccccatctcagatgacaactctagttgcttaagctaaaaaccttggtatcatccttcattcctcttctctcacaccctgcaatccaaagtactagcaaattttaactcattcctttttttctgagacgggtctcactctttttgcccaggctggaaggcagtggcgcaatcggctcactgcaacctccgcctgctgggttcaagcgattctcctgcttcagcctccggagtagctgggattacaggcatgcactgccatgcccggctaatttttgtatttttagtaaagatgggatttcaccatgttggccaggctggtcttgaactcctgacctcaggtgatccacccacctctggtctcccaaagtgctgggattacaggtgtgagccaccatgcccggcccttaactcattctttaaaaatgagtttttaaaacctttgcttagaagaatctaaacacttctaattccattgtttccaatctagatcaattcactaccatctctaaattactgcagaaactttctgactgcagaaggtcttcccatttcttctcttgccacccctccgcaactctattcaccatacagcagcctgagtgagccttttaaaacaggtcattcctctgctcaaaccctccaatgacttcctatttcatgtcatggaagtcactgaagggttttgagtggaggaattacctaaggtaattcctgaccacctgatgtaacactctgacctccatcctgaacattctccattcctttctctgctttagctttctccgtggcacttatattttgtttactgtaggcctcccactgagatgattttttcctcttgctcaaggatgtaccctgagccccaaactgtgtggcacacagtaggtcctcattaagtatttgttaagaatgaatggataaactccccccagtctctcttatagggaaggggcagaagcagagtggcagctgctgatccctaggggctagagatgcaatattgcccgaagtatttctctgcagggctgtcctccctggggaaccctcccttgccttccagtgtgtgggacttggctttcatcagcagtagagcctcaggtcagaaggctgcagagccaaacggggctggcctgatgcaatggttacacagagattagctgggagacaggaccgggttaaagaggcagggactaatcccgagggaaggacaataccctggggagaccccaaatggcctcctacacttaagagatccaggctgctctcttgtgcaggaggcccagagacctctacggcaaaaggaaaacacaccactccctgtccatcggcacccctcccaaaggcttgtgtctcctcaaggttcccctatccgctgcagggtccagtagccccagctaccaaggtggccatgctgacaccagaggcactgagactgagacagaattgggggtggggtagggagaaggcccgctggtggcgaagcggcggaaacggcctgagcgatggtcacccagtcttagagcgggggtgtgtcctgctgacctgcctccccgcggacaggcctaacgatgaggcctgaagttggctacgggaaagaatgaatttcccaagggcaaccgaggtccctttgcccagcagcacagagcagggcccgtgttccggctccgggcaggggtggagagacgccgtcgtccgaagcaataggggtttgtaagcaccaccccagaataagggactctccccattcctctctcggacggtccctaacttcactgtggaggagtgaggccgatcctaaagagcggacgccccaactttgaggagacgggagggtaaaaggtagatgggaatcagtactcgcctctctcctcaggttccagctctgattttggctctgtcgctgccacccgctcatctttaacatgatacgctcagtgccttagacttaagtctctgacctcgggagcgcctggctgtaatcttttaccatggccttgccctcctctcaggggcgggaccccaaaacctaccaatcagaaagtggcacgccggcattggccccgccccgtccctcgcatccgccactcaggagccccgcggcaccgcccccgtcgctccctctcgctagggggtcgacgtagtgtcggacccggaagtggctttgggtcacgaggcttcacggaggaggtgggtgagtcatgcgcgcgcgcggaggggagtgtagcggggggggaggggaggaaaggggggcggggatgatgcaatgtttggcaaccggtgtctgcacgcgcacgcgcaggggacaccgagggtggtgggaggtgcggagggtgggggagaggagagagggcggggcgccagctcccggcgcccaacggccccaacggctatcagccttggtcgcccctagtcggtcgtgagcctctttgccgcttgtctcccccagaagctgctgttccgcccacctagctttacccgccgttttacccccactataagggactcccatatttcttggcccctcccagctaatgggcacataggccttttgaacttttctttttaaagttggtatccatccactgggattgtcgacatctcgagtcttcttaaagaggtctcctggccgggctcagtggcttacgcctgtaatcccagcactttgggaggctgaggagagcggatcacttgaggtcaggagttcgagatcagcctgaccaacatggtgaaaccccgtctctactaaaaatacaaaaattagccgggtgtggtgatgcgcgcctgtaatcccagctactctggaggcagaggcagaagaatcgcttgaaccctggaggcggatgttgcagtgaccgagatcgcgccactgcactccagcctgggtgacagagcgagactacgtttcaccaaaaacaaaaaacaaaacaaacaaacaaaaaaacgggggtggtctcctgttctagccccgtaaatctcccaaaaggggccgaggtactggaatcccttggtagtcattttccgcttctctcagaacagcgcccttgacttttaccttgtagttggtaagccctcagcctgccagaagtcatgtattttgcccagtggacccgattctgtttggccacctattttcccccacggtactcctatggctttctccaagaccctctcttgctgtaccagacagcaagtcctgtgactccctgtgtgaggagcgcggcacaggcctgcctcctaggtgttcgggtcgagatttacagcggagtctcatcccgggacgtgtgagtgcacttcagcgcaggactgccctggactggggagaccggagccgcgattttagactcaactccccatcacttgccaagggatcttaccgtccttgtttgtaaattaaagataaaagttgtgaaggtaaaatgagaaccatgaacttggaggcaacttgaccaaaagtaaaacgcaccacccagaatgcaaagtatttttcttgtgccttgaaaacagaggccatgtggtggcctgttacatatcctgtcataccctcatgggggcagccagagtttaagtagaaactgtcacaaggccggttgtgactggagtggtgtggcaatgacaggtctttggttaggctgctccgctgctccacacctccatttcctctctgaaaatgggggtagtgtggagggtggaccagatggtctcccctggcctaaagacagaccaggttgtcagtgacaggcagaggtcatgtgacttgacaggctgaggtcgtgttgtgacatgttgacctggggaggcgggtcaagtcccagcacactacccgggaagcctttggggcggggcagggcaagtcgcgactttcatctttcggggcctggcccctcccggacctggcattcctggttcccgcaacagactgtggctttggaaggggcccctccctgaggagggctgggattggc

SEQ ID NO: 916130 - DNA, 4001 bp, Homo sapiens
cgggctggtgtaaaaggcgactgctcgacagccgcttttgacaaggggaaggaaagaccgtggccccttcaccctcctccttgccgggcttcgattggctgggggaatcccccaccacgcgtgtcaccccagagggcaaaagctgcacctgctgggttcggggggttggaacatattgggatcgtatcactacgcacgtggcgtcaatgacaaagacgccttccccacgggacaggccctgggaactgcggggcaaggtgtgggcacggcgggtcgccttccaaccctccagggtctccggtcctgccccctctccaagacccagagattctctccatccggtgcctccgggagcccagggtctggggagtgtctggctatggcggggcggctgctttttaggggagggaatccagcatttgggaaaccagatctgttctccttctttcccttccctcgagcccttgaggtggtgcctggatctgggagcgggatgcggggcacagggagccgcagttgcagaccccgcaggagctatctcggtgcctgcgctccctgtagctttggcttggggatggctgtcgctaccactgttcaggtcagcagcagccagccccaggcttttctccacgacccccttgccgggctctggccttgctctggccgctccacagcctggggatccccccaagagaccttgcccctgtcggagaccccaagccccgaggacgtcccggtagatccgaggatccagcctcttctttgtgcgccctccgtctgtcctggctggagtcgcagctggggctgatgaagtgggcacctgagagttcccggggcctctcttagtccccaaggtcctatgggggccttcgtaagaaggtggagccacgtagggtggcggccggtcccagcggcgtcgtggggcggtcccggcagaacctctcagcagcaggtgagcctcgtagcttgggggcccgggccgccgacctccccagggccccgcccacgccgaccctgggtcgctctgcggctgcgcggatggacggggcgctcgccccacaggcgccaggcgctccggccgcaagggagcagggagccctgccagctgggccacccgaggggcgttgcggggctccgggcggggtcgacccggggggctccgtcgggccccaccagccttgcgcctttttcgctcggtctccttggcctcccgctcctgcgacgccgctttccttttctcttgctcccgagctcggacctcggccaggggccccgcccgccagttggtcgcctcctgcagcaccctggaggcccagggccggcggggcggcggctgtggggatcccgggcgcggcccacacctgggacaatgagcaggaacccaggtgagcagtttgtgggggaagggagccgaggtccggggagctgggagcactggagaccacttggggcagccatgtgaaggggtgtgtgtgagtgtgtgcgcgtgtgcacgtgcgtatatgttaggactgaagtcgaagcgggactcctcgccatctctccatgcacactttaacagcgtctgccccatctcacctcctgccctttctcacacccacttctgttcccccaaacaacgggatgagtcaggccccagccctcgggagcgggcagaggtggaaggcgtgggaaagagaagggggaccagcagtgctcgctggtgcctgcggggaggtccggaccccactccccgccccaccactctcttcccctcacccctgcttcactcacgtgcggttctggaacccgcgagcccagtggctggcctggaagtccatgggctgtcgagaaggggcgcggcgactataatgacaggaaatagtcttcacttctatcaccaatagcttggacttctgcacccagaggcagctgccagactcctcatcctggagctcccgggggctgtcaggcccctcggagaacagtgggccatccagcatcctgccccaccccaccccggccccccaccctcccacccgccccaggagccccctcccagcccagggagccggcgcccactgcagagccgcgggcccggggactgggaactatatatacccgggcacacgtgtgtgtgcctgtctctgtgtgtgcgcgcgcatgtgacaccgcgcggactgctccgcgctgctacctcccccatgtgcacggccgccccctggggcccgggattggacgccccttcccactgctgttgtcccccaagcctgatgggatcgcacgagtgggcgggggagggacttatgattcttgccaagctgacagtgccccctcccccgcccctatttcttcaaccttcctgccgttttaaccctttactctcctgcttgtcaggttgcctgaccaccagggttctgcccctggcttcctgcctcagatttcagtttccccaacatagagtgatgagattggaactcaaggtctctgcctgccactctgctggtttccatggggctggggtgcaggaggggctggcccacggctggggggctatttttagcggcagtggctgttcgggtgcagagatgagatgagtaaccagctcccatgcggtggagagaggaggcggtggcttttaccaagcttttgtgcgactctgagggagagctgccttccctaagctcaaaaagggtgacccctacacccgtatctccttgtcagctcagtgctgcagcctaggactgctggtacagcaggacacaggcgtctgccttggccacccaagctgccctaccagttccattctacatgtttgtccttgggcagccagggagccctcccacagcagcaggctttcacctccaatccagaagccaggatttgggggttatattgttctgtgcccacacagcctgcccagctttatggaggacagagtaagtgcttatgcactctcacccttccagagggggatggaggagaaatgatgtgtttgcttggcaaaactaatcccctagcaactgaaatgataaaagtggcctttatttttttcaatgtagaactccccctcaccaccaccacaatgcctagttcactcagtccccaccttaagtggtgctccagatgctcaccttttgggctgcctctgtcctggggggctgttgcttatatccacatgatccctcctcctaagcttataccaggtgtcccctgattcaccatggtaatgttagtggcagcacagcccacgccaacccttccatgcagagacttagcaaccatgcctggcaaccatggcagcagcttcagtggaggggagcagtgcagagagaggggagagtgtgtggggcatggttcctcgggaagaagggataatttgcctctctggagaggaataggtaagaatagaagcttgtgagtctcccaaatttcatcccttgtctctccctcagcttcatcctcacactgagacggataggttgggttttagagggaaatgggagaagcaagagttcccaattagttttccactaatgtacatggagccctttgggtccagacccttccttttaaggggatggggaacaaccagaaaggttgtggggcagagactgacagactgagaaacaactcaacaaaaccaggtctctgctccctaacacaaacctttagagagaacgcaaacatcccgtcccatccaccctaccccccttgattccacacacctgccagctgcactgatgacttgactcgaagatgcttccttccaccctaggtcccactagagtcctgaggctttttaaagcccttgcctcctccctaggcaaatcttccttaatgagggaatgtgacataaggggccatctgtcctttccaccatgtgcttaccctcctgacacataaacatactctaattctaataacttggaagccttcctcccccaaggttgagaatgtgctgtgagagctgtaaaggggtgaaggcagaagcaggggctcctccacagccatgatgcaac

SEQ ID NO: 916131 - DNA, 4001 bp, Homo sapiens
agcaccatctgaacctatttattcttcctcactggaatatacgttccataaatagaggaaccttgtctgtcttgctcttctctggctccaggactcagaactaggtgcttcgacacctcataggcattcaacaaaaatctgatgaacgaatgagtagccagccagacatcggggctgtaagtgaaggtttctcttccgaggctgggtaacggaggtcccatgacttgaatacctattagttaaatggccagttctttaatggtttcaaaccgttttcagataaccccacaaaaaccctgtgtggtatttttataagctctattttatagagaaagaaactgagactcagtaaacttatatgacttgcccaaggtcactcagcaagtgcttgaactcaggatttgaaccacatctgccagacccccaagccacctgaaactttctatctcctcacttttcctcccaccaggataagtgggataaaaaagacagacttggttaccaaactctagaatgacaacactaaacaatacagaagaaacgtaagtattatttcacttccccatcagtggtaattatggatctcattattccagaagcagcacaggctaaatcatagaggtttagataaatctgagtataacggattcactaagccctattaaaaacatttgcagtgacttgttcagccctcttcaggttggctgtgtggaggacaaccatcacctcccagtgccaaggcacacaccaggacagcaaagctcacgctcataaaacgaggttagagttgtgaaagcacttcaggaacatattagttcttaacgtgttcattttcttcagtccccaattatcactcattactgagtacagactattgttgtgggctcagttgtgtcctccccacattgatcttggacatcccaagcctctgggactgtgagaaaacacatttctgtgtctaagccacccagtttatggtattttgtcatggcagccggggctgaccaagacaactatgtggcaggtactatctaccgtatggccctaaaatgttttaacttcacacacctggaaagcaccacagccccaagaaaaaagcttttccgcactgctgttaagccagggccacacactgcagtactgcggtgctccaccagctggaggatggcctggcccataatacccgcattcccaccttgctctggccctgtgtcccctccaacgtgcatcctgagctcgcaccctgtgtggaacccaaacagctgcttatcagcatttaagtccatttttatgacacttccgtcaacaatctggtcaagtgcactcattcctggcctccgtactgtaccctgctccgcctcgattcccgccctgggggaagctagactcatgcagctaactttatcggctctgggctctgattgccaagtttaggatcccagctgtatccttgctaaagttagcatcgctggggctcagtttccgtaagagacaggtgggttacaagcgctcactcactgttgcagtgtcttatctacgtaagataatccatgaaaagctcaacacagctgggccaaatctaagacccagacacgcggctgctgttaatgcccacttctgcgcaccgcccagttccaccgcaggcacaaccttcctaggcctacccgtccccacacaggggttcccgcttgtcaatcacgctggcccggccctccacttccggaatgttttcccgctccggacgggccacccacctttgcaaataggggtccggcgccggaacagacgcccagtttgcgatttcaccagtctgcccttcctcgtcccgctgctcctcgtcctaaggagctctgctgccacacagcactgcgctcaccttcttcgccggcagaattgctacgctgaaagccaggccccgggaatcagggcaaacgccactgagttagaaactggcgggtcccctcagtgaaaggcagccggaacaacccccgccgctgcgcatgcgcactccgggacgcgcgcgaacacgcagcagcgagaatctacaggggcgtggtttgcgcacgcgggaactgggatctcaaccccagggctaggtgcctcctcccgctgctttccgccagctgcggggtgtgagattaatccccgccgattagcgccaggtgtactaagcgctggatggttccctgaccagatgaaacatcagccgatgttctaatgccggtcccctgggcgctgtccccgagagggaaaacctgttttctgaccccggctctagtcggcctctggaggtctgcagctgggttattttacctttgaaacggacgacacctgccccgtgcaccccagcggctcctccacacggagagatggtgtcagtcaaaggccgtctagatgacgagtttatgaaattgttcctggcccgtgccgggcacgaccttgcagagagcccagaagatgaaaccccagccctgccaggagctcacctgctaattaggaggacaacgaatcacctcacctccctagactttgcttctcctttattcagtgagggattggactagctggtccttgaggacttttcagaaagtctggttctgggagatgaccaatgggatcatcttatgctatgagctttcctggaatgacaggtaattggtgcgccttcccagcagggtcagggagagttgctgggacttgaaggaaaggcttttggggagaggagccagtgttacaaactatcgaaaagcttggaggtgggaaatttacaaaaggtgattccagggtcagcttttttgtcacctgcttccgacttcggcagtttggagagggcgagtaagtaatacccttcagggtcttgggatgtggcccagcaaaatccttagagggactttgaagtcttagttttaagtttagaattaatgggcagagtacttaaatagccatttctccaaagatgtatacaaatggcccacaggcccataaaaatgttgcattccaccctataacatgtttttgcataaaaaagttttaaaataactgttgtctggtaaattgacacctctggaatagaatgtatgctaggttttttaccctactgcttcaaaccccatcctacacacacactcctagggtgtgcatcatccagtttaagaagcacccttggagaaacaaagttgatagtgtgtccagaattgatgggttcttggtctcactaacgcaagactgaagctgcagaccctcgcggtgttagtttttaaaggcggtgtgtctggagtttgttccctcagatgttccgatgggtttggagttttttccttctggtgggtttgtggtcttgctggctcaggagtgaagctgcagaccttcgcctgagtgttacagcttttaagacggcatgtactggagttgctagttcaccccggtgggttcgtgtatctcactagcttcaggagtgaagctgcagacatttgcagtgagtgttacagctcataaaggcagtgcagacctaaaaaacaaaaagaacaaagcttccatactgtggtaagaaaatcctagtgagttactgctgctgtcttagggcagcctgtgtttattctcttctctggccccacccacatcctgctgattggtccattttagagagagctgattggtctgttttacagagagctgattgagccgttttgacagggtgctgattggtgcgtttataatccctgagctagacacaaaagttctccaggtcaccactagattagcgagatacacagtgtcgattggtgtatttacaaaccgtgagctagacacagagtgctgattggtgcatttacaaactttgagctagatacagagtgccgattggtgcattcacaatcccttagctagacaaaggttctccaagtccccaccagattaactagatacacagtgccgattggttcattcacaaaccctgagctagacacagggtgctgattggtgtgtttgcaaaccttgag

SEQ ID NO: 916132 - DNA, 4001 bp, Homo sapiens
tggcttgttctaggaacgtggcgatggagatggaaagaagtaggcagcgtcagagtatattttggaggcaaagctaacaggacttactaaggaagaagcagaaagagcagacacaaagatagctcctaaatttatagtttcagcaacctaatagtttgtggtgccatagcaaacaaactggagaagactagggaacgaacagatttaagaggaaatcaaacgtttcattttggccaggttgagtgtgagaatatctgtggagattcccagaaggcaaagagaaatgcaaatctgaacttaggggagagggtctgtagacaaaaacttgagtcaccaatacacagatagcttttaaagccatgggacactaaatgatattacctaagtaggcagcatagtgaaagaaaaaaaatagagaagaagctccagaattgagctctggaacactttaacaggagttagccacgggatgaaccagagaaaaagactgaaaagaactagcagccagtgagaaaagacaaagaaaagcatggcaacgaagaagccaaaaacatgtttcaaggagggaggggtcaactgtgtcaagtaccaccgaagtggagagggaataagggacagggaagtaaccactgaatttggaaaaatggagattattggtgaccttgacaagagctgtttcagttgcattgcgggaatggaagcctgagtggaatgagtttggaagagaatgaaaaatgagaagaagacagtaaatacaggcaacttttattacaggttctattatcacaagggccaaataaccaggctgactctggccatgcttcccagcagccttcctctcaaacctccagatcttcaggtcctcagttcttgcagggcaggggcacattcttttttttcactcaatgacgtatttaacaagcatctactgtacgcaaggcacagtgctaggtgctatgtgagttacaaaaataaattctgttcacaggaagtgtttagaacaacagggttatgaggtcggacgcggtggctcacgcatgtaatcctaacactttaagaggccgagacaggtggattgcctgagctcaggagttcgagaccagcctggggaacacggtgaaaccccgtctctactaaaaatacaaaaaattagccgggcgtggcggcgtgcgcctgtaatcacagctactcgggaggctgagacaggagaatcgcttgaacccgggaggcggaggttgcagagaaccaagatcgtgccattgcactccagcctaggcgacagagcgagactccgtctcaaaaaaaaaaagaaaagaaaagaaaaaaaagaacaatagggggtatgagacacataccaagaagagtatcaaggctcagatgtagtaatacaggtgttcaaaggcgtttcctttcacttgtaaaaggtgatgtggaaggcttggaagaggaagtgacgcttgagcttttaagtataagtagaattttaagatatgtaattaaggacgcggaaaagaagtcattcccggcaaaagaaataatacggccggcgcagaggcgggaaaacatggactgactgcgagagaaaagccagagttccagtttggctgcaccaaaggctactttaagcatgaaagaataaggtcagactgggggtatcagaggcgctgtgcccataggcagagtcctgggaggaaaatatcgtgcagggacgtggcctgtgcccggaggagccaacactacccctggggcccgcgccccttcactccagcccgcccgagcttcccgggttcatgccccttctctgaggcgttctttcccgcctcatccaggaggcaggggccaccgccgtgccctgactctagccctttctgtaagctcgtgggaaccgcctccaccgcccgggactcaccaccctgagtctgaaccgcccaacgcggcctcaacgtcgcggagccgtcgccatctttcccgtttcctggtcgcggagatgaacaccccccacccccccggccgcgaggcaagctgggaaggcgagttcctggagctgggcggcacaggccgacactgaggcctggaaactaccaatcccagaatgcatgacttgagcgccggccccaggctgcggggtctgccgggcaatgtggtttgccagacgttagcgtccgggaaggaagagtttttcgccaataggctttcggcattaggttctcccgccgagcacccttcttggaatcggctggtcttcctagaaactacggtctatgactgtccttgcccgtggcttacagtggaggaatttaagggcttcctgagatatctgtagtacgtaattatagctaacaaccgcagtaacaataaataccattcgtggaaaagcggtttttataataattctgtgagaatggggctagccccattttacagttggacaaactaaagatcaggttaccggagtaggttcacaaggagggtgatgcagttctccattgtgtgtggaactatcccaggcttaggaggacgttttagcaaccttggcccctgcagccgggtgaatgccataacaacccccagttattgttacagctccaaatgagcccacacaatgggctctaaagtcctcccggaaggatggtatctcctgggctctagcacctgttttctcaacattccagatggaaccctggtttcctcaatttcttgccctttggaatgtgaccaattgttgagctatcttggtatttttgcttctttcttcccccagattcccctacttcagtcttccactgagttttgttgttgctgttgttgttgttgttgatgttgttgttgttgttttaacctcaaatcgtaagttcactttgtgtttctctttggtcttatgggttcataactctttccctcaaaacaaaacaaaacattgcagttgcggaaacggtttagataaccagaagtatctcggacctcccttcccattttgccagcagcaggtttgttgcttcaattccacatggctgtaggtctgccttttctctctgaatatgcccaagctctcaagcagagcctcaggatagacccaagtaatcctaaagccctgagcatcacgtacaatggcccaaagtaaccctcggagacacacacttctcttagaacctgcagcctttcacctcccagcttctactccagagagaacgcaagggaaagaagagagctctgagatctgttaggtgtaattcaccacaaaagcacgagagggcgctcgactcacagattcacagattaaactaagaatcagaccaaccatggtaggccagaatcttcaaaaactgcagccactttttattgagaatcttctaagtgctcagctctgggctggacacttaacctaccttatttgttttacttagttctcatagcagtatgagatgagtgctatctccattttactggtaaggagattgtggcccagaaagagtaattatgccttcaaaggccacatagttaaaagaatgggccaggtgaggtggctcatgcttgtatctcagcactttgggaggccaagacaggaggactgcttgagcccaggaggtcgaggtcgcagtgagccatgctcgtgccactgcactacagcctgggtgacagagcaaaaccctgactggaaaaaaaaaaaaaagaaagaaagaaaaaagaaaagaaaagaatggagccaaaattcaggttcatttaacttcagagtccattacctttccccattttcaggctgccatctcaactctctttaaattgagctcctggagggtgataaagcttgtcccagttcatagtggcagagttcctctagtacttgtgcgcacatctcatgacacatgtaagacattgggcttcaaggatacttgttatttgtcttgccccactagttctctcacaaacatgaatctttgttttcttatttgtttgtatttttattttattttatttatttatttatttttgagatggagtct

SEQ ID NO: 916133 - DNA, 4001 bp, Homo sapiens
aaatggaattttgtagagtaagtctaaccccttttccacatgacagctcttcaaatcattaaatctttcaattattatcaataataatcactacattaattactaatgagtaataattatagcttacattaatcactaataatatagtaatacagtaatagctacattaatactaacaataattagccacattacccctcttataacaattgctatgattacattcactctctctgaggatcttaatagatttcagttaactaagacctctgggcctcttttatcacccaccctaatcctgtaaagttggtactttaggaatctaagagcaggactttacttctactcctattaaagttcatcctgttacagccagatgtggtggctcacacctgtaatcccagcactttgggaggccaaggcaggtagatcacttgaggtcaggagttcgagaccagcctggccaacatgctgaaaccccatctctactaaaaatacaaaattagccggacatggtgatgcgcctgtaatccattacttgggaggctgaggcgggagagttgcttgaacctggaaggcagaggttgcagtgagccaagaccgcaccactgcactccagcctgggcgacagagcgaaactctatctcaaaaaaaactccatcttaaaaaaaagatctcaaaaagaaaaaagttcatcccattagtttcagttccagtagccatcaatctgctttaaccactgttttacaaatctgataaacatggctcacagcaagaattctcaactcctcaagacacacatatgtgttccaggcatccttccctaagtgtgcgcccactgatgcataaagtctaccaagattgtcgttaatatactttaactttaacctagggcttccttaaagtcagcatctgtggcagagaacaaaccctttcagctattaagacagaaagtaagctcagtaaaattggagaatgacattttcaaataccattacccaaactttgtacctttagtgaccatatccttatttcacttgaagtatgcaagcaacagctttcaaaaggggtatctaattgagataactttatattaaatctgtacgaagtcatacaacctaccttgtaaggccaaaggaatagcttcaatctggatcttggtgggttttgtccatcccaactggtcacaagcttcacacaacacatctgtcacacccttggaattcagaaaaatataccttagccaagaacagcacacccctacctccctcctacttaactgactgtcagacccatcatgtacaaccattgtatttgatttaaaaggtatttactgtgcatctcagagcctactctttaactataccatgagacagtagctcaagacttaacgaacactttctgctcaccaaggccaaggccaggtgctttacatgtatcatctcatttaatcgtcacaacaattctgcgaggtaagtacttattactatccccaatttacagatgtggaaagagaaacacagagaggtaacaacttgtcctcagtaagagactgtgtcaaaattcaaatctggttggttcatctgactccaaagctccagttataaagagaccaattccattccccatatgtacaacctcctggatgcacatacaaacgttgccacactaaagtggcgaatagggcaaatagggggtctcagggcccagcagccctcccaccacccaaactcagagcacgtccgaaacccagccctctgaaattctggggaaaacccaagctaggccccaagatgcttttgtacactatcagagcgggatctaaggtacctggggtctccctgagcctagcaccagagtacataaaagaagccagcgtcatccattctcaccaggtctttaaatgttttagtttcctcctcttccacaatcggctgggacgcttcggtcggagaatcgtgttcctcgggtgccgccatcttgtgtgaggtctccggaagtgggtctgcggcgcgcgggatgctgggaaatgtagttttagttctccccggacgacgtgctctgcgcgccccctgcgggcttgccggggattgcacccgtccgctaggcaggtggggcccagtgaatatgggcgcgtaggcttgcggaatagatccgagtgcagaaggggctgatcaccagggactccagttgacctttaggtcccttttaaagagccttccctacgtgtgtcgccagttatgttccccgcttttctaaccatagagtttggaacggattgatattacaatactatttttttattatgtcattactttattcaataatgttgagaacctaccatttgctaaggctatgctagatggctggtgaataggacagcgacccctgccctcgtgaagaaaaagaagacagatcataaataagctatcacagagcatttcaaattgtgaaaagtagctgggtgtgctcacgcctgtaaccccagcactgtgggaggacgaggcgggcggatcacttgagcccaggagttcgagaccagcctgggcaacgtggcgaaaccctgtgtctgcaaaatgcaaaaatcagtcaggcatgcatggtggcatgcgcctgtaatcccagctattcagggggctgaggttgagggatcagttgaccccggaagttgaggctgcagtgagtggagatggtgctactgtactccagcctgggcaacagagtgaaaccctgttcacataaaaattacagagtaacctggggagggtgggttgtggggataactgtgagattgggaaggcctctctgagacagtgatatttgagttaagacctcactgttgagcaggagaaaacgctttaagatcccaggagataatcattccagagtgagagaattccaagtaccaagactgtgaagctactaaggctattctggaaagcagcaaattcagagctgtatgttgcatgccccatggccagcgagtgccctcctgtggcctgtcacttgggtctcacactgcgcagggtgctcgttgcagttttattcctgaggatgggaagttgggggcaatctggtgtccgtcactgggaaaatgcatagttaaaatgtgaacatggtgtctacaaacatgcccttaacaatatgattagatctgaaaaacctagtgcttagtgagaaaagcataaaatatatcaagtatattaaaatataggcccacagatatcacattctgctaaaacacatccaacagaagatacacttgaaatattttagaatggttgcctgcagagggagaagaattagaataaaactgggaattgggaataaaagaattaagtgtataagacaataggccggccgcggtggctcacacctgtatcttagcactttgggaggccaaggcagatggatcacttgaagtcaagagttcgagaccagcctggtcaacatagtgaaatccagtctctactaaaaacacaaaaattagccaggcatggtggcctgtgcctgtaatcccagctactcggggggctggggcaggagaattgcttgaaccccggaggcggaggttgcagtgagctgagatcatgccattgcactccagcctgagtgacagcgcaagactccgtctcaaaaaaaaaaaaaaaaggataataaatacacaaagcaagagaggagacttgtgatgccagtgtgcttgacctgagaattgtgaggaactcaactcaatgtgcctgccgacctccccaccaccacaactaaaaaagggccctgatttaggcatcacagcagtgtctcaacaacaaaaagggtaggatgtggtcagagaattgggctcagctcagactctgcaggaccctgttgtaaaaggtctggggttttggatgttatcctaaatgcagaaggaagccactgggggtttagagcagggaagagacatgatctacacatttaaaatattactctaactctatatggagataggctgtagaaagagt

SEQ ID NO: 916134 - DNA, 4001 bp, Homo sapiens
agaggtcgctaggccggtagccacctctgcccaccagaaacccacaggctgcgctctccaggagggcaggaatcacagctgcctggactggatgaggaaaggcgagagagaagtcgtgtttacgcctaggcctaggcctgccgcttccctgcctgtgacctctgggctgggctgctctgctggaggcctgggaaccgctccccagagggatggcaccaaggcccagaggaacgccagcctcaggagacccaagtgggaaccatgagcttgagagtgctgagaccacacttggcaccgatgtggcagggacgcctgacccacggccactcacagccttgtgtgtgggtgcccagggaggtgttccctcagctgcctgcccggggctggggcacctggaaagtaggacgagatgccgtgtgcccgcagctgcttctgcaggtcaggatggacgtcagggatgtcctcgataggaaccaggtcttcggtgacattccttctgacacagttaggctcagccagccaccttggcaggaaaggctggacctgccatcaaaaagaaagagaggccaggtgagcgctttccaggctctcgcgcagaagcccacggtggaaaaagctaggggagggaggctggggaaacctctgtcgtcttcagctccttctcagccccaggatgcgctttccatacagccttcagaagttaaacagtaaaagcagatgccactccctgagcaaactcactctgtagcctcccatcaacccacagtggcacccaccctcccgcagccaggaggtcctgtgacctggcgctcgcctgccccagccacgccggcgtccctgcctcgaggcctctgcctggcacccccaacccccaaccttgacctggcttcaagtctttgcatcccaactcaaagagaacctcctccacctgccctacctaaggtgcccgagcactctgtcaaacttctcgctttcttcacctgtctcgccggaaatctctttaccgaaaaccacacgtgctaagcaaaaacaccaacggtcaggagcttgcagaacggcctctgacttactcctgaggcggtgagcgcacagcaggaaaccccgcacgttcacgcaaacacatcttgcagaactggcgcggcgcggcgggaggacaggggcaagcctagcagaggaaacgggagctctgcacgtgcaggatccagacccctaggcgatgaaactgcagacctggcagcgaggcgcggctgtgacccgggaacattcgctgaacgaaatcttccggggcgaccgccgcacttaagaatccgcgcagcctaccctctcacgccgaccaccctcccgcccgccgaggctcaccttcggcgccttcctcttcccgaacccccccagcaccaggccggggaccaggggtccggccgcctcctccagggccggtccatctggggccgcctcggcgctggcgctggtgctgcgctcccccggcgcctcctcgctgctccctgcgctgggctcccctggcgcctcctcgctgctccctgcgctgggctcccctggcgcctcctcgttgctttctgcgaggcagacacccacccggcagcgcgtcagcaccgagtcgccggcgccccagagggagcccgctcgccccgcggcccacctgcgcccgcgtcctcgccgtccgccttccgtcgctttccctgcggcgcctccgggctccccggctccgcgtcgttcacccgccgccgccgccggggccgccgtcgcctcctggtcgccggctcggtcgatgcagccgcctcggtctgcgcgggctcccgctgctgctgccgttcgcgggcccggctctgcagccgctcgagcagcgcgcgggccctgccgtgcgccccggcctccgcgccctccggccccgccgcagctgccgcatcggggcccgggtaccgcgcgacgtagaacagcgccatggccagccgcacgcctgggactcgggcgtggcgcgctgcgatgacgtcggcggcacgcctgcgactcgggctccgcgcaaaagatggggttggggtacggcgcgtagagatgacgtcgggttctacgcgcagtggtgacgtcacgggagcgccggcggctgagaatccgcgttgttccgtgttgggggcggcatggagcgggagccgggcgccgcgggagttcgccgggctctgggccgccggctggaggcggtgctggcgagccgcagtgaggccaacgccgtgttcgacatcctggccgtgctgcaggtgggcctggcggcgtcgcagggccggagtcgcggcacgggagcgggacttgaatggggggctgcggcggcaggtccccaggaggttccgagacggcgttggggggtcagggtgggaggcgtgtgggtcacgggtcgggggtgacggggctggcgtcccgagggggaagggaacgggttgggggcagcctaggcaggggcgaaggtgacagttggcggccgggcaccctgccgccgcctctcctgcagtctgaggaccaggaggagatccaggaagcagtccgcacgtgcagccgtcttttcggggccttgctggagcggggagagctgtttgtgggccagctgccctctgaggagatggtcatgacaggtgagccctggagggccccggggctgctcttctctttccgtgggtcggagggaggctttgtcaccatgggatgagcgcccccaaccctggcacaggccgtgcaggctggtgggaggacgcaccaagcccaccgtggaagatggatggtggcgttggggcaggggtgacatgggtgccctgcagctgagtgtagatgaacactggacaaggtacgactttttgtgtgctttgcaccccttttgtaatttgatgttgactgatcctgacacggtcgcttaaactcggagcttcctttatgtccccatcctggggacgtcaggtcttggagtaaagagaggggatgtggatcctgctcctggcagcttggctggggcagtcctggggtaggaggtgctcttcctgtttgcagggctcagggaatgtgctggtctcagcacaggtctgggggccttagcgacctgtttccacctgcggaggctgagtagaagacaatgggagggtggagccaggcctgagattttgggctgggcccagggtggcgtatgtgggcctcacgtgggctgaccaccctaacctgtctgcagggtcccagggagccacacggaagtacaaggtgtggatgagacaccgctatcacagctgctgcaatcgcttgggagagctcctgggccacccctcctttcaggtcaaggtgggtcattgggctggcctcatccttgtccatcccctgcaccccaactcccaggttatccacaaagcagaggtctggggctcccacaattgtccaggcaaagctgcttccttcatgggagcatcaccctgtgggtgttcagtcccattcagaaacatggctatcgagtcctgtagtgaatattgaagacgcagaatccgtgttcatttccagtggcatccacggggatctctgtgtttgcatagagcacgcacaccaagcctcgtgccagtccacagatgtgtttgctcagatcacactgtggtctgcagccatgggaatgcattatgagctttcttaaaatctgtagtgaggaataactgaggcacagtttaccgtttaaagctgagaagttagcatctgttactgtgttgtgcagtggttgccgctatcccagaacatctttatcgccccgaaaagaaatcctgtaccagttaccatcgcttccatatcccgcccctttccacccccagccccaggcagccactcctggatcagtggttacttcctggatcaatgggtttgctttttttagacgctcctcataagggggatcatacggtatgtggcttcttccactcatcggcgtgttcgaagttcgttctctttgtggctgagtagcagcgcgtcgt

SEQ ID NO: 916135 - DNA, 4001 bp, Homo sapiens
tgccttggagtgtgatcctttctcttcatataaatgtccacttactcatcttgccctgagcctacctggtgccaggcacccgctgggaacaggactgtgggaaataatgggcgcagcccttctgccccattggtgctcacacccatcccttcatgtgcatacacatgacattcagtaatggaaacggcacaggccttggaatcagacagtctcaagtttgaatctcctggctcttgtactcacaagctgtgaggtcttggtcaagctgctttctctctttttttgtaaagatgggatctcccttttttttttttttctttttttggagacagagtcttgctctgttgcttatgatggagtgcagttgtgtagccacagctcactgtactctccgccgcccaggtttaagtgatcctcccacattgcctctccaggaggtgggaccacaggtgggcgccaccaagccaggctaatttttattttttgagacagagtcttgctctgtcacccaggctggagtgcagtggtgcaatatcggctcactgcaacctctgactcccagtttcaagcgattctcctgcctcagcctcccgagtagctgggattacaggcacatgccaccacacctggctatttttgtatttttagtagagacagggtttcaccatgttggccaggctggtcttgaactcccgacctcaggtgatccgcctgcctcagcctcctaaagtgctgggattacaggcgtgagccaccgcggccatcctaattttttaattttttgtagagacggggtctgcctatgttgcccaggctgatcttgaactcctgacctcaagcaatcctcccacctcagcctccctaagtgctgggtttacaggcgtgtagccactacaccaggcctttgactatttcttaaccctctaggcctcagtttcctcctgtagaaaaatgaagatgacagttgctggtggtgttagcacaacgttggtgtgaggattaaataataaggctcgtacagctcttagcatggagcctggcacatagtaaacggtcaacaaacacaaactggccgggctcacgcctgttaatcccaacactttgggaagcagaagtgggaggactgcttgaggccagaagttcgagaccatcctgggcaacatagggagacccccgtctctacaaaaaatttaaaaattatccgggcgtggtggcgcatgtctgtggtctcagctaccggagaggctgacgtgggaggatcgcttgagcccaggaggcggaggctgtagcaaggcgtggctacacaactgcactccggcatgagcaacagagcaagactctgtctcaaaaaaaattgttttaattcgtttcccagaggtttggaggcgtcacactgtctcaagccacgcagtctggcctccccttaattcaacctcccaagaacgctccaaactctcaaagtcagatcttctgcacccgcacttttcattgggcgaaagggagccaggatccgccccacgagcaggaggcagccaatgagagacgcgcgaccaaaacccggcaggaaggcccgcaggctccagccccgggatcccaaggctctggccgcggaaccctgagcctgacaagccccgagacacgtgctcaggccggcggtcccaagaccggtcctcgggtcggcagcctccctccccacactctgcggagcccaatccccagctggggaaactgaggcctcgaggcgctgcccggagccgggtctcgggcccgaacatgcgtcccagccccacgcgcctaccttccgggcccgggcgtcatcttccgcctggatctcaaactcgccgtcctccgagtcgctgccgcgggcctgggaggccgcgcctcggcgcttccggagccctttcttcttcctccactgggccatggcagctcgcgaccgaggtccagccgccgggcccttgtcggccgccattcgggccgcgcgctgggaacgcagaagggggcgtggcctgaggagcgcaccaactgcgtgggggggggggaggtgcggtgaccacgtgacctccgctgagctttcgccagtgcctgcggccctcggcggcctagtacacacgcacctgagtgagtggcaccagaggaccctctccatgtttagggacctcctgggcctcaggagcgtggcgcccgcccctgggcggactccccccatccgcgggcgcgaatggtccgggccgcgtccgcagtgctgctggctgctccctggttgctgggtgcaaagtgctgggttctgggtttctggattcgcgggccgttcacacgtagcctgtgccggctcctcgggtgagtccgtccgcgcgcggtgccccgggacggcctaggctgccgggggtccggggccccaggcattccgggctgcagattgacggggatcccggatgcaccgcgcgcccccgcgccctcaccgacgggtccagacctggtgggaagaaggtgcggggacgggtccctgaggatcccgatgcctacgagccaagatgctcaggtaggagaacaacccaaaaatgcagggacctcgggcactttttaatcgggtcattgatttgggagtcgcagaatgtggggcggtgggggcggcggtgatctcccgatagcagtgtagccaagtacacaagctctggactcagatttcacttccaccgttttagctttataggtgtgacctacacatgtgacttcacctcagttttgtgatccgtaaaatggacaaattcgaagctacttcacagtgctgttgagaggattaaatgaaacaatgcttgtaaagctctttgcaggaggtaggcatgggatccacgctggctgtcattgcccccacccccatcagtacacataggaaagtgcctgtctcccctaccaccatagtgtgttttctggttggtgcctaaatagacacaggtgtcatctctccttcaccgccagagtcattctgtaaataattgccagtagcccccctttcaccaccattatgacaactaaaaaaaagccaaagaaatttccaaaatgccccctgaagttgacagctcccctttgagagactggttgagagagaactaaacccttgggatgagaacttcagacactaccggtcttcctccattagcacttctgtggctcaggggtgctactctgacctcctctcacagggagcctcggaagcagggcctggccggcagagcacacctgctgtcaccagggaccacaggcagcatgaagacccccgtggagctggccgtcagtgggatgcagaccctcggccttcagcaccgctgccgaggtggctaccgggtcaaggccaggacgtcatatgtggatgagactctgtttggcagcccagcaggcacccggcctaccccaccggacttcgatccgccctgggtggagaaggctaacagaaccagaggcgtgggcaaggaggcatcgaaggccttgggggcaaaggggagctgtgagaccaccccctcaaggggcagcacccccaccctcacaccaaggaagaagaacaaatacaggtaatggggtagggagatgcaaatcctgtactcagtgcagccacctggattccagttacagctctggtgttcacctgctctgtgaccttgggcaagcatcttgacctctctgagccagtttactcatgtggaaaataggaccaattattcctacctagggggattgttgatggattaaatgagagaggggtctgcagtgcttcgcacagtaacctaatacttagaaagctgtcaataaatggtagtgttgatggttgtgatggtgaactccctatccccaaatgtcacaaactgggcatctgaggcccagaggagtcagctgaggcataagatcacagagaaatttgcataagcttattaatattaatgtgttcgatccttgaaatgacatagatgtggtgtttctgaagtcattttgaaaatgggttttgg

SEQ ID NO: 916136 - DNA, 4001 bp, Homo sapiens
tcagtgtttaaaaacaggactcttgtggtcaggcgcagtggctcactcctgtaatcccagcactttgggaggccaaggcgggcgtacctgaggtcaggagttcaagaccagtctggccaacatggcgaaatcccgtctctactaaaaacacaaaaattagccaggcgtggtggtgtatgcctgtaaccccagctacttggaaggctgagatgggagaatagcttgaacccgggaggcagaagttgcagtgagccgagatcgtgtcattgcactccaacctgggcaacagagaaagattccgtctcaaaaaagttaaaaacaaacaaacaaacaaaaaacaaaaaaaagaactcttgactttccctctgaaacctgatacgcacgccagtcattcttgggaaatggtaacaccattcactcagctactaataaaaatcagccgggtgcggtagctcagcctgtaatcccagcactttgggaggccaaggcgggtggatcaggaggtcaggagttcaagaccaacctggccgagatggtgaaaccccgtatctactaaaaatacaaaaaattagccgggcatggtggcaggcacctgtgatctcagctacttgggaggttcaggcagagaattgcttgaacccaggaggcggaggttgcagtgagccgagatcgcgccactgcactccagcctgggcaacagagcgagactccatctcaaaaaaaaaaaaaaaaagaataaaaacctcaggtcctgtagtcttttctttcctaacctccacttccagtcccttagcaaccttaaagctatcccaaatgtgacttctcagtatccactggttccaccctactccaagtcaccatcatctcttacctgacaatggcctcctaagcgacctgcctgcttcatctcttatgcctggaaaggccactctctacagagaaatcacagcccttcccttcctaaacatcctcccagataagatggcttcccactacatttagaatgaaatccaagcgcctacaagaccctgcacaatccatctcttacactactcttgatgttcagccacaaaggcctcctttctgctgctcaaactatttgcagcctgccgcagggcatttatgtgcactggtatttctctccagtggaataatctccccctagtcacctcagagccagctccttctcaatcactgaggtctcagctcaatgcacctcctcagagaggccttccttaacaccctatctcacctcctctgcagtcctcgcgcgacactatcacaaccgtcttagttctttcataacacttaccagcagctgaaattatcctttctctagctcttgcactagaaagtaaggctatgagcagatgccaatactgcaaactccccagagcctagaagagttcctgacacatagcaggtcctcaagaaatattcttgaagagatgcataacaacggtaacccttactgagctcccatagtgtgccgactggtttatttagtccccacagcaaccccataaggagggtgttattttttcgtcatttcacagagaaggaaaatgaagcacggagaggttaagccatttgcccgaggtctcacagctacagcgagcagggccaggatgagaaccaggcttgagaccacagcacccgagggcggggtgggtcgcggcccctctgccggctcgctggccgggcagctccgcattccgccagtctgggcagctggagacaaggcaagagccccagctggagggatgagcgccccagggctcagatctgtccgatcacctcctgtgggtccgatgcagcgggtgcctgcccctctcccagcctcactcccccacgccagggaaccgatacctgcaccggcgtcatgtacgggaagcccagctcccgcagcgcgcccagcacctgcgggtgcagcggcacaggcagcgactcccaggagccctctgtcacatgctccatggcgcgctccttcgccgcgtcggtcgccgctgctcgaacgcgccttgtgcacccccaacgagcacttccgcttcccgcagctccagcggccggccgggaacttcgctggagcagcagagttccggagcgcggcgaaggctcccacgccgcgggagggaggaaaggcgtccgcgggacggtggaggcaggcggcggggcaggcctggggagttacacccgctccgcacagcgccctgggctccgggcgcctctccgcaccgggcaggagttttggcgggagggattctggcccggccctcccactttctctgcccctcggaggcaggtggcagcacaggaccgcgtccaggccgaaggacagcggggctggctaccgtgggcagagaaacgtgtcggggacccgggttagcagccctgcaaaacaggcacccgctgatggccggtacgtcctgaatgttgcggtccgatggccggtacgtcctgaatgttggtttactttcccggaagttagggtcagagtcctaactaagaacactgtcccattcctctgttcactgtttgcctgggccattcatgtccacatacaacttcactcagaaagctgtttttgttgttgttgttgttgttgttgttgtttgagacggagtctcgctctgttgcccaggctggaggctgggcgctataacggttcactgcaagctccgcctcccgggttcacgcccttctcctgcctcagcctcccgagtacctgggactgcaggcgccctccaccacgcccggctaattttttgtatttttagtagagacggggtttcaccgtgttagccaggatggtctcgatttcctgacctcgtgatccgcccgcctcggcctcccaaagtgctgggattacaggcgtgagccaccgcgcccggccttcactcagcaaacttttattgaccactcattatgtgccctctatgagggcctatctcctccacctatgtgcatggcttgctcctgttgaggctctgaaaacgaaaccccaaaatgaaggccccagaggcagcctcagaagcaagtttctctctgaccttctgctccctctctgatctctgattctctgaggctagccatagaaactcaagaatccctcttgcccatgacggagcatagaaacaggaatcccttttctccacagtcagccataaaacctaaaaatattactctctctccacctttctgtgaaaaaactggccataaagaaattattggcctggcacggtggctcacgcctgtaatctcaccactttgggaggccaaagcgggcagatctcaaggtcaggagttcgagaccagcctggccaatatggtgaaaccccgtctctactaaaaatacagaaattagccaggcgtggtggcgcatgcctgtagtcccagctactcaggagcctgaggcagaagaatcgcttgaaccagggaggtggaggttgcgccactgcactccagcgtgggtgacaaagcgagactcagtctcaaaaaaaaaaagaaaaagaaattatctgggctaggtgcggtggctcatgcctgtaatcccagcactttgggaggctgaggcaggcggatcacctaaggtaaggagtttgagaccagcctggccaacgtagtgaaaccctgtctactaaaaatacaaaaaattagccaggtgtggtggcaggtgcctgcagctactccggaggctgagctacaagcatcgcttgaacctgagaagtggaggctgcagtaatcctagatcgcaccattgcattccagcctgggcgacagagtgagactcagtctcaaaaaacaaacaaacaaacaaacaaacaaacaaaaaaaggccagacgtggtggctcacacctgtaatcctagcacttttggaggccaaggcgggcagattgcctgagctcaggagttcgagaccagacggtgaaatcccgtctctactaaaaatacaaaaaaaaattagccagatgtggcagcgtgcgcctgtattcccagctac

SEQ ID NO: 916137 - DNA, 4001 bp, Homo sapiens
taacatcattctctctgtgcctaaagagtcctaggtcacacctaaaaggtacagttttagcttcagtaggcaaacggaaaagaaaaatacaggcttttttcctttcattagtcatcactgacagaaggcctccaagtgaccctggtgccacaaatgtttaggatctttagggaagaaaggagtctagaaaaataacaatattccttcaccaatctcgagaagaatctctccaaatctctctgcagacattttttcttcatatcctttaacaaagccattcttaacatgtacatgaaatcttagttgaagaaacaatgtgattacataattacacatacggaaaaacttggtattctattatctctccaaatttttttttaactaaaactagacttacagtttttgttgaaaatgttttgtgtttctacctccgaagaatatgaaaaaaagaaaatgttttgctctgaagctgagttaagaagaagatagccaagacgtgggttgatggggactgtattttaaggctgaacagttttgtttactattgtttattatttaatatattcttcccagtctccccacccccaccaaaggaaaagcgaaaaatttacgttagtgcaatcaataaggaattatttgtccaaaggaagttgttctgaaaggctatgacctaagtctttaacacaaagttcaggcggtagatgtcacttctctcacccatttaacaacaacaacaaatcaagattcagatcccgcggaggcaagcagaaaggaacaggcgtgaaaaatgaaatcagttgtttctccccggcctcctctcgacactgcgcactccgctgccctgcccccgcccatcgccctttagcggccccttttaacggcgtcgtttgcccagcacagccccgcactgcgccatcaaatgagtcaagcggaaggaccggtacccctccgggaaaaccaggcactaacacacggtgcacccaactgaatttaaactcgggaacagtgtaggcagtgtcaacaaagcgcggtgctgggtcccgagcgtccaaaggtccctgccagctcccagacgcggccaaatccacaggattccaaaaggtgacttggccggcaccgcagagcggcaggcggcgcagagggcagagtccgaccggtccccgccccgcgctcgctccgcacggccaccggctcctccgcggacgctaccccggcgggagccgagctgagtccgactccccgtctcccgaagaggcccgaaagccgcgtcacgtgcggggccgaaacttcgcggccggggccgggtggctggcgggtgggaggcaggcacggcggtcggggggcagcccgcgcgcccggtgactcaccggccgcctccgagtgcggctgcaagcgaaggggccggcgcgccaggcggggtccgtgcccttggggccacccccgcgcctgttattaataacccagcgcctggaggcgaaagccccggtgggcgcagccgcaaagcccgcacgcggaataaataacaatgtcattaaatcgcgcccgagcgccagttcggccagaaagcggcgggagggcgccaccgggagctgactttgtctggagcctgcaccccgcctcccgcgcgtccccacagcgtcccccgcgcccctgagggggctcagcgccgccgcagccctggccttacccgccagctcgtcaggctccagcccgctgtccgcgtcgatcccgcacagcacgaagtagtgcgcgaagcggcaggcggccggggaggagcccgagcccgggccgggcgccgcgcagctcccgctcatcccggccgcgctgctccaggggccgccgccgccgccgcccgggaaggctttctgcggaggctgccaccaccgctccggctgtggtctgtgcgcccgccctagggcgacactggcgcgcccatggccgcgcagccgcctctcgccgccgcagcctgcctcctcgctcggcgcgggggaagcggccgcgggctcgcgcgcggcgggtccggagcccggccgggtgggggaggggcgcggggggagtgtcggcctgagaggccctcgcagccgcagctgcgctcgcgagctgagagccgccgcgtctggcgcccgcgggtcagctgagcggcgctcgggctgtgggagcgcggggcgggcgggggcgccggggctcggcgcgtgcgacggagaggggtggggggcgcgctcgcgagggacggaggcgcgcgcttctaccgtgcgcgcgcgcctagcgggttcggaggccaagcctggcgtggggccgcattcgtgcccactggccccggctgcggcatcgagggcgaccctgcacacacccctcctcgccctggccagccgataagagggctagcctcagtgtgggggtctgtcttctaaaggggttgtcacccatccttatttcttttaatgcagctttggggaaggtgaacagccgctctgagatcatttcgcataacggtctgaaccatcgtcttttaaactgtgacctgtgtgggggtgcctgtctcactttaaggtcctcccttcccccagccgtcaccccatttacaggccatccttagtgacttagtgacaagtcaaccgtgagggggaaaaaacacaactcaatacccacaaagcgttgagacttctagaaggagtgcagtcaccaacccccgccttctgtcatttatcctgacattttccaggtcagtgtaaatagccaaggcgctccagttccgcagccctgtacccatccgatgttatcggctctccccgcaagtaacaatcggaggctaaagcaacaggaattagaccatgaactctgctcctcccaaaggcacggctttcttgccctgctcagctgtcttttgccttctcggaaggaactcgacaaccagttctttttcctttgaaagaaaactggctgggctcagtggctcacacctgtaatttactcaacactttgggaagcccaggtaggaagatcacatgagaccaggagttcaagaccagcctgggcaatagagggagactctgtctccatctaagtaaaaaaataacatttatttatttaaaaaataattttttaagagacagggtctcactgtattgaccaggctgctctcaaactcctgggttcaagtgatcctcccgccttggcccccaaatgtgctaggattacaggcataataagccactgtgcccggccatgtaagtaaaaataaaacttaaaagatagaaaactgaatgcaattcatctccacatggcaaccccttccacaccactccctgctttcttctttggggatttggggcatctaccactagacatacaagcaaaccttccagagaggttgcctgagagaacctcgattatttgactgaataatgttcttcctagaagatacatgtgcgtgcataccatcatttaatgtagcttgtatcttcactttctttcttcaattttgaaatgaaagaggctggccatggtggctcaggcctgtaatcccagcactttgagaggccaaggcaggaggagcatttgagtccaggaattcaagaccaacctgggcaaaatagtgagagaccctgtctctataaaaataaaatgaggccgggtgcagtggctcaagcctgtaatcccagtcctttcggaggccaaggcgagaggctcacttgaggtcaggagtttgagacaagcctggccaacatggtgaaactccgtctctactaaaaaaaaaaaaaaaaaaaaaaaatcaataaaataataattagtaaaatataagaagaattggccgggtgcagtggctcatgtctgtaatcccagcactttgggaggccaaggcgggcggatcacgaggtcaggagaccgagaccatcttggccaacatggtgaagccctgtctctactaaaaatacaaaaaattagccagtgtggtggcacgcacgtgtggtcccagctactcgggaggctgaggcaggaga

SEQ ID NO: 916138 - DNA, 4001 bp, Homo sapiens
ttctgaaagtggccttcaaatttgtgggttctatttcctccaaataatgcagcatattaatctcttgtcactttattttcctgctcaaaaaatgattaggttggtgcaaaagtaactgcagtttttgccattacttttaatggcaaaaagatatcatttctccttctacggtacttaaatgtcagatgtggtctctactgcagtcacagaatgtaaggtccacgtgaacaaggatcttctgacttattcactactcaggccccagcacctaaaacatcactaggcacacagtaagttctgagaaatatttactgaaaaaatatttacttgcccttttactgtcctgtatcttcagatttttctgaaagtttccaagatgcgaatacatacagcatttacaattcacaaatatttctatattgaaaatgaagaaaaacactcgaaagtgaaaaagatcttgattaaacctaatacatatatcatgattcaaaccaagaagactttcctcactgtcctaccacccaacactccaacctcaccttctcccactccttaacgggccaccctccctatacgatacaccagacaaactcaaagctgctcacttcttcacagacagccatcaagctttttcttacatagtcgtgcgctttgtctgggacgccgttccccaccttctcatccagtccttgccatccttaactcataatcttccaagaagccctcctttgacagctagactagcatacaccttgaggaccttcaggctgaaataacctagttgcacatcctgttacaaatggactgtaagcttcttcaggcagagtagccagacacaaatcacccaggtggggaaactctgttaattcatgcctcctcctccccaggactcctctcccccagtacaaactcaccaaatgaaaaggatggggaagaaagcttaccaaatgtcaaactgttattacaatgcataaaagtatagtgagtaaaagtcattctgtggctaccaacacttgcctccacaataaaggactcgaagtgggtaatcggcatctaacttggcactgttccttgggtctcctttgcagtcagccccgctggattcagaaatgtcagcagccatttcacaaacctgtaagcaaggaaaataacacaccctcactattttagaatcaagaccccagaagagcagtgttcctctcaacagaaacctccccaccccaaagctgtttcaagtctgttgttgagtgggggatacaagctgcattcgattcataaaatatgagcaatcccaggcacaacatctccttgctccacaggtctacagggaagcaagcagcaaatggaccatgaaggatggggcagagggactcactagagaaaaacaggaagcaatggggaaggaaagatggggtgagtacccacggcagacacggagcaaaaaggtctgagggtgatctgggagggatgcaaactgcagtgagagaagggctacaaaggcgccgaatggagagaggctggaagtgcctaggaacaaggggtgggtcatcggagaagcccggggtgcagggtgtgggggcaactaaacgccatgagaggggcctggggagtctaaaaagggcatgggagggggcggggtaaccagagcgtaagaaggatgaggagagaaaacgagcgcagaatgtaagagcactgaggggacaagggcgaccaggtctgaggcgaaggagcaaccccggggacgccagaaggggcccttgtgggcgggggtgtggagaggcccggcccggcccccttccgccaggcagcatctcagcttcccccacactctctacgagcttctcgggagcgggagaagcacttggggtcgttacccaggcggtcgcacaggccccgccggctccgctcccgccgctatcgccagctgaaccaacacatgcaactcgtctccccggccagggccgcccgagcgcccgaccgccagcagcgctcccgcgagacaatgagcctttatcgcgagattccggccgccgctgggcggatgtcgcgagaagccggaagacgggggcggagaaaaattgcggagcgtgcgccttgccctccggtggggggcgtggccaagaggccgagaggcgggccgccggcaggcggtgctcgtcacccgttggagaggatgaatcctcgagatgggcgtgccgaagggaacgtgacttgcagacgcagagagcgcacctgagtcacaaatgactccctattaatgagtccgaggatcatcgcctcggtgtctgcggtgcatcctggagtcctgactaacctccagctactgcataaatcactcccgtgcggggagattgcagccggatagagcgtttggtcgcattttaacaccatgcactgaattaaaggaaggtgttctccctccctccctccctcccttccttctttccttcctctcttcttttctctctctcttcgccggatggagcgtttggttgcgttttaacaccatacactaaattaaaggaattcttttttctttcttttctgttctttcttttctttcttctttctcttctttctgtctctttcttccccttccctccctccctcccttccttccttctttccttccttcctccctcccttccttccttcctccctcccttccttcatccttttctttatgttttgacagggtctcactctgtcacctaggctggatggagtgcagttgcacaaacacggttcactgcagcctcgacctcccaagtagttgggaatacaggcgcgcgttaccacacccagctaatttttaatttgtttatagaggtgggggaatctccctatgctgtccaggctggtctcgaactcccggactcaagggatcctcccgcctccgcctcccaaagtgctgggattacaggcgtgagccaccgcgcccggcctacaattttttttaatgaaaaaaagaaaaatgtaagagtatgggaatatatggggaaaagaaagatcagattgttactgtgtctgtgtagaaagaagtagacataagagactccattttgttctgtgctaagaaaaattcttctgccttgagatgctgttaatctgtaaccctaccaccaaccctgtgcttcctgagacctgtgctgtgtcaactgagggttaaatggattaagggctgtgcaggatgtgctttgttaaacaaatgcttgaaggcagcatgcgccttaagaatcatcaccactccctaatctcaagtacccagagacacaatacactgcagaaggccgcagggacctcttcctaggaaagccaggtattgtccaaggtttctcctcatgtgatagtctgaaatatggcctcgtgggaagggaaagacctgaccattccacagcccgacacctgtaaagggtctgtgctcaggaggattagtaaaagaggaaggaacacctctgtgcagttgagataagaggaaggcatctgtctcctgctcgtccctgggcaatggaatgtctcggtgtaaagcccgattgtatattccatctactgagataggggaaaaccgccttagggctggaggtgggacatactggcagcaatactgctctttaaggcattgagatgtttatgtatatgcacatcaaaagcacagcacttttttctttaccatgtttatgatgcagagacatttgttcacatgttttcctgctgaccttctctctactattataccctattatcctggcacatccccctgtccgggaaatgcctgctaatgatcaataaatactaagggaacttagaggccggtgcgggcacgggtcctccgtatgctgaacgccggtcccctgggcccatttttctttctctacaatttgtctctgtgtctctttcttttccaagcctctcgttccacctgacgagaaatgcccacaggcgtggaggggcaacccaccccttcaggaatagatcttggtttcaagaatagttggatcctg

SEQ ID NO: 916139 - DNA, 4001 bp, Homo sapiens
catgaactcaggatttcaagactagcttgggcaacacagggagactctataaaaaatacaaaaaattagtggggcatggtggcgtgctcctatagtcccagctgctcaggaggctgaggtgggaggatcacttgagccagggaggccgaggctgcagtgagctgtgaccctgccactgcactccagtcagggcaacagagtgagaccctgtctcaattagaaacaaaaacagttggccaggcgcagtggcttaagcctgtaatcccagcactttgggaggctgaggcaggtggaggtcaggagttcaagaccacactggccaacatagtgaaaccccatctctaccaaaaatacaacacaaaaaaatttagctgggcatggtgtcgcacgcctgtaatcccagctacttgggaagctgaggcaggagaattgctagaaccaggaggtggaggttgcggtgagccgagatcacgccattgcactccagcctgggcaagggaaaaaaaacagtctattacctgaaaaaaacagttaaataaattatggtatacccttactatagaatagtagccagccattagaaagaatgaagtagagctatgtttatagtgtgcaaggatctcattaagtagggaaaaagaaaaacccaaaacaaaaattttttaaaaatgagctgagcagaacaacttgtatattattatcctacttaggtaaaaatgaattcccaacctatgtaaaaatgtatgtaaataaatagaaagatctggaagaataaacttcaaacgagtaaccttggggaagaaggattgtaatggtggctgatgaaagaggatgtacccttttaaagtgtacaattcagtgtttctagtacattcacaaagttgtgcagccatcactattatctaatttcagaccattgcatcattccacaaagaaacctatagttcgcagtcattcttcattcttccgtaccccagtaaaattttaattaaaattaaatttaattaaaattaattaaaaaaattaaagaatgataagggaataacttagaacttctagaatgttttttctagatttgcagggggaagtgggtagaatccaagaacttaagctctcttctccaactatgcataaccgcaaaagtatgcccaactatacatatgtttacgataaaatgacagaaataaaaatccaccaccctcaaattccttctgtaacagaagttacccgtctaatcactcaagaaatcttatccccagacattgtgggcagagcggagactgaggaggggaggccagaaagtgatgggcggaggtgggcaggagggtactcgacggggtaggtggaaaatacagcggtacagcctgttttccatagacagtctacctctctaaccttcattaaacaagtaggctagattaaagaaataactcctctagctcaaggaatttgccctctagtacattaaccccttgttgctgtaagtgtagcctagggaccagcagcattggtgccatctggacatgtattagaaacgcagattatcagaccctactcctcaatcagaatttgcactttcacaagatcctagggattcgtatgtatattaaagtttgagaaaaaacgctttcctgcacgctccaagggcacttcaccacagtaacccctaaaaagcctcagtcctgggtcccccagtccagtgcctggtagggcaggaagggggcggggctaggaaatgggcggggccctggaccaatgaggagcagagtcccagccgcctgctcccttcagctgccccctccaccttcactgcacatttggctaggatatacagggctacctgtcctccttttccggcagaagccatctctacggttcctggaacttggcccgttcagccctgggcccggaagctcgttctgactgacaagtctacggaacctcggagtcaaaagaaccgccataagctcgcgcgctggctcctcccctggcaccatagccccgccccacctgacacccggggcggagagaagtactggctccgcctcttccgaaccggcaggaagtgacgtcatgcccccggccggcaggtcttttagtctttttccccctcccttactcttcgtccccggtccctcccctccccacccctttccttctagctccgacgtttgcggccgcgggggcggcggaggatatggagtaaagccagagtcagtggccaggcacgaaggcagagcaggaacagccaggaggcgtttattaggggggcggggggaaagagccccagcaccgcccctcctggaagaaggaagaggtaagtgaccggccgccggcaccgaccgacctccctcaccggcggctctctcgcctgggctcccggagccggcgaggagggaatggaggactcgcgcccgggttaggcctcccagggccgctcaggctggtgggtgttgcctggtgacgggcctgccggcggccggccgggcgatcggcggtcggcgcccgcgcaaagcggggctggacgagcagcgagctccggggagcggatccgagagggccgagtcctcgaaagaggccttgaggcgacgggagacccgggatcgaagtcagctgccggagggagagccccccatgccggctcgagagctcgggtttcggtggtggagaacgtagtacctttcggggacattggacactactctaggaccgggtgagagagttcacctcagttctgaggtccggaatccggtagcctgggtcaccagccagggccctgccgcccgccgtccttctctgacagtagctttagttctggaatggaaggttattgtgtgtgaggtgggtggggcaggggttttgttaagagaaaaaaccccacggttactcctgcagtcttgtttttctaaacgggagaatacggatggaggagggtttagaccgataaagcttgcaaaaacttattggactttgagcacatacctgtgatccgtaattaaggaggccatattatcaaatccaccctctaaggcactcgaggaggctccagacaagctgcttaaaagcgctatgcctgtagtgacttcattggaaggtgtcaactattttttagtacgtcaaactcaggaattatttgtgatgacactttctaaaaacattggatactatgagtgagttttctaagtagcctatctccgttctgaaaaataaatagtttagcaaaaatgctccaaatcagcctgccactgtaaaaccccattatgttctggtgatggcttgaaagtcaggtgcttgaagattccttttggactttgcaggtttgttgttgtttggtttgctgtcttattctttagcacaaatatttttaaaatatttaaaaatgaaatcagctgagtatataaattacttcttgaggcaacattaaactgtaatcataaagaatgcttttgggggattgtgtaaaggaagggaacctaatggaaggtaagggccttcattctctttagatttacattactcacatgcagaaacctattttgtctctaagattcataaatacccagtaaaataaatacaggcacattgtacttctatactgtggaatactttctagacagatcaaccctgttactgggaataactactcatattcacatgtttgaaattcatgatatacctcccttcccccaccccaagaagaaaaatagctcctcttactgtgtttaactccgtgggtagcatcactatccattcctttgtatagaagttgaagtttgacaattcctctgtcgtgcttcatactcagcctctcatgaagtcctgttgattttgcctcttgaatatctcttgactcttgtctgctcttcgtctgtaacagtagtcctgttccaagccaccaccatctctcatcctgactacttccgtagcctcctgattatggtctgcttgcatctactgtggtctcctgtagttttccaaacaagacttagtgactttttcaa

SEQ ID NO: 916140 - DNA, 4001 bp, Homo sapiens
actgcaaataaataaatttaaaaatggttcaattatgttttttgaaagaaaaatttaaaatgtctaagttttgggaaatttagggcacatccttgatgtatgcatagtcacatggtcatattcctgggaatacccaggtaagacaccaccccaaacctgccccatatccaccaccttcaaggatattccaatctaagaaataatgccgttattactaaagaccacgttccagagataggactagagtttaaaacataatcagctagaggacagtgactaaaacaaaatcaaccaggttagtaaatcaactgtctttaaaatgatagatttactctcttaccattcgacaaaaaatccagaacacctcttggaagtgcagactgtttaagtaccagtcacttttaaggagggcgaaaaggacctacctgtatgtgttacatataatttacagccaattttctcaaaattagcccctaaaaccataactccatatactaatactatctatactgaagacttactaggtgtccacaatataccaaactactttacatgtatcctatttaatctcctaacggccttataaggtaactaccactaaaataaccattttacagatgaagaaacttaagcgcaaagttattaatttgtccgaagtcacacaggtaagaagttaaagatcctggatacacagatatccaagctataatacttaaacgagacgcttaaaccttctcttgatcatggttttgctgtttgaattataaatttttcacatgttaagaaatctgaagaaaaattctcttctgccttgggatcctgttgatctgtgaccttatccccaaccctgtgctctctgaaacatgtgctgtgtccactcagggttaaatggattaagggcggtgcaagatgtgctttgttaaacagatgcttgaaggcagcatgctcgttaagagtcatcaccactccctaatcttaagtacccagggacacaaacactgcggaaggccgcagggtcctctgcctaggaaaaccagagacctttgttcacttgtttatcagctgaccttccctccactactgtcctatgaccctgccaaatccccctctgcgagaaacacccaagaatgatcaataaaaaaaaaaaaaaaagaaatctgaactaaggtttcttgccagtatttgaacaatataaaaaaagatgaaaactgggaaataatacaggtactttaacaaatctttgtaactctaaaatcccatgaatctgcagtgttacattttgagcacagacggctgacaacttttccacgagcacggccacttcaaggttacggttaaaattatctacggaaatactgcattaaattacacaagtattctattaaaaggaggagaaagaaggtttttatctgtttttacctgcttgggggttgtttgttttgggttttgttttttgggttgttgggttttccaaccagcgagctagagtgaacgaaaaggcaggaagataataatctaaccctttcctactccttccgcatacaagagtaaaagcttaggtgcaaagacaagcggcgcgaacgtgccgggttcggcctttacttggggtgagggctgaccagacgccactgcttcccgccccagcgaaaacccctcggggacccacagccagggcactgggcggcagcaggccccgcgctagtcccggcggcgctgaacgcgagggagaggggatggggagccccgcgggccccttaccgagctcggtgccccgattgtgcgcggacatggcgcgggcagctccggagctgccggctggtaggcgcccgcctctgcgccgcgcccggcccttcctccttcccgccagctggagcgctcgccccgcccctgcccgctcccggggcggagtcgcgggcccgggctacgaggtctgtaccctaggaatattgctccgcaaggaaatctcgctgctcccctcccccgtcttctccacgaggtaccgaaccggagcgctaagtagctcccggaaataatgctaccaacaccctttaaaaaatactgaagttgccaattgcacgtaataaaaatattcctagaaacttttaactgtaagattatataacaagaaggaagaagatccaagtgcagagctctgcaacttaaggtctgaaatgtcagcagggatcccatatccttgttagggaaaccaaggtgcaatcaagggccccggggcacactgacttttctaatctacacatcatgaaaagaagcagctatgtggcctgaagaaggcaagggcttaggagtcagaagacctggtttcttagccaagctcgggcaataattaaatgtgtgaccctgggcaaattaactgcttttccgagcttcatttttctcatctgtaaaagaagaccttgacaatttcttggttcttcaaaatactatgattctataaaggtaaaatgcttcagcctgatttctctgtgaccaagaggttaaaatcgtcgagtcactccacaatctcaatatagttaacttatctgtactcacgtttagaggcacctctgctatgaaaacagtacagttagttatgatttgtctaccatgagccagttattgtgctaggtgctttcatacatcatatatagatgtatgatagcatttgagtctctgaacaatcctgccaataatgtattttatctccattgctgtaactttagacatcaaagttctgaatagaaaggcatcctggtataggggaaatacagtgagctcaaaatgagctgaacccattaatataccagctcttccatttaataaatgtaacttggcagttctggaaataatagtctgtctacttacctgtaaagtggagatgatcaaaatatgttcaccttgcaaagctgttgaatgtatgcaaggcacctagtacataacatggcatacagtagatacttaaaaaatggaagctgttaatgttattgtcaagttcacacagtaattactgagctgttttaaataggaatagtaatatttgtatactcctctacattgagctttcagccttgtccacacacagccactgttgaatgtttcggatgtgtgtagatcttactcatacatactatagcacttttcttttttatattaaccttgaaaaagagaaaagcaggccctgaaagcctggagctggcctgaaactcacaactggaccatggttttccctggttaaacgtatacaatttcacagcacagcatcagccaaggccattgtgaccacaatgaatcaacaaaaacataatcataatcatgtctgataatagaaaaccatgaatattgttcaaatagcccctatcctagctattatgacttctttaccaatcagttctagcttcactccattcctatgttttagataagaattaagatgcactactatcaccagttcctaccatcatccagtccagatccttccttgaactttccccaaatcacctacgacaggcccaaatcctatgtagtttctaacatcctcttactgagacacctcacattaggtgcccatggcaagcattctcccttgttacaatgtcaataaacacaactttgtccacttgtaggtgtgttactggtggtctctggctggagatcattcacatctctagaagatacaaaggcaatacatgaaattctatttttagaagtaaacacaactccaaaccagattccataccattcattacataaatgtttgtttgtttgtttttaaattgtgatatcctaaattagttgaaaaatcagaattagggcagcctcttaaagcaatgttttagcaatgtatcagtcaagaatttctcaaggactttttctaaaatggacctgttgaatgtattaatctcaaattaatctctgcagtttaaaagtatgttaatttggcaacattaggagagacagcagggatagtatgcaaaaaatgagtttctttcacagagaaatgttcc

SEQ ID NO: 916141 - DNA, 4001 bp, Homo sapiens
cactaaatcttagagctcatggctctctggatctaattttaaacatcaaatactaaaattttaaccaagagataaatattgtttccaaagcctgtgttagtatttaaagtttccttttttcacttaagcgttcattgctcacattccaagtcctttaagtcgaccattactcaggaaatagctatgtctccagaatattgaggctgccccagaggggcaggagccccgaatttgagggcccaggcctgattacctggacttctgaattccttaatcacatcatagactgtatcctcctcctctccctgaccgttgctgctagtaggtagccctcaagagggaatcatttgcttgaagcctcaaaacttattaagcctccacaaacactgaagactgcagtgctacacctggctgagggggttgtgtgtgtgtgtgtgtgtgtgtgtgtgtgtgcgtgtgtgtgtgtgtgtagagggtgtcattgcgtagtataggaggaagttacgatactggcatggttgggggatgtgggcttgtctgtgctgaggctgaagagatgcccagtaatatttgccattcttcctcaggaaggctcatttctcctatcaaggtgaaaagtgagattcagactcaggtattttcagaaacttcccagtgacaggtggggagaggatggggtgggaagttggggacctggaggccaaacaagaacccttctccacccgtgcggcactgtggaggttccgaagaggacttccctccgagtcgggtcccaggaaccgggcttcaccatccctccgaatgagcgggagggatggaggggaaggtctgggaaacgttacccaccgggttcgggcccagccctcccgctgcacccccgcgtcccagcgcagacccttctcgatacccgctccagctgtcacgcttcctccttcccgacccagcagcacgaacgcagcccgtgggtcctcggcttccctacccctgtccttttccgatgggggagggtggggcgctggggggctcgcggggtctctaccttgcttgagagggctcgcggtcgcagctgaagcgccggcgctggagctggagcccgagctgggctggaggggacgggccaggcagacgcggccgcagcggggccgccccgttcctgacgacatagctgcccgccccccaccccagcctgcccgccgcgcccgcgcccggcgcccccgactctgggaacttcgaagttggagaggcccgtttctaggtttccagttcaccataacctgctccaccctccctcgaatatgtccggggctttggacacattttctccatttgctgcgctcctcatcttcttcccgcgccggcggcagctctgcttctattttcccttctttctaatcactcacagcctctcccttcatcccaaacctgggagaccaagataccgggcgggccgctaacagaacagctcggcagttgggcacccaaccaacgtctcattctctcctgattgctgccatcctgaacttccctaaccaactcccttccatccaccactgacttcacactcaggagatcccacgggggcaagcccagagtcccaaactccacaacctgaccaaacacctccctcccgccccgggctctaccctgcttgagacaatctccccaccttcttcacgttcctctttccttttagacctattttccccagtctaaggacacctcctgtcaagactcatgttctctccttaattctagggtggagttttgcactttggtctatgtccaccctttctccacgccctcatcctcccactttacctgctggtcttggcaggtggcacagaaggccctggccaaaagtagggagtgaaaggtcctttcagcttcccctgcctggagtctcttctagagtcattaaggctcttggggtcgcatggatggtggtgaaggtggtacagcaagggagagagatggaggcctagggactcactggcaggaactggagacccaggcatcctgctcactggccccgccccaacccctgtctaactccctcctacccttcattgaaaatggggcagagtaacaaagccttaggttcctggaatcgtccttcttacacctgggggtgggaagaagggggaggggagacctctgactagaagggtatatgcatgtgtgggtattgtgtatgcatacatacacacacataatatatacatacttttggtgggggttggaaagggaatgaatacatgaggccctctagtggaaacagggatatctaagcagttcttgattgtttcaagacaggcttgttggaacagactcctccacatttgccagaaatatagctgctgagtaatagggtttgggagtattgttgtatccaaactggagatttcgggcataggttgaagaggggtctgtctctctgctcctgtgcccctccaagtctcaccctctcacccccaatcataaaaagacaagggccaaaggccgggcgcggtggctcacacctgtaatcccagcactttggcaggctgaggcaggcggatcacgagatcaggagattgagaccatcctggctaacacggtgaaaacctgtctctactaaaaatacaaaaaattagccgggcgtggtggcacatgcctgtagtcccagttactcgcgaggctgaggcaggagaatcgcttgaacctgggaggcagaggttgcagtgagccgagatcatgccactgcactccagcctgggtgacacgagcaaaactctgtctaaaaaaaaaaaaaaaaaaaaaaaaaaacaaggcccttgacactccccatcctgtctttacagtattttcttcactgttagcaaagcttcatctctccttcctctatgacctccttagtcatagtaaacaaactcttctgaaggccttttatacactaagtcctgtacttagttctgcaatacaagcaaaaacatagtccagtttagggactatatcaatgagtggtgcaatgtgtgtaaagcctctctgctctgagctactttaaacaaacatacaatgtaagaataggtcccctaacacctctgcctatcagttttctgtccctggatctttcatttagaaatcttggaacgatattaatctctaaggcactcagctttccttgcaaagaatgctcaaagtaatgccaccctatgtattacctgtgtttctcactctatcgtctttagatatgtccctaaataaagttgaagacactccttttaagatagtttttggtacttcaaagtggggtgtaatgttatctctcgaataaggaataaggtggaatcagtcttactctagacttctttgtgtcttctttaggatctgtgctccatcataccccaagtcagttactggggggtgtgggtgggggaagaaaagccaagaaacatctaagaaggaggcgtttaatgcctacggttccaggtgctcatttctttaatcaaccacatcataaaaatcagaaagaaagaaaccgcaatgaacaaagggaaaggaaaaaacaacagcctgttctccccggccttttttgccctgttcctcctcagggtggggggccacatccggggccccgggttgggtcccaggcaggtctactaagcagacaattgagtttcacttcctgtcaaccctagtgctgaggcaggatgtctgggggtgggaagggggcctagggttggtagtgaacaggggcgactttaggtttccctcctgcacaaaggtctattgagcagcctctgaaagctgcagagaccactcctgaggtagttcagtcaagaccaacgtatcccattagttcttagaggcttcatcccacactctcacgtctaatcataacaaggttaaggacaagatgttagaccctgcagggctgaagtacaatcggtgaaaagagagcaagggtttaagaccacagtgtcacaacacttgcaataacagtgtatcgtatgcaaatactt

SEQ ID NO: 916142 - DNA, 4001 bp, Homo sapiens
tcatttcatctccctgagcctcagttttctcatcagtaaagtgggcacctacagaaatcagtcgcaatgtgggcattaaataagatgatatatgcaatgtacttagcaaacagcatggcacagaataagaactcaatgaacatcagctattatcattattacacaagggtagtacctagagaaacatttctggagattaggaaaaatgatgtctttgaaccaggaaggcataaatttcagggactgctagcatcagtgaagcccagttgtacgtcttaccccttgttattaatatatctgtcaggtgcaaacatgtagtatcaggattctgaactttgcctctgggaggatgacgaggtggctagagctagactctcagggttcaaggacacccctgggctggaatcttggaaacgagtgctcctgggatcttttcagtggttttcttgacttctctgactgaaagtttagctatccctggagctgaagggcagcaaactgtgggatcctggggacttgaagacctagaacaagtccattttttttcctccaggtccatcccaaccctgaggctataacctgggctagtctaggcgaaggccagggctgggagggtggggtctgctgccagcctgccagctatttgtgactcacccttcccttccctcctctggtttccctgcccgcccctacccaattggggcgagaaaggaagaagttgacttggaggcagagaatcttagaacatccacagagctgggagtcaccaaccctcgtattttacagaggaggaaattgaggcatagagagagaattactctcttaagggcacagtcagactctagacacccatccttagtacattccactaaatcttagagctcatggctctctggatctaattttaaacatcaaatactaaaattttaaccaagagataaatattgtttccaaagcctgtgttagtatttaaagtttccttttttcacttaagcgttcattgctcacattccaagtcctttaagtcgaccattactcaggaaatagctatgtctccagaatattgaggctgccccagaggggcaggagccccgaatttgagggcccaggcctgattacctggacttctgaattccttaatcacatcatagactgtatcctcctcctctccctgaccgttgctgctagtaggtagccctcaagagggaatcatttgcttgaagcctcaaaacttattaagcctccacaaacactgaagactgcagtgctacacctggctgagggggttgtgtgtgtgtgtgtgtgtgtgtgtgtgtgtgcgtgtgtgtgtgtgtgtagagggtgtcattgcgtagtataggaggaagttacgatactggcatggttgggggatgtgggcttgtctgtgctgaggctgaagagatgcccagtaatatttgccattcttcctcaggaaggctcatttctcctatcaaggtgaaaagtgagattcagactcaggtattttcagaaacttcccagtgacaggtggggagaggatggggtgggaagttggggacctggaggccaaacaagaacccttctccacccgtgcggcactgtggaggttccgaagaggacttccctccgagtcgggtcccaggaaccgggcttcaccatccctccgaatgagcgggagggatggaggggaaggtctgggaaacgttacccaccgggttcgggcccagccctcccgctgcacccccgcgtcccagcgcagacccttctcgatacccgctccagctgtcacgcttcctccttcccgacccagcagcacgaacgcagcccgtgggtcctcggcttccctacccctgtccttttccgatgggggagggtggggcgctggggggctcgcggggtctctaccttgcttgagagggctcgcggtcgcagctgaagcgccggcgctggagctggagcccgagctgggctggaggggacgggccaggcagacgcggccgcagcggggccgccccgttcctgacgacatagctgcccgccccccaccccagcctgcccgccgcgcccgcgcccggcgcccccgactctgggaacttcgaagttggagaggcccgtttctaggtttccagttcaccataacctgctccaccctccctcgaatatgtccggggctttggacacattttctccatttgctgcgctcctcatcttcttcccgcgccggcggcagctctgcttctattttcccttctttctaatcactcacagcctctcccttcatcccaaacctgggagaccaagataccgggcgggccgctaacagaacagctcggcagttgggcacccaaccaacgtctcattctctcctgattgctgccatcctgaacttccctaaccaactcccttccatccaccactgacttcacactcaggagatcccacgggggcaagcccagagtcccaaactccacaacctgaccaaacacctccctcccgccccgggctctaccctgcttgagacaatctccccaccttcttcacgttcctctttccttttagacctattttccccagtctaaggacacctcctgtcaagactcatgttctctccttaattctagggtggagttttgcactttggtctatgtccaccctttctccacgccctcatcctcccactttacctgctggtcttggcaggtggcacagaaggccctggccaaaagtagggagtgaaaggtcctttcagcttcccctgcctggagtctcttctagagtcattaaggctcttggggtcgcatggatggtggtgaaggtggtacagcaagggagagagatggaggcctagggactcactggcaggaactggagacccaggcatcctgctcactggccccgccccaacccctgtctaactccctcctacccttcattgaaaatggggcagagtaacaaagccttaggttcctggaatcgtccttcttacacctgggggtgggaagaagggggaggggagacctctgactagaagggtatatgcatgtgtgggtattgtgtatgcatacatacacacacataatatatacatacttttggtgggggttggaaagggaatgaatacatgaggccctctagtggaaacagggatatctaagcagttcttgattgtttcaagacaggcttgttggaacagactcctccacatttgccagaaatatagctgctgagtaatagggtttgggagtattgttgtatccaaactggagatttcgggcataggttgaagaggggtctgtctctctgctcctgtgcccctccaagtctcaccctctcacccccaatcataaaaagacaagggccaaaggccgggcgcggtggctcacacctgtaatcccagcactttggcaggctgaggcaggcggatcacgagatcaggagattgagaccatcctggctaacacggtgaaaacctgtctctactaaaaatacaaaaaattagccgggcgtggtggcacatgcctgtagtcccagttactcgcgaggctgaggcaggagaatcgcttgaacctgggaggcagaggttgcagtgagccgagatcatgccactgcactccagcctgggtgacacgagcaaaactctgtctaaaaaaaaaaaaaaaaaaaaaaaaaaacaaggcccttgacactccccatcctgtctttacagtattttcttcactgttagcaaagcttcatctctccttcctctatgacctccttagtcatagtaaacaaactcttctgaaggccttttatacactaagtcctgtacttagttctgcaatacaagcaaaaacatagtccagtttagggactatatcaatgagtggtgcaatgtgtgtaaagcctctctgctctgagctactttaaacaaacatacaatgtaagaataggtcccctaacacctctgcctatcagttttctgtccctggatctttcatttagaaatcttggaacgatat

SEQ ID NO: 916143 - DNA, 4001 bp, Homo sapiens
tctgctgcaggtggcaaccagaggaaagggccacaatgttccacggccaaggaggaaagaaggaatgccccttttcccatctctaggtaggaggaaggcttcagggcagaagcaaaaggaattatttcttccctggacaggttttcctaacaaagtaacctggaaaactatggcaattaatcagaggaaatccgtacccctccctctccccccacctccccactccatacacaattaggtggtgtaatggaaagtatatagggcttagaatcaggagtcctgaattctagtcccagccatgccactttaaattgtgagagtttaaattgcttttcctcctgggggaagtccagctctcagatgtaaaatgagggtggcagtgggggtggggagggttggaggaatgtcatctctcaagttttctttcagttctaacattcaagatcactggccaggctggatgaagtggctcacacctgtaatccagcactttgggaggccgaggtgggaggatcccttgagctcaggagttcaagactagcctaggcaacatggcaagaccccgtctctacaaaaaataaaaaataaatcactcgccagaggtggtccttctcttccacctcactctaggtggttccaatgctcaaaaatggtagttgaatttatcctaattatgtaattccaaggaaagcccctgagataggcagagcttggaagacttaggagccctctgattctcaggtgggtccatctgttattctcactgaggattactttttaaccccaagattatcgtttagaccctaggatagccctagaatagaccctagaatagatgtgtcctggttctaggacacgtttcccatgccaaaagcaatgtctgcccagcccctcctcaggtagatggtctggtgacctgacccttggccacccctgtcccagcccttttcagtctcttcttttcggcccacagagcttttctacaatcaggtcaggagccaggcttctgtctgctacctagccagctcctggcccccagctcaccccagcccttcctgcctggctgggtggctgacccccggtccacgcctcagccatttcccgtctcgcctgccgccatcctcctttccccgccctcgctgcctctaccagcttcactctcactagtcagtccctcctcccctccccatcccagactattctagtcgggagccgtcctaattactctgtccagactgcaaggatttttcccccccctggggctggtgacaagggaaatctctaaggctaaactctctgtaggtgaagctggactcacccacctgggctgccataggaaaacggaggagctggcagtgccccggcgcaggtagggagaggccctccttacctcggtcatcaggcggtcggctccactgttctcctcatccttgaagatgatgtcggggttgtagttgggcacgaggtcccggaagcgctcggagccccttgccaccctcccctccgctggcccactggcgcccagggtccgctctggcacgccgggcacaaattgcttgtagagtagcggcacgagctgcttgcgcgcatagcggcgccggccaaccggcccccggcccggcccgcagctctgggctggcagcgccagaagtgccaagcagcacaggggcagtagattggtcaggagagccatggatacagcggacctcggccaaaagggagcgttcttgtcctcactaactctcctgtcagttaggcatctccacaggcaccagagagggcagcaggcacagctgcccccagagtgccctagagctcttgtggctccgtgcacctggctgctgctagctctgcccacgtgccccgggagcgggcggggggtgtctaggacctgctactgacaaaccatcatagcagggaaggggggtcgtgggtgagtgccagcccagcccgtctctgctgcaggactctggtgctgccagaacgcccggactccggactccgccttaagtggcccctggccccgccctccgcccttctcccaagaccgtcccaccccctcccacccgggcgggggatctagccggtcactgctggtccattttgcgactgaagtgtgtcccatcctggaaaccaggcagacacctgcctaggaaatacttgtagctttacagtccttggctgcctaaacatccttctacctccaagcttaaacttggaaccaaaccaccctcctctgatacttgaattggaatttttactctctcaaagcctaccctggcaggccatgccctccgctgtcatccaggaagtatgggttccaatttctgcccaagaccagccaagccctttgggcatacaaccagagcctcccttctctgtagtcctccccagatctccccgacttccatctctcctcacattcagcattaagcaggactgggaggtgaggataccaggggcccatttctctactaactttgcagtctcctttggaacttccccagaaccaggaacagagcttggtacttattgtctcatttaggacttccaacttttttccccttctcttctttgccaggcatctaatagctgctgtttttcaaatgaatgacttctcagttggaagctgctgaagggcagtggacactcaaaagtctttgtaagaggtgaggatcacttcccttaaccgtccatctaggcacctctccagctttctccctctctggactcccggggctccattttcagccactcagatctcatctcagaggcaccacgtccaatttcttttgtttagaagtcatttcttctaagaagccttccttgatgtcccaacactgcccacctgtgttccctcgagaaccattacttaactgcagtgttagaacagtattagaattatctggcaccttactagacaaagcaatcttaagcacacacatatttatcatgtatctccaaggttaagtgcctactctacagaagggtgctttgcaagcatttgtggaatctacactttgtgtttcatattcaccctcccctcaccacactctatggctagtactcatagcaactttgtgtacatcagaaaaaaccaggccaggcacagtggctcactcctgtaatcccaacactttgggggcgaggcaaggactgcttgaggccatgagttgaagaccaacttggtcaacatagtgacaccccgtttcaaaaaaaaaaaattaattagtgggaggtagtggtacatgcctgtagtcttaggtactcaggaggctgaggaaggaggatcacttgggtgcaagagttcaaggctgtagagtgagctaagatcatgccactgcactctaacctgggtgacagagtgaggacccccccccccaaaaaaaagatggctgggtgttgtggctaacccctgtaattccatcatttggggagtccaaggtaggtggatcacttgagctcaggagttcaagaccagcccaggcaacatggcaaaaccccatctctactaaaaatacaaaaattagccaggcatggtagcatgtgtctgttgtcctagctattctggagcctgagctggaagaatggcttgagcccagaatgcggaggttgcagtgagctgagattgcaccactgcactccagccagggtgatagagccagaccttgtctcacaaaaaaaaaaaaaaaaaaaagaagaagaaaaaagaaaaaaaaagcaccccttcctcaagatgactgacatttattagaaaactatcatagtaactatccacacaatgactatgaggtgaatggtgtccctggaagctgtgcaatacacaatctgtataagcctaagttttgcgctcttactcccaacatagcacatgggcttttcaagaaactgatggcctctagtaaaaagctagattcttctctcaggtaggaaatgaaaatccttgtcagccagccacttattttactctatatccaatagttaagccagggaggataggg

SEQ ID NO: 916144 - DNA, 4001 bp, Homo sapiens
cacctgaggccaggagttggggaccagcctggccaacatggcaaaatcccgtctctacaaaaaatacaaaaactagccaggtgtgatggcatgcacctataatcccagctacacaggaggctgaggcacgagaactgcttgaacccgggaggtggaggttgcagtgagcagagatcacgccactgcactccagcctaggcgacagagcaaggctccatctcaaataaataaataaataaaagaaggtaatctgagtcatgttcttatgagattcctctggcccctgagaaaggcagggatacatggaaatgtcctgttctgatgtgagaaacaactttccccaaatctctgggtctgagagacctcagcccctctgctcaggtggtccagttccaagtgtcagcccagtgtctacggctgtctttgaggtgccatcctgaattgtcactgccatcataacggttgtcacctgtcctgggacacaccccacctctgtaacctttctttacttttcaaagcaacatattttcccaaattaccatctccaaaactctgataggaggtaagacggctactacaggttaaatatccctttccagaaatgctaggaaccagacctgttttagctttaggaacatctgtattctattcactggttgagcatccctaatctaaaaatttgaaatctggaatgctccaatgagcatttccttaagtgtcatgttgacactcaaaaacttttgaattttggagtattttggattaaggctgctcaacgtgtgctactggtcccattctgcagatgtgaaaacgaaggcacagagatgttaggggatctgcctcaactcccagcctgtctgtggaacttttttttttttttttttttttttgagatggagtctcgctctctcacccaggctagagtacagtggtgcgatcttggctcactgcaacctccgtatcctgggttcaagccattctcctgcctcagcctcccaagtagctgggactacaggtgcccaccaccacgcctcctctgctctaaatgctcccatggctgccctctcccgtagagaaaaagccccagtcctcgccaagactgcagtccaggcccgacctgccctggccccctgttttttctctcatctccaggcagccactcaggtctccttcagatcttgactctaacagagtgatgtcttctccagcaactctatgggatgctgcaacccacccaatggcctcttctgttttatctgctcactatagccgcataaatttctatatgtttattctttgcctgtctcctcctatacagcaggtaaactcagggattttctaaaaatctccctttctgctatgtctccagtgcctagaatagtgcctggcatgtaataagggctactcctaaaaaggggtctgagagaaatgtcagccagcctggagctgagcagacaagactgggctgaaaatacacatttgggggtcgctggagattataaagagattataatcgaagtcatgggaagggatggaactactcctgttttttttgccaaattctccatgttactatttgagggcgagagaaatcccgggtattccatatacactgttaaaactaggctgtcactaagcccctctcctttggatcatctggaatggggggacccattcccccattccagatgatccatcccacccctctgggatccccacccgagagtcctgaaggcagggcacaggccgccctgggaaatctccgaaatccagccccggtccggggatgtcttaccctccagttccagctgcacggggggcggctcgggggggcccttcgagggtccggggcccgcctgctggcgccccttgatgttgtagcgccggcgcagcttccccatggcgactaggccagggtgggcgctccagcggccggaccagcagagcaatccgaaacccagcccacgtgggttcccagaccaccaactccggccgtgagacttccgggttgtgttatcgcgagaactgtaactgactttgccgctgaggggcggggttgcaagagaaacccagcgaagaggagaggcggagccgggccgggcagggggcgggactatttagagaagtaggcggggcctgaggtcccagcggaggccggagtttaagtcctgggctgttctcgcttggggtagtctgggtttaaatatgaattatatctactgatactaatttggcttcttgggagtggaagtgttttgccaccttttaaaatataccccgcccccagtactccaaacttcttccccccaaccctggtttgcgcatctgtattttctgatattcctacaagaaacgtattagtcgtgtacttttaaaaaggcaccaaatatttccatcacagggatagatggaagatctaaaaggaggcctctacgggcgcggtggctcacgcctgtaatcccagcacttttggaggccgaggcgggcggatcacgaggtcaggatttcaagaccagcctggccaagatggtgaaacccccgtctctaccaaaaatacaaaaaaaatttagctaggcctggtggcaggcgtctgtaatcccagctacttgggaggctgaggcagagaattgattgaacccgggaggtggacgttgcagtgagccgagactgcaccactgcacttcagcctgggcaacagagctagactctgtctcaaaaaaaaaaaaataaagttgtctattacataactttaaattcccattaccgcatcacattgtaacacactgggaaacaatgcattattattattattgagacaaggtctggctttgttgcccaggctggagtgtagtggagcaatctcggctcactgcaacctctgcctcccgggtttaaacgattctcctgcctcagccttccgagtagctgggactacaggtgcccgccaccacccccagctagtttttgtattttagtagagacggagtttcaccatgttggccaggctggtctcaaactcctgacctcgtgatctgcctgcctgggcctcccaaagtgctgggattacaggcatgagccaccgcgcccgacttttttttttttttttttaagagatgagatctcgccctgtgggccaggccagagtgcagtggtgcaatcaccactcgctgcagccttgacctgtcctcccacctcagcctcctgagtagttatgactacaggcacacaccaccacgacgggctaatttttctatttttttgtagagatggtgtctccctatgttgcttagactggtctcaaaattctgggctcaagggatccgtttgtctcggcctcccaaagtgccggaattacaggcataagccactgtgaaggccttaatgaatgacgtttaaaaaaatcataattagcgtatcaaatctatggggttttttgtttgtttgcttgtttttgtttttttgagacagaactctccctctgacgcccaggctggagtgtagtggagcagtctcggctcactgcaacctccacctctcgggttcaagcgattctcctgtctcagccttccaagtagctgggattacaggcacccaccaagatgcccatctaatttttgtatttttagtagagatggggtctcaccatgttggccaggatggtctcaaactcctgacatcaagtgatcggcccaccttggcctctcaaaatgatgagattacgggcctgagccactgcacccaggctcaaatctgtgtttttatggattttgttgctcaggatgatagtgatctaaagtttcttctttaaatatgtttatttaaataaattaaaagtttaagaaacgtttaaaaaatgttaagtaggtagtagtacacttgcctatatttccttctaaaatataatatatcagtgaattaccttccagaaggtatagaccattctagacagcaagaagaaggcagatacataacagcatggatggatctcacaaatataaagt

SEQ ID NO: 916145 - DNA, 4001 bp, Homo sapiens
ccatggtcttatcaattctgagaaacaccgcttcttaaagttagccacaacaggaacacacaaacactgtctgtacctggaagtagaagtcagatttcataaggcacgaccgccaatctgtaacaggctcttggatttacttgcaggggctgtaaactcaaactcgagccaagcaggaacctaaatgaggatgcaggacagctgaggggttttgaaattttcaacatacaccaagtttaaaatgttgcctcaggcagggtgttggtggctcacgcctgtaatcctagcacttggaaggccaagggcaaggcgggaggatcacttgagcccaggagttcacgaccagcctgggcaacatggctggcaacatgaccccgtgtctattaaaaaaaaataagtaaataaaggccgaggcgggtggatcacttgaggtcaggaattcgaaatctgcctgaccaacatggtgaaaccccatctctacttaaaacacaaaaattagcccggagtggtggcacgctcctgtaatcccagctactcgggaggctgaggcaggagaatcgcttgaacctgggaggcagaggttgcagtgagccgagagcgccccactgcacttcagcctgggcaacagagcgagactgagtctcaaacaaaacaaaaagaaaaaaaaaaattagccgggcgtggtggcgggcgcctgcaatcccagctactcgggaggctgaggctgagaatcgcttgaagccgggaggcacaggttgcagtgagctgagatctcgccactgcactccagcctgggcgacagaggcagatcttgtctcaaaaaaattaaaataaaataaaatgttgcctttaaactttttagaaacggatgccacaataaccgctcctgcaggcagaatttagctctggacccctggcctgggtgccagttgtgtgtgacggtcccgctacaatcgcccaggagcctgcagcgctaggtagagagccctgcgccagctcccccggccccttctgccctcgggaggacgtcttcagacgctcgtctcccttcccggactccccccatgccgtgtccctcctcctctccacgtctcctcagggacttcgagtggctgacgagggctggtcaggaggcggagcagccccaagaaggcagcccggggtctcggggactcgtttctagaagatggacgaactgaaaaggaagccgggcttgacccagggggcggaggcggggctgtcctcagtcctcccgaccggagcgagacgccgcgacccagctgggcggacgagagatgagcgcgtaaggaaggcgggcgccgtgggccgggccacagcgctgtccgcgtcggtccctccctctggtcctgtcccctctacgcggccgcagcggtacctgaagaatgaagttacgctgcgcgacagccaactcttcagagccgccattgtgcagcgcgcggacgccagacgcacacgccggaagtgacgcagcttcgtgagcgcggagcggggcacggcctccacctgagagcgcctcgccccatagccacgcccccacccaaggaagcagtcgggattgggcaggcagggggaaagggggcgaggcttagggcaaaggctgtaacggccgcgcaaggcaaccaaccgccggaacttccgcgcggggcggggcatatgcagggcctgagggcgcggaggtgggtccggcgcggagctgagtcgggcgccgtgacgctggcgggtgggcggggactcagttcgggccagggcttgaagggaatttcctggtgagttagggaggcggggccgggcgggaggcggggccgggcgggaggcggggccgggcgcggcgacggcgctgtcacttcagcaccaggaagtaagtggtccagccggccagcagcagcgccccgatgagcaccgtgtagctgaggagcacgaaggcgagcagctcccgcagcagctgcagcacgtggacggtggacgaggccggcatcgcgctgcgcgggagccccaggacggtcggcggcctgccgggctggcgccgtcccagaggggcggacgggaacacacgaggtcctggccctcgaaacagcaaacgaaggccaggaagcccacagtgccgacctccccaacagcctcctggacgctcgcttctcggttacactggagaatccttctcaacccaaactgccctcgttcttcggctctgatccgggctgaggaggcagaagcccggctcttccccgcgccccgcagctgcatgagttttcctccctggcccgctcctcccaccacctcctgcatttttaatgctgtgagtgccgctaatgcgctggtggagtaaacctttcttttcccgtcactcaagctgcagccccagctgcggccctggctggaaggggaaggggagagagacccatttgggcaggaggaaggcacaggcccaaacctgctcttctgtgagtcccctggccccaaggcttgccagcagcagagctggaggatctttgctttgtggtccagcatgcttgccttctggccagctgggactgcagggtgccaggtggtgggtgggcatcaatccgatcctgggctcacccccgccaccgtgctctgtgcatctgccccagccctgctaacttccaccagagacgacatcagacagtaagaaccccacaccagctcatcagacagtaggaaccctacaacacctccaatgctgctttgcccagccactccccacagtgtcaggcactggcttccttctctccccacctcacttacttggcaaagtttccacgaatcttccaccctgaagctccgcggttctgtctgctctggtgcccaaaggtagcttgtgtgtattctgcgatctcggcagaactgagattttcaagcagcggcactcaacaactaggtgtggtctagagaccaattacaacctccgcgtggtccccgagctctcagggagctgcgcacaggcgttcctagcccaggcggggcgctggcaaccctgcccgccctctgcctgtgtcgccaccacagcccacagggctcagatgtggtttcacagacccagatgggctgagcaggcggcacactagtgggtatttcaagccccttcttgtttttttctgaacattgtaaggggttatggggttatagtgcgaacagtttcgtttctaacaaacacattgagagcagtcccatctcctccgagtctgggcaccagaagaaccactggacagtgttcacttgcgaccgcccaactactaaagcaaaagctgttgtcttaaaaaacatgcaagtgcaagcatgcacgggtgtgagaaccaagcttaagtgaccgagatctcctgagtgcttgattccgatttacaaagagttttgcagcttacagactcattatacagatactttcccaatgtgacacttccaatttcacctcctcacaatgtgaggcaaaaggagccagtgaggatttctgcaaagaacagacactttcccagatgcaacaacaaaggaaacgaaagcataaactatgctgcttctgattattttgctcgttgccgtagtttttagttcaagactgttttctgacctttgaaaagagcaggcagtgtggacatcaacccttttatcaacatcatcatccagaagcaaatggctccttaatttaatcaggatctcttattatcaaattattgccttggccacagtgaggctgaaaacaggagcagaacattatcaagctgctcaggaagccagtgagtagtaattactcccccagagaactggtcatcttccgtgtcctacctagtggcaacggagtacagctgagatttataccctcctccacaccaaaataatggatgaaacagacaggctattaaaaataggcctgattctgttcccttttaaccctcacatccttcaaatggatgtctccaggcagttaagtgttctagcctttgcggccccttgttaccgcctgattt

SEQ ID NO: 916146 - DNA, 4001 bp, Homo sapiens
agagcagtggtgagatcatagctcactgcagcctcaaactcctgggctcaagtgatcttcctgcctcagcctcctgagtagttgccactagaagtgtgagccaccacacccggctaaatttttctgttttgtagagacagagtctccctatgttgactaggctggtctcaaactcctgagctcaagccatcctcccacctcagcctcccaaagccctgggcatcagccactgtgcccggccctgttttcttcccaccatttatcaccagctgatattttatattttatcctctttcatctccacaaagcttttgtgagaacaagaattttttgttgttcattcttacattctcagtgtcttgcacataaaagttgctcaataaatttctgttgaatcaaagactactttgttgatagactgtaatatcctcttatttctctctactcgctttatacaatttgatgtgctgttcctaccaaatgagataatcaaaatgagaatattaatatatctgctcaactgtgaaaagatgccggtactgtgggggaagggatgggagcactgggaaaaactatggtagcttgtctaatgcttcaccgcccacttgagacttcaagaggacacggtacactagataagaatcactgcacacgacagtacctgtgcaataggaaccgcacacagggttactccaaagccaatcgtcacagttttgtgccatggtcttatcaattctgagaaacaccgcttcttaaagttagccacaacaggaacacacaaacactgtctgtacctggaagtagaagtcagatttcataaggcacgaccgccaatctgtaacaggctcttggatttacttgcaggggctgtaaactcaaactcgagccaagcaggaacctaaatgaggatgcaggacagctgaggggttttgaaattttcaacatacaccaagtttaaaatgttgcctcaggcagggtgttggtggctcacgcctgtaatcctagcacttggaaggccaagggcaaggcgggaggatcacttgagcccaggagttcacgaccagcctgggcaacatggctggcaacatgaccccgtgtctattaaaaaaaaataagtaaataaaggccgaggcgggtggatcacttgaggtcaggaattcgaaatctgcctgaccaacatggtgaaaccccatctctacttaaaacacaaaaattagcccggagtggtggcacgctcctgtaatcccagctactcgggaggctgaggcaggagaatcgcttgaacctgggaggcagaggttgcagtgagccgagagcgccccactgcacttcagcctgggcaacagagcgagactgagtctcaaacaaaacaaaaagaaaaaaaaaaattagccgggcgtggtggcgggcgcctgcaatcccagctactcgggaggctgaggctgagaatcgcttgaagccgggaggcacaggttgcagtgagctgagatctcgccactgcactccagcctgggcgacagaggcagatcttgtctcaaaaaaattaaaataaaataaaatgttgcctttaaactttttagaaacggatgccacaataaccgctcctgcaggcagaatttagctctggacccctggcctgggtgccagttgtgtgtgacggtcccgctacaatcgcccaggagcctgcagcgctaggtagagagccctgcgccagctcccccggccccttctgccctcgggaggacgtcttcagacgctcgtctcccttcccggactccccccatgccgtgtccctcctcctctccacgtctcctcagggacttcgagtggctgacgagggctggtcaggaggcggagcagccccaagaaggcagcccggggtctcggggactcgtttctagaagatggacgaactgaaaaggaagccgggcttgacccagggggcggaggcggggctgtcctcagtcctcccgaccggagcgagacgccgcgacccagctgggcggacgagagatgagcgcgtaaggaaggcgggcgccgtgggccgggccacagcgctgtccgcgtcggtccctccctctggtcctgtcccctctacgcggccgcagcggtacctgaagaatgaagttacgctgcgcgacagccaactcttcagagccgccattgtgcagcgcgcggacgccagacgcacacgccggaagtgacgcagcttcgtgagcgcggagcggggcacggcctccacctgagagcgcctcgccccatagccacgcccccacccaaggaagcagtcgggattgggcaggcagggggaaagggggcgaggcttagggcaaaggctgtaacggccgcgcaaggcaaccaaccgccggaacttccgcgcggggcggggcatatgcagggcctgagggcgcggaggtgggtccggcgcggagctgagtcgggcgccgtgacgctggcgggtgggcggggactcagttcgggccagggcttgaagggaatttcctggtgagttagggaggcggggccgggcgggaggcggggccgggcgggaggcggggccgggcgcggcgacggcgctgtcacttcagcaccaggaagtaagtggtccagccggccagcagcagcgccccgatgagcaccgtgtagctgaggagcacgaaggcgagcagctcccgcagcagctgcagcacgtggacggtggacgaggccggcatcgcgctgcgcgggagccccaggacggtcggcggcctgccgggctggcgccgtcccagaggggcggacgggaacacacgaggtcctggccctcgaaacagcaaacgaaggccaggaagcccacagtgccgacctccccaacagcctcctggacgctcgcttctcggttacactggagaatccttctcaacccaaactgccctcgttcttcggctctgatccgggctgaggaggcagaagcccggctcttccccgcgccccgcagctgcatgagttttcctccctggcccgctcctcccaccacctcctgcatttttaatgctgtgagtgccgctaatgcgctggtggagtaaacctttcttttcccgtcactcaagctgcagccccagctgcggccctggctggaaggggaaggggagagagacccatttgggcaggaggaaggcacaggcccaaacctgctcttctgtgagtcccctggccccaaggcttgccagcagcagagctggaggatctttgctttgtggtccagcatgcttgccttctggccagctgggactgcagggtgccaggtggtgggtgggcatcaatccgatcctgggctcacccccgccaccgtgctctgtgcatctgccccagccctgctaacttccaccagagacgacatcagacagtaagaaccccacaccagctcatcagacagtaggaaccctacaacacctccaatgctgctttgcccagccactccccacagtgtcaggcactggcttccttctctccccacctcacttacttggcaaagtttccacgaatcttccaccctgaagctccgcggttctgtctgctctggtgcccaaaggtagcttgtgtgtattctgcgatctcggcagaactgagattttcaagcagcggcactcaacaactaggtgtggtctagagaccaattacaacctccgcgtggtccccgagctctcagggagctgcgcacaggcgttcctagcccaggcggggcgctggcaaccctgcccgccctctgcctgtgtcgccaccacagcccacagggctcagatgtggtttcacagacccagatgggctgagcaggcggcacactagtgggtatttcaagccccttcttgtttttttctgaacattgtaaggggttatggggttatagtgcgaacagtttcgtttctaacaaacacattgagagcagtcccatctcctccgagtctgggcaccagaagaaccactggacagtgttcacttgcgaccgcccaactactaaagca

SEQ ID NO: 916147 - DNA, 4001 bp, Homo sapiens
tgcagcgctaggtagagagccctgcgccagctcccccggccccttctgccctcgggaggacgtcttcagacgctcgtctcccttcccggactccccccatgccgtgtccctcctcctctccacgtctcctcagggacttcgagtggctgacgagggctggtcaggaggcggagcagccccaagaaggcagcccggggtctcggggactcgtttctagaagatggacgaactgaaaaggaagccgggcttgacccagggggcggaggcggggctgtcctcagtcctcccgaccggagcgagacgccgcgacccagctgggcggacgagagatgagcgcgtaaggaaggcgggcgccgtgggccgggccacagcgctgtccgcgtcggtccctccctctggtcctgtcccctctacgcggccgcagcggtacctgaagaatgaagttacgctgcgcgacagccaactcttcagagccgccattgtgcagcgcgcggacgccagacgcacacgccggaagtgacgcagcttcgtgagcgcggagcggggcacggcctccacctgagagcgcctcgccccatagccacgcccccacccaaggaagcagtcgggattgggcaggcagggggaaagggggcgaggcttagggcaaaggctgtaacggccgcgcaaggcaaccaaccgccggaacttccgcgcggggcggggcatatgcagggcctgagggcgcggaggtgggtccggcgcggagctgagtcgggcgccgtgacgctggcgggtgggcggggactcagttcgggccagggcttgaagggaatttcctggtgagttagggaggcggggccgggcgggaggcggggccgggcgggaggcggggccgggcgcggcgacggcgctgtcacttcagcaccaggaagtaagtggtccagccggccagcagcagcgccccgatgagcaccgtgtagctgaggagcacgaaggcgagcagctcccgcagcagctgcagcacgtggacggtggacgaggccggcatcgcgctgcgcgggagccccaggacggtcggcggcctgccgggctggcgccgtcccagaggggcggacgggaacacacgaggtcctggccctcgaaacagcaaacgaaggccaggaagcccacagtgccgacctccccaacagcctcctggacgctcgcttctcggttacactggagaatccttctcaacccaaactgccctcgttcttcggctctgatccgggctgaggaggcagaagcccggctcttccccgcgccccgcagctgcatgagttttcctccctggcccgctcctcccaccacctcctgcatttttaatgctgtgagtgccgctaatgcgctggtggagtaaacctttcttttcccgtcactcaagctgcagccccagctgcggccctggctggaaggggaaggggagagagacccatttgggcaggaggaaggcacaggcccaaacctgctcttctgtgagtcccctggccccaaggcttgccagcagcagagctggaggatctttgctttgtggtccagcatgcttgccttctggccagctgggactgcagggtgccaggtggtgggtgggcatcaatccgatcctgggctcacccccgccaccgtgctctgtgcatctgccccagccctgctaacttccaccagagacgacatcagacagtaagaaccccacaccagctcatcagacagtaggaaccctacaacacctccaatgctgctttgcccagccactccccacagtgtcaggcactggcttccttctctccccacctcacttacttggcaaagtttccacgaatcttccaccctgaagctccgcggttctgtctgctctggtgcccaaaggtagcttgtgtgtattctgcgatctcggcagaactgagattttcaagcagcggcactcaacaactaggtgtggtctagagaccaattacaacctccgcgtggtccccgagctctcagggagctgcgcacaggcgttcctagcccaggcggggcgctggcaaccctgcccgccctctgcctgtgtcgccaccacagcccacagggctcagatgtggtttcacagacccagatgggctgagcaggcggcacactagtgggtatttcaagccccttcttgtttttttctgaacattgtaaggggttatggggttatagtgcgaacagtttcgtttctaacaaacacattgagagcagtcccatctcctccgagtctgggcaccagaagaaccactggacagtgttcacttgcgaccgcccaactactaaagcaaaagctgttgtcttaaaaaacatgcaagtgcaagcatgcacgggtgtgagaaccaagcttaagtgaccgagatctcctgagtgcttgattccgatttacaaagagttttgcagcttacagactcattatacagatactttcccaatgtgacacttccaatttcacctcctcacaatgtgaggcaaaaggagccagtgaggatttctgcaaagaacagacactttcccagatgcaacaacaaaggaaacgaaagcataaactatgctgcttctgattattttgctcgttgccgtagtttttagttcaagactgttttctgacctttgaaaagagcaggcagtgtggacatcaacccttttatcaacatcatcatccagaagcaaatggctccttaatttaatcaggatctcttattatcaaattattgccttggccacagtgaggctgaaaacaggagcagaacattatcaagctgctcaggaagccagtgagtagtaattactcccccagagaactggtcatcttccgtgtcctacctagtggcaacggagtacagctgagatttataccctcctccacaccaaaataatggatgaaacagacaggctattaaaaataggcctgattctgttcccttttaaccctcacatccttcaaatggatgtctccaggcagttaagtgttctagcctttgcggccccttgttaccgcctgattttgggtgttttacagcaacggaggaacttaagcaaagaaacactatgtggcttgaaattcacactaatccatttagaaataaaagaatctgagaaattttaaataattgcctttttcttctgttgtctgacaaaaaaggtatcctctattttctataggatgtcatcattaaaccacgactgaatatatcacagtctacaataaattcagtctaaagaagatcatctatgtgatgtctgcatttttttgcctcaccatctttatcatagtccctcttactgtctgctttagacatccagttcattttgatattttaaaaagagtatttcagctggtgtggtgactcacacccataatcccaacactttgtggggctgaggcaggagggctgcttaaagctaggagttcgagaccaccctagccaacagaaaattaaaaagataataaatttaatgaaaaagaaaaaaagaattatttctcttgaggccaggagtttgagcaacaaagaccctgtctctaaaaggaagaaaaaaaaattgctgggtgtggtggtgctttgctatagtcccagctactcgtgagactgaggcaggaggactgcttgagcccagaagttcaaggctgtggtgagctatgattgtgccactgcactccagcctgggcaacagaataagacctcatctcaaaaaaataatttcttcttgaattaaactctgctcaatacaaacacttcctcctggtgacaggctggtctttagtgtacaactgagaacaagaccgaccaacacatcatgcttaatcataatccatttgcagtgagggcagatctgaatcgaatagaactcacaatgagactgtcccagttttctctgagaattaaatgtgctgttttaaatcatccctctttcaaccattactcttttgctccacaattaacaaaatacttaattctctgttggttagaatt

SEQ ID NO: 916148 - DNA, 4001 bp, Homo sapiens
gaagcagatatacccagaataaggagcttccaggatttccctctccgtgtgaaagcaatcaactcctatttttaatctccctctgacgcaagcatccaggcaaacctctctctaatcaaagctagatgatttgttactttcaaatagcagttttaaaagtcagattttaatgcaagtcaacacagatttaatgtcaatgctttagtctaggagaagaatgagttatcttgagagacagaattgatggtaatgcaaaaagctcctcgattttcgaagcggggggaacttaaggtataactgggcagacaaacccagaggattcctatcttcttaaacacttcacagaaacaaactaatctaataccagtgattcccgggactggccgaagaataacttgaaaattggattaattgaaaaataacatgttgatagttaagtacaggtaaaaacagcactttcctacacattgggttattaaaagggttattaaaaataattatttccttcagtgcccaacaggatttataacattcaactctatttttggtttttcattgtaaaggattctcagaggggagggaaccataatgccttaataagtaaacaataagtaatgtttaataagctcctgggagttggtcacattcttcttttccaatcaagagtttttgatccacttgaaaaatgctagtgaagagggccttccacaaggaactcagtaagaatatgcaactctggagacacaatcaaagtactggtatcaagcttggagaaaatgctgcttttgtctcaggggcagccagtgataaaaacaggaactttacacagaactgatcacaactgccccagaagcctgatcacatgcccacaacggagcactgtgtttctctcattgttgtacaaggagttctctaataacagtggcttgatttatcccattttttttttttaattctgaaaataaatcgaaccctccctgtcccaatccattgtcaaaagaaagaatgccagccaggatttgcaagtaaacggtagcctcctctccttccttcatcaaagactccaaaaggtgaccagatgcggaaaattcggcccgaataacaggcaccaggaaaaaaaaaaacttcttatgacaaaggtggtctaaaagcagcaccgtgtgtctctctgggttaatgccattgcttcttatcttcctaggaccctaaatggctcacccgcttgtgtctcactcctgtcactggggaggcatcgcgcattgttaaaggaaagagaagaaatgatgctgcggatttcccatgtgtctctttttgaaagggggaagggggggctggaacaaggcgtggagccctccacgaaaaggggagaggaaaggagaaagctgtcagccaccctcctcgcagccctacccctcaccccacctgggccagacgcctgggcagaagcgggagggcgcagctttgtctcgggttttggggggcaggaagcgcagaagcagtgtgggcccgggaggacctttccacaagcccttacttagtcccctccatgggaaaacaatgaaagccacaggaaaccacttaatggggtgggagaggagggaaaacggtcgtggagcgccaggccaggttctctacaccctcgtccccctcgccgcacggccgccagagcgcgcggcggggacctgtctcccaagtcgccgcgatccgcagggccccgggcgccctctccccggcccggctcctaccctccgagagctccagctccagctccgccagctgcgcccgcacttcaggcggcagcgccgccaccgcggccggcgacggctccaggcctcgttccgccatcccagctccgccagccacactccggaagacaagagagggggccgaaggagggacggacagacacgggcccacacccggctacaggatccggctccggccgccgagcaccaccagcaccgccgccgccgccgccgccgccatgagcaaaggtcacgtgagcgcgacggcccccgccccccggccaggaggacgcaccgcctctccagcccagtcaggctgaagacgcatatgcttacggcgccctctactgggaagctaccagaacgacgggcccaagcccaccactcgaatttccctgcgcgaaatgggctcatggtatggactgtcggctttaccacagtagtgtggacacatagcatttacctttcactctcgagcaagtttttaggggtcccaggccttactttttccaatactagacttagcaatgtatgtctatcgtgtcctttactccattttccctgattaatacctgcccatttataaaaacctaatcacaggccacctccttcgctgtggctcctggtcctatctgccaggagctctgtttccgtttcagttttagcttttaaaaagacaggcgcggtggctctcgcctgtaatcctagcactttgggaggctgaggctggtggatcacctgaggttaagagtaccaggctagccgaccgggcgcggtggctcacgcctgtaatcccagcactttgggaggccgagacgggtggatcacgaagtcaggagatcgagaccatcctggctgacacggtgaaaccccgtctctactaaaagtacaaaaaattagccgggcgtggtggcgggcgcctgtagtcccagctactcgggaggctgaggcaggagaatggcgtgaacccgggaggcggagcttgcagtgagccaagatcacgccactgcactccagcctgagcgtgagcgcgagactccgactcaaaaaaaaaaaaaaaagagtactaggccagcctggccaacatggtgaaaccccgtctccaataaaaatacaaaaattagccgggcgtggtggcggatgcctgtactcctagctactcaagaggctgaggcaggagaatcacttgaacccaggaggcagaggttacagtaagctgagatcgcgtcattgcactccagcccgggcaagagagcaaacactccgtctaaagaaaagaaaaagacaatagagagcaggtccacttctttctttctatacttctaactacttacaaggagggaacttactttaactcatcctcctcactctgtggcctaataggtgttccaaaaacattaattttaatttaatatgaagagggtccaaggctaggtgcagtggctcacacctatgatcccagcactttgggaggccaaggtgggcggatcacctgaggtcaagagttcgagaccagcctggccaacatggcgaaaccccgtctctactaaaaacacaaaaattagccgggagtagtggcacatgcctgtaatcccagctacctgggggagctgaggtaggaacgtcgcttgaacccgggaggccaaggttacagtgagctgagaacatggcggctgcgctccagcctgggcaacgcagtgaaactgtttcaaaaaaaaaaaaaaaagtcaaggccgggcgtggtcgctcacatctgtaatcccagcactttgggaggccgaggcaggcagatcacctgaggtcaggagttggagatcagcctgaccagtatggtgaaaccccgcgtctactaaaaatacaaaaattagctgggcatggtggcatgtgcctgtaatcccagctactcgggaggctgagacaggagaatcgcttgaacccgggaagtggaggttgcggtaagcccagattgcaccactgcattccagcctgggcaacaagagcgaaactccgtctcaaaaaaaaaaaaaaaaaaaaaggaaaaactggatgaagcatacacaggaattatctgtactatctttgcaacttttcagtaaatttaaaaccattctaaagtaaaacatttatttaaaattatagaagcttagaacaaacttgagagatcctcctacctcagcctctcaaagtgctgggattacaggcataagccacctcatccagcctttactgcattcttccaccaaattattctacctt

SEQ ID NO: 916149 - DNA, 4001 bp, Homo sapiens
ttaatgtaaacgaaacccgagttcctgcagtggtggtacatgttaaacggtcaatcctgcgagtgtgtttttggtttccataatttcacttggtgccaatgaaagtgcctacatccgaggtccagttataatctaatgttcaggtccaaaggtctgccagggagaaaaaaataataggctggaaggttaaattccaaaacgtgatcacgtggtcctctctccagatggcactagggatttgttattgttgtttatttatggttttggatttatgatgaaggcgttttattttgtgcaagcaaataatgaatatttaaaataaatgaaggtggccaagcgcgatggttcacacctgtaatcccagcacttcgggaggccgaggtgggcagatcactttaggtcaggagttcaagagcagcccggccaacatggtgaaaccctgtctctactagaaatacaaaaatcagccaggcatggtgatgggtgcctgtaatcccagctacttgggaggctgagtcaggagaattgcttgaaccagggaggtggaggttgcagtgagccgagattgcaccactgcactccagccttggcgacagagctagactctgtctcaaaaaaaaaaaaaagaagtggccaggtgccagatggctaacacctggaatcccagcactttgggaggccgaggcgggaggatcacttgacctcagtagtttgagaccaccctgggcaacatggtgaaacctgtctctaccaaaaatataaaaattagccaggcatggtgacgcatacctgtagtcccagctactcaggaagctgaggtgggagaatcacttgagccctggaggcagaggttgcagtgagtcaagatcgcaccactgcactccagcctgggtgacaaagtgagaccctatctcaaaaaaaaaaaaaaaaaagttaaaaaatagaatacaataaatgaatctgcctggtacctttaaaaaaaaaatcaaaggtctgccggccctgccacccgaacccagtgagaggccctgcaagggatccccaagtccttaaggggctggaaaagtagcccaggagactggacagccaggcaggaggtcccggtagctgtgctccagctggtgctcctgcgaggaggcggctttcgaggtcccagtctccttctagctgtttctgaagcgagttgtcctgcctcctcctctcacctgtgctggcccctccctgccctctcagtgtccctggcctatcagagagtaggtggggctggggatccgcctccacagagggttctgggaccctggtcactgtctttttgtatttgcgatgctaatttgttcaacataaacatttaaagtctactgtagtttttaaactttgtcctagccttattttactttttaggatataaggagcctccagaagtagaaaggggtgctcttcggaccctccgtgagaggctgcgaccgtcaaggagagtgacagtgacctgggtccctgccacacctgggcatggctctacccagccgttcggattattgcacagtggatcttgacgccccgtgggccttgggcaggttacttaaccccctccgtgccagtttgctcatctgtaaaatagggatgaggatacacccgcctcgtagggttaaggagttgatacaagcgttggaaccgcacctggcacggggtgcgggctaagtcagtgtttgctgtgatttttcaatcaaggcctgactttcaagtgggctgtgggcccaggagggcagggacggctgtgattgctgggttcgcccggggcctgcacgtggcgggcggcagcgtttgtggacagcacctgaggccggggccggacgatgggcaggctctagcagccccggcgcccgccggagaggccgggacgggcaggagggaagcccggggaagggagcggcgcgtcgaggctcaccaatctccacctccacctcctccggcaccatagtgcggtagatgaagagcgccgagggcccctcctcctcgctcgcctggttgaggaagtgcaagatgaggtcctcgccctggccgtcgtcgcggttgagcaggtcctcgaaaagctgggggtcggtgatgccgaaagccgcatacacgcggtcgcgcatccacagcacccgcaggtcgtccatggcgccgcgcagtgcagagggagccgggcgcagggcgggcgtccgtggcaacggcggccctagcaatgggcgccccggaaacggccgcagctcgccccgccgacggcgccggcgctgggggctgcaagctcggcagtgccccgcgcccggcccctcgatcccgaacccgcgagccgcagcccacgccccggccccgggatctcggaggcgcgcaccaggcccccgggccgccgaggtaggctggttgctccctggccccggcagcgcgcacgcccctggatgcggagcgggaccctcgccgccaggagccgccctcgggccgctgcagccgagggtgcgaccccaccccacgccgaccggtttgcaagcagcccgcccaccttgcagatgaagctggggctagagagttggcgagacgaaggtcacagcacctcggcggtggcagaggcgggattagaggccagacgaggaggaaataagccgagaaagcacgagttcctcatggcctacaaaatcagggaaggagcagagttctttagctttcttgccaaactagagcataataaagcaaaacacccacgtttaaaaatatagatatatttatttgtcattagcaaaaggaagttaaatactgatagaagatgcaaatttgtcctttcatgcatttgtggagcaaagtactaacttgttcactgtcatttcccctcacaaggagttgagcccctagatgactcaggctaaccctaagaacctacctagccttcttagatattcccatcaaagaacaggtggagtgtactaagtatttctgaaaattctaaaccaaatcagcaaaaatggcctgactgtgggaagactgttcgttcaaactgccttattcccatcatcttgatttgacagcttcataataaccttcctggatatattccctgtggcacgcaagcaaacccggctttacgtttttaatagaggaatttattgttttaaatgcggactgtagaataggtgtagaagttgtttttcttttccaaaatgtatcaggctctaaaacgtctgaatatgtaattcatggacatcgtaaggctgacctatgctacaggtattctgtgccttattaaacaactgcagagggccaggcgcggtggctcacgcctgtaatcccagcactttgggaggccaaggtgggtagatcacctgaggtcaggagtttgagaccagcctggccaacatggtgaaaccctgtctctactaaaaatacaaaaattagccgggcactgtggcaggcgcctgtaatcccagctactcgggaggctagggcaggagaattgcttaaacccaggaggcagaggttgcagtgagccgagactgcaccactgcacttcagcctaggtgacagagtgagacactgtctcaaaaaaaataaaaaaatttttaaataaacaactgctgaggggatgctgacaccagaatgttgttataaaatatccattccagaaacagagcagcattcagcgaaagaggagttccaagtcctttcgctgctggaaagtccgcagggctcacccagatcctatcagacagaacaccctttgcactccttaactgaccacggcaattacagtctccagcccagcaggttgaatcaaagtctagtttactgaagaaatcccttgggttttaagattctgttaacacatggtaataaacatctaaataaaaactgagaaatgtcgtgtcgtgacatttatctttaggaaaataaacatattcagtatcatccacacaacttgccatctgtgctctggatctctgctatcaagggaatgaagtatgttttaaaaa

SEQ ID NO: 916150 - DNA, 4001 bp, Homo sapiens
aagcccaaaaagagggccagagccaggagcagcaaagcacccagcagcttaagaaaacgagtaaacagtcctactccacagtaaaacccctggcttagaaactgaaacatgacctgggcccagccccctaaccgccctgtccacactcccatccaaactcgaaaaaggtccaaatcactgcttttcagttgcctgcaggcatagatgagatggccacaagtttctacgtactctcccaccaataccagcagttcaatcagccaccaaaagcctgcctgtccaagttgacatagttcctcggctccccacaatcccaggcctttgcgcttatctgcctgacttcgtttccgacccagccgatgtcgaccaggggacctgggatccctacgtccaccctcccgagtatcctccttcgttggaaagcggtgccgctgtctccgggatgggggtttctttccgctggacacacgtgaaaaatcactggggaacttgagagattcttcatcatcatattcctcttccaactcatcttcccccaaagctggagaggtacagtggtggcaaaagttgctagaagaaccatttcctccctcagagtaaggcccttctggaattccaggtgttccctggcagttgcaagcagatggaatggaaagaaaagagttcccatccttctggttcccagtctcgttttcttttgagagttcctggtccactcctgattcttcttctgaagacgtctcactctgatcagggtcctctgcatctctaggtggtcctggaccccctggggggccatggcttgggtccaaccaatgggctgggtttgggtgctgtgtgtgcttaggaccagagtgctctgtgaggcagcgggtaccattaggagcagtccctgctgagtccctgagtcctgagaatgaaggtatttcagggtccacggagggtcctaaagtcctgagggaggcaccaccactgtggtgggctccatacaaccctctttctccggggtgcttctgggccatgaccccggggcttcctgagggtcttaggtcacagccatcatggtgtgttctgatgcctgtaacagatatcaaggtggagacagtcaaggatgagaccaagagaggaattaaacaatctcaaatagtggacacatttaattcatccacctcccttgttttcccaagttcttttggggcattcgctattcctagcaataagccaaaactagactcaccacaaccctgcttgctccctcccctctcctccaaatcacttaagtttttcttctttccccagaaaactataaccttcaatcagggaaacagggaggtaccgtaaagggtgtggtcgggggagggtgggtcactcttaggaaaatgggaaagaccgccggaaagggggccacagacttccagtaatgggtgggggccatgcggccctggaggaaaatctgggggcggagcttagggctgcccctaagaaagactaacagggaacccaccggctgtgtagaagggacgaaggtggccgggcaccgtggctcacgcctgtaatcccagcactttgggaggccgaggccggcggatcacgaggtcaggagttcgagaccagcctggccaacatggtgaaactccgtctctactaaaaatacagaaattcgccaggcgtggtggcgcgcacctgtagtcccagctactcgggaggctgaggcagaagaatcgcttgaacccgggaggtggaggttgcagtgaaccgagatcgtgccactgtactccagtctgggtgacagagcgagactccatctcaaaaaaacaaaaaaaaacgaaaaaaaaaaaaaagacggacgtaccgaagaacggcggtaactcctccccctcgagccgcccggcctggggccagggtgagctacgagagccgctctcccggctccgcctcccgctcacgctctgcttccgccttccgtccccgcggccgccggcgacctgggcctacttccacttccggggtcaccagggaagagacgggaaggaaaagaaatagcggttggctgagaggcaagccaatccagctagggctgcgtcgactccaaggaggcggtcctaaggaagtactggccccgccatttaaaggcccctccctccgcgtgtgggaatgggattcccgcaggttgcaccgcaggaagcaaggcaggtggactctgcaccaatgcctgcagactaagggcagactctcaggattgctctgggtgtattcctaggctttgtattcctgggagatggagggcagccaccgagccacatatagtctttttcccttgcagacaaaaccagggagctcagaagagtcactgccctgatcccttccgtgccggcagctgcgaggacacaggcccctttgtatcctgcggtgcggaggtggagcagaggagagggtgccccggctggccccctccctcgccccgcagcactgcccctcctttcacagcaacccacggcctcccccgcgcttgacccagctggcgagctgccccttatacctggatccgcccctcgggtcgcagctccccaggcccgatcaccgagcggtgcctaggaactgggagcgtaacttggctcggctcagaactttgcccgtgagccaaagaacactgaactcatctacctgctgcttgacatctcatctgcataccaagctatttggtggacgtccacaagcgcccccgcccccacgtagacccagttgggtccccgttccgtcggtcccctcctctgcacacgcctctagccttataccccgtcttgatccgaaagtttttccacccatgaacccccagttggcgctccccgaccagcaaaagccccttccctggtccacgatcccgaccacccggttctccaggagacaatactccaattctctggaaagtggaagaaaccaagctgaagctaggggggcgctgggacccctattggggctttgagagcttccggttgtcatctcctaagtattcggagacccttctccaaaactcttggggtgaccctcaagactcttacctgctatatagttgggggtctctggtcctggactagagcagtaggcaacctgggtccccccacacacacgggaaagaattggaggggcctgccttgtgatgtcacccctcctccccccaccgcgcgcacgcgcgcgcgcacacacacaaacacaaacacacaccccaacacacacgccctgtcccctttctccaccctgcaagctagttgcatttagctcacagagcctgggctgcgacttgaaagagtttaggcagcaacagagtgaccctgggggtgctcttgaccgacagccgcacccccggcgtctaggacctccgagcagggatgcatctggaggtctagggaagcacttccaccccctcctctcctcaatcctggcaggatggtgagtagttaacatcccctccccaacccccgcttgtccagggtccccagacttccaagcagattgaggagaggagctccgagagtcaaccctccagcctgtaaggaccttgatatccaaaggacagctgaagaaagtaatgtgcctgcatttttgccacttcattcccacagtgcccgaaatgccagctcctccttggtgttctcctttcaggatttgaattcaaatcccattggcagccctgataccgctgggggaagggtgaggtaggaaaagtcccaccaatatcctaaggggaggtgcgagtggctaccaggatgtgagatgtctgtgggcaaagtccctgcttattccatgaggggctgtgggattaggactgtggctggatgcctcttcctccaacaactccatctcagcatgaagctgaggctttaaaaccctgacaaactgtgggtgactgtctctacttaattcctcctcccaaactcttggtgtctggttttttccctctttctgccctgggcctggagcagctgtccagagacccccaccat

SEQ ID NO: 916151 - DNA, 4001 bp, Homo sapiens
gaggtctggttgccaacagcagccaccagcaagacccctaagccaactgccagtgggagggccacaatatagaagttgaccatggaagaaaggctaatcagtgccacaaggccaaaatagatgccaactatcacctgggcagcaaagcgaatgggactcagagggggtgtcacccctctggggctctgcctctgtccctgggctctgttggcctgagctacaaagcttgggagcttccagaactcccagagccagcccagcccacctccccccagggtcagcatccagagcagggcgtggctgtcccttcccaggtacaggtggtggagcccagcagggccccccacagcccagagggcataggtcaccaggagccccttggccatcctctagggcaaaggtctcagaacaagtccggttactcgcagcacagaagtctcggggtcctctgtgagactcatggctgtcatggccccagagttatccttagaccctaagagatgggaaaaagtagagtcataagatgatgtccaggctccaacacagcaaccatttctctttccaataaaagttgagtacagatctgcctgagtccccagtgctatttatctcatatcccttgtcctagcacctcagtcccattctttacaaccacagtgactccagatttagaggagaaagctgtttaaatttcagacttcccctgagacccatgaccccaaatgactcatggggggatgtgtggaggggcagggctgcattggatgcttttccaaagttcccacacattttgaaagcctctgccttacccctgacttaactccaactgtggctgccctcccacacctggcccaggctttagccactctcctgccttcctaactctccaggccatgagattttcccacaggtcaaacttgaaaggggtcctgaattccctttattaaaatattctggaaaacttcgtttgacctagaccttggcaccccacaattcaaccacctctttcggaggccggcttggaaagccactccacagcagctggacaaatcctcacaatatcaaactggacgccaagcgtgcctgccagtgtcccctctatctggagcgaccaccagccagcacccgctacttccaaatcaagtggccatacctgggtgccccgctcccagaccgagtcagaccagtcatttcctttgaccacagagtgaaaatggcccgtctcgccctgctcccacttccatccaaatggactttgtcttttgtgtctgttgtgtcacggaagtccggcttccccaggccaggctcctccccagggccctccccggccccctggggatcacattcccgcctgggactcctcccgcccgccctcgcggggaaactcggtgcaaggctctgcagacgcctgcagctccggtgggctcagtgcccagcccgggcccagctcctcccacaccaccgcaccatggccgccaggtggcgctgccgccgatggaagggggggtccgggcggtccccagacaccttgtgcgggtaccgaggcacagcagcacaggactgcccctatggaggggctgcctggcaggagcaagggacgctcctatctgtagtgctaaaaaaaaggataaactcctgtaaatgcaagaatacgtccttgattacctcctcccacccccacaaattgaaaggtgactcctccctcacctcaagctgcacgctcctctcttcacgctccgttgaccttcaagactggatggttccacctccaattcccttaaggcagagacatccacggacaggctgcagtgagggacatccaacccaagctgtcctcaaccccccacagggcttgcttgcctcaccggcccacctccgagccttccagttaggggctctgcttctgcacctgagcctgagacctgaggagcctcccaatccagggctgctctgtcccgcgggctatgaaccagagggagaaacgggagcagagggttggagggcaggaggctcgaccaggagggcgaggccgcagcccgaggctcgtggtagtctgccttcctgcgcctctgcgctgcaacggagctgcaatgcaagacgccttcatttcaatgtcccgggctccaatcccgggttctactccgtgaacttggctaagtcatgcagcttcttgggcctcaatttccttctctggcaatctcgtggatctccgaggtcccccagtctggacttgcgggggcttcgggggacggtcggcctcgcgggtgtcacctcccggcagtaggcagagcgcttccctccaaacgccctcagccctcatctcggcctggagaggaaatgctgctctctatatgacctcttagggctcactgaggggcctaggctgggaggggccccaaagcgacgcctcagactgctggggggcgggggcggacaggagcgctgaataatgaatgagacttaattgggcccgcactgcgcgacggcgcgctaagctttgcaaacagcgtgggcggcggcggccgccgctggacaaacaaactatctcccggctcaggtggtggggcgggggcggcagccatacaagggagagggaaggggctggccgccggggcacccggggccgcagcgcgcccccaggtttacttcccgaggaacccagaaatgcggggctgcgctggcggcccagagagtgggggtcgggaaggggctcagggttcgatctcaggaagggaggagtggggagggagagaagcggattgtgcggggagagccaggggcccaagggcaatgtaagcgcgaggaaaagctgaagaaacgagtggagggcagaggagaggggagaagtgagcgaggaaaaagcgcaccgggggaggggcgacggggtcgggggagcgggagaagagctgttaccgggaggaaagggaagagcgatggaggaacaagcgaaggaaggcgcaaggggccgggagaagaggaattgaagagtcaaggagagggatgggaggtgaccggaataagaacgagggggcggcagggcggggggaggcgcccctgcctccgcctcgccctgcagcgctcccggcctagcgctctctccagccgcccgcactcactttgtcacaattacggggccgtcactccgcccggattgttttccccaaattgttgttctataaactggtgcagagtgggaggtggggggatctgacaaactgcagcgagaggaaagggtctgagctgtggtgcggggcgcggtggtgcatttacccgcaaactggccccgcgtgggcggaggaatccaaaaaacccacgcaggaattctggttgctgccccagcttcgtcgctgaccccgcttttaactttttggctattctcagcatcggctgcctcggtttccccagcagagcgtgacaaggatcggaggctggggtggtggaggcgcttgtaggtggggtccaaaccgtcctgcctgtcccattctgtcttgttctttactacccgggtctccccggcgggggatgggtggtctatcccagcccagcggtcctcagagcgacctcgagtgccttcttcccccgtgagtgaggcttctgccctcacccggtctgggccatctcctaccccgcctgtgccctccgaccctctgccctgcgccgctcggtgtcccagcctttcaattcggcaaacatacgttgcgcgcccactgagtgccagcgctgagccagcctcaccccgccgcctctcccccccgccacccgccccttcccggccggcccggcctgtcggctccgtgacagcagccgccgaagccccggccccgcgggagcggccagagaggagccgccgcatggctggctccgacactggcctccccggcggctccaggggcaacgaagggtggcggccgctgaagcgagactggagcctgctgggggagttggcagggctgagcgggggagggggaggccctgggcgggcttctctctggttctctaag

SEQ ID NO: 916152 - DNA, 4001 bp, Homo sapiens
aaatttcaaacaccaacatgcaaatatagcatataactgtcagtactaggatggtttttgcacatgttaatggctttcagaaggatgggatctttacttttctctcctgccactctgtattttgccaacaggtttactgaccaaaataaactctattttgtgtaaaaagaaaaaaacaacttattgattttaaactatttatgctgacacactatatccctaattcttttacttcctcatgcttaaaaagcactgagactctcttttaaaagtatgtggaaagtttctagtgtgcagctagaagacacttctgaatcacttactatcaaagacttaatttatattatctctaactttttacaaaaacaggttagttttgatgataaaagtcccagtgttttaaaacattgtggttagagtgagcaatatttactcaaaatatttacagagcacttactatatgtcccagactgaacaaaattatgttcaataaaaaataatcctcgtaatttgtttgatgcttctgagtctccaaacattacaaatattgttacaaatactagaatacgtaggcaagattgagcagaatctttcccaatcctatcgcagaccaaggaaatgtgtttctaaaacaatttctattgcttcaactatttaaaagccaaaaaaacaaacaaacaaacaaacgagtacagggtgtctatagtttccagtgtttggatagccactaatactttgaacagtaagttccttctgatagcacttataccctatactatgtacctcctggaaaatgatggggaaaccgctccttctcaatagaaaagatactattaagaaatgaaagcacttaatatcaatatactaatttctaaaatccgtttctctgaactctaatcgaagtagcagagaaaaggaaaattatacttctcctctgtcactctagaaataacagttattttgccaacatttctgcattcaaaaaaaaatgagttagctatgagaagaccagagaaactgatgcccaatttaggtcacgatcacaaaactgtggaagacaaaaagcacagcctacgcagaaaaatcggatattccttcccaacacccgcagaactctagatacacgttttgtttttctttttttaaaatgctgcttcggcgttctcgaaacctggtggaattatactgcaggaaaacactggcgctcacgcaccgtagcgtctctcagcctcaacagagcgattccaaaactaactccgcagtccctgggcaaggcaaggagggaaataaaacacccgtctcacgaaagccaacagtgatgggaacagccagcccaccgagcccagcgagacccgagtgccccgcgcgtcccccaggtgcccttggaggcagcggcacgcggacgaggccgcgcccggtcccagcggactccagttccgcccgccggccccatccttccctctcctgtccccgggacccgccgggctagccaggcccgccgcgccggctccgcccctggccgggccccggattctccgccttgatgcaacgctgccccgggagggcgggtgcggcagagcccggagagccctggggcccccagcaaggccctcctcccacaggccccaaaggctggcgcgggagtgggcgctggcgcgggagtgggcactgccgcagcaccgaccaggcctgcggccggggtctggcccgagcgaacgccgcctgctgctctcacctgcgttcccactacgacgatttgaggcagctggatgatgtcggcgcccaccgtgttgaagacgtcctggagcttgtttatgacaggaattagcgcctccatgactctgaaaacacggggccccagtgcccgccggccacggcaatgaatggggccggggcccacagttcgcctccttcctcctctcctccgccctctcctcggaagccggcacccattggaccgggcccgccggctacctgccccctcccggcaggccatgcgctgcgagggaggtggagaggagcaaggcctgctgggagttgtagttctggagcggaggaacgctactccccacagcttccaggaggctgcgcggcaccggtgggccctagcctgggactgggatgctgcgcaggctctagtcaaaggctaggagcaggccgggagcgcaggaggaaggccgtaaatttatgcctgtcctcaaggcacgatggatgtgacagtgctgggtgtgaatatgtgttaaaggcgcaatggtgtgtctcttaattatccagtgtcacttccttttatttattttttatttatttattttttttttttttttgagacggagtctcactctgtcgcccaggctggagtgcagtggcgcgatctcggcccactgcaaattccgcctcccgggttcacgccattctcctgcctcagccttcggagtagctgggactacaggcacccaccactacgcccggctaattttttgtatttttagtagagacggggtttcactgtgttttccaggatggtctcgatctccggacctagtgatccacccgcctcggcctcccaaagtgttgggattacaggcgtgagcagtgtgacttccttatgaagacactttctctagaaggacgggttggaaaggcttaaagaaaagcttatggccgcaaacaaccaaactgggtgcaaaaaaatctgcacgctgatacgagaatgtgtggggtgttattttgcaaaaatacaaaaaccagcccaggttagaatacgcgggttctccaggggttttgtaaacaaacaaacaaacaaacaaaatgtgtgttcaggaccgagcgcggtgtaatcccagcactttaggaagcagaagcaggaggatcgcttgagctgggagttcgagaccagcctggtcaacatagtgagacctcatctctaccaaataaataaataaataaataaaaaagcaggggtcggagcagcggggggcggtgttcatgaaaaaaatcttagagtattggagttttacaggggaagagctgggcatttattatcaatattatgtataaacctttatttgctgtagcctgattcctggcaaagtagacatctgataactgccttactcactctttgctcataccgttcttttttttttttgagacagagtctgactctgtcgcccaggctggaatgcagtggcgcaatctcggctcactgcagcctcctcctcccaggctgaagtgattctcctgcctcagccccccaagtagctgttattacaggcacccgccaccaccctgggaaaatttttgtatttttagtagagacgggtggggggcggggtttcaccatgttagccaggctggtctcgaactcctgacctcaagtgatccgcccatcttggcctcccacagtcctgggattacaggcctgagccaccatgcccggcccatactgttatatttctaaatgttgtttttctttttagacagatagtatccctcctctactccaaacctccaaaggtaaaagtaaacctcaaagtaaaaaggtgacatttgagtaaagaattaaagcaggtgaggagaggccaggcaccgtggctcacgcctgtaattccagcactttgggaggccaaggcaggcggatcacttgaggtcaggagttcaagaccagcctgaccaacatggagaaaccccgtctctactaaaaatacaaaaattaaccgggcgtggtggtgcattcctgtaatcccagctactcaggaggctgaggcaggagacgggcagatcacttgaggtcaggagttcaaggccagcctgggcaacacggcaaaacccagtctctacaaaaaatacaaaaaaattagcttgcctgtcgtggtggtgcatacctgtggccccaactacttgggaggctgcagtaggaggatcacctaagcttgggaggtggggactgcagtgaactgtgatcgtgccaccgcactccagcctaagtgacagagtgaggc

SEQ ID NO: 916153 - DNA, 4001 bp, Homo sapiens
ccccctatatgtgaaagtattaaacaatatcaaagttcgagatcgattctcaaagtctagggacctgtgcacatagaaacgaggatcctttgtggaactgtgaggtactaaggcagacgcaaggaaagggagagactgggggtacgttcatttttctttcccactcggatatatagaccagcattctttcttctggacgcaggggacacagctaagaccaggcgcagagggcgtcagcgcgccagcggcccagttcccagacctcccagcatcgggcagtcgaaggtgttggctccagggtttctgccgccaccaccctagacacccagccccgctgtcagggtcataaataagacttcaaaccacgtggagggcctctgtggccaagcccgcgcttgggtgctgctgtaagaaaggagttctccaccggaagacccggcctatcagggagcagaattacccaagcagtttctagataagccgccctccggtggaggtcctgctactaatttacattacggagcacgtttacggcctctcccttccattttcccagtgaagctgttagtctgtttattaacatttagctggaaagcctgtctcaaaaatgttggcttagagcccggactcggtggcgcacgcctgcagtcccagctacgcaagaggatggactgaacccaagtgttcgataccagcctgggcaacatggagagacccactgtcaaaaataaaaataaaaataaaaataggacgggcgcgctggcttacgcctgtaatcccagcactttgggaggcagaggtgggcggatcacgacgtcaggagatcgagaccagtctggccaacatagtgaaaccctgtctctactaaaaatacaaaagattagccgggcgtggtggcacatgcctgtaatccagctactttggaggctgagacaggagaattgcttgaacccgagaggcggaggttgcagtgagccgacaccgcgccactgcactccagcccgggcgacagagactccgtctcaaaaaaatatataaataaaaataatgttggcgagagattaagaaaaactttaggttcaactgaagttaaagtttctcatattgtttcattttttttccctatcttttgtttatttggtctctgtatttgttcctttttaccgttcctgacatgtatttgctgttggggaagatactgatgcaacgacgctacgagccgcgttctgtgattccaattatttatccccagaaactggtcttagaaatctgaagtactggccgggcgcagtggctcaagcctgtaatcccagtactttgggaggccgaggcgggcggatcacgaggtaaggagatcaagaccaccctggctaacacggtgaaaccccgtctctaccaaaaatacaaaaaaaaaaacgggcgcggtggcgggcgcctgtagtcccagctacttgggaggctgaggcaggagaatggcgtgaacccaggaggcggaacttggagtgagccgagatcgcgccactgcactccagcctgggcgacagagcaagactccgtctcaaaaaaaaaaaaagaaaaaaaaagaaagaaatctgaagtactcctaagcatagtgaataaaataatacatttctcaccaccaccatcaccgcttttaataaagtctttgacctctctgtgttgactccctctggtttgaggtttacctaaatacattcctcttgcaaagactgaagtcaacattaaaaaaaaaaaaaaaaaaaaaaaaaaaaagacggcagccttttgacctcccaacccccctatagtcagatagtcaagaagggcattatctggcttacctgaatcgtcccgggaattttcttcggtgagcatttgtggagaccctgggatgtaggttggattaaactgtgatgggtccatcggcgtcttgacacaacactaggcttctccaggatctttgaaacgtagcagaaactgatgacagagcctcaaattgctaccaggtagcccggaaagaggctgaaaaccggagctccaacgaatggtcaaagaactgacgtaaactataggtccggcttccttttaaaatacagataagccaatcttccaggatatttgaatgttaatgatcccatgattagaggattaagggatccaaatgattaaaggtgaatgggtgtagtttagactcatagggtagttcttcatctgctttgcattaaaataatctgtcggatgtcatatctgctagaaaatttattaaaatcctctttttgtggttctgtctccctgaggttgccttacatataagttgtttttttcttgtttttttttttttttttttttcccaaactctactcctggagatggcttctgttttgtgaactgggcttaagtgttctagtgcagaggagaatggcagtttttaccgcccccgccccaccaccaccactgcccataaactcccaattaagctgagaaagtttcctttaagttttccttgcttcaatcatcttaaacctttgctgctactaagaagagaggaataatgaagaagtatctgttatgaacactttcatagcttgatattttagggacatgtattttttatttgttaatttgctttataaactataaacagtacctaacatttctgagcagctgaaattaactaaccttacaaattgctactccctccccacaaaaaaatgcttgtatttgtagcaaagcacaacaacatttaaccactgattgtctgcaggaggtggaagaacaagtccccagctgcccctctcatctttttcccgtcttattcaaatacgcacgttcccccattccctctctaggtggaaaccacgagaaaatactcaaaggcaaccttgtttgggtttggtaaaaagcaaaaattgaagttatgattaagaaatattttcatagagaatgagcagccataggcatagatcatgtcccaacactttatgcaagtgattctcaaaagtgtggtctccaggatcgcttaatcacccagcagttaaaggctgcagtgacctatgatcgtgccactgcactccagcctggtagacagggcaggaccctgcctcttgggaaaaaaaaaaaagtgcagtttacaacaagcacctagttaacttagatatacaaattctgagctccaaaccagccctactgaatcaaagactggcgcccagtggtaatgctttaacaagcctcccaggcaattctgcatttagccagaagacccagaagtgatccccaggtgattctgatgggtgctcaagttaagcagccctgctttacggcactgtgaactttctacttctgttgttcagctcttggctaatctccctcttgcctggggaatctctgataatcagtccgcaagaatttcactggagagataaatacaaaaaaatcccattgcagggggtttaggattaggaggtgagataacaaaaagggctgaaatagactctcatttgtaaaaaacctaggctgggcacagtggctcacgcctgtaatcccagcactttgggaggctaaggcaggtggattgcttgaagccaggagttcgggactaacctggccaacatggtgaaacactgtctccactaaaaatacaaaaattaggccaggcacagtggctcacgcctgtaatcccagcactttgggaggccgaagtgggcggatcacaaggtcaggagatcaagaccatcctgcctaacacagtgaaaccccatctctactaaaaatacaaaaatttagctgagcgtagtggcaggcgcctgtagtcccagctactcaggaggctgaggcagaagaattgcttgaacccaggaggtgcaggttgcagtgagccgagatcatgccactgcactccagactgggcaacagagcaagactccatctcagaacaaaataaatacaacaattagccgggcatggtggcaaccacctgtaatcacagctacccaagaggttgg

SEQ ID NO: 916154 - DNA, 4001 bp, Homo sapiens
aagagtgggtaatagaacaagttaaaacaccacaaactttgcttttcttatagaggttcagcatcttttcttgaattaatgtcctttagattgttgtaaacctttggttaatttccaaagttttgaagaaaatgattttgataattttccaagtattttcattgtcgtcatggaggagtgcatttccttggctattccagaagtcccacctcccttctgagattttataatggtatttcttatggttatcctaaatatacttggcaagtcatcttataaaccaccaataatagcctcttaaaaactcaaaaattacttcacttggctaacaacataaatgcaaattaattcaataattattgaagaaattaaatttttaaaaattaaaaaattgcagtgttgaaattctcaaccatgcttatccagatcttttcctatattactaactgtcctgggcttatcttaaatacttctcggaagatttacttgttttataccaggataggcaaagtatggcccatggtgcatttttggactgtatgcaagcacggttgctataatttttaaaaggttgaaaactttaaatggttgtaaagatgctcattaactgtttattaggcttcattaattttaaaatatacagagactatcctgttcaactatatttgtatcctatttctaattctcccaacaattatatacactggcaaaaactcttcagatgatatataaggaaaaggtcaaatatactaccaaattcatccagctttccaaagatgctcaaaatctttctgtgtctctcactccctcccttaacccacataccacatctgaaaaaaaatgatatggtgtaacgatgccagtattctaaatgcttgaagggcttatcacatgccctttccaagctgtgacagaagaatgtcccctggaccacggcatcctatcaatctcacctctgaaggtgacccagcctcatacttcactgaaacaaagaccattagacaccaacactcccaacttcttttatttccactttaacatttctccatatagtaatcctcacttttctactccctgccatctcagaaaaggaattctctctcctcttttccacagttagcttctcaaatttgtacctttaattctacccctcccaaatattgcaagacttgctccactaattatttcctctcttggaatcttaatctcatcatcttctcttgatccttcccctcagcctttaaaactcctagaccttaaaacactctctgcgatctgacagcccttcaaaccaatatactccctatctctctctctcccctggttcaatgacaagatctttggccaacttctttctactcggaccttgctattatttcctactaggcacccacaaacccttgcttgttaaactgatctccttcaagactcaagaaaagcgccatgcggctccctcctagggctctcctgccctctcctcaccgatgccgagagtggttctgctggagaaccgccgcgcctgcagttcctgcaccttttcccggagctgcgccagggaattacggacgaactggaaggggccgagaagaaaggtcttggccaccacctctagctccaagccttttcgctctttcagactttggatcctccccggggaggacctccaggagccccttggcagtttcccgccgcctagggccgacttttccatctcctcctctacctccggctcccgggcgagggaggccccgcgccgccccttagactggctgcggccggaagattgcagccgctttgagcttactccttgttttctcataatcaaggagtatggtggagctgggtcaatttcaggcacagcccagccgagtcaggcgaggtccagagagacctgactcgcctggcagcctcaacggacttgtccccgcagccgttgcggacctcccggtcgtcatggcgactgtgaaatgtggggtggggcgcatgcgttggaagccattcgcgcgggcagtccctgagtgtcccctcacgtgctccccagcgcgagcagcacccccgcctctgcgcttcccagagcgtgcagcttccggtgagggcagccccacgcacagccccccacaccctccccagcgcctgcagcctccggtgcgcgcaggccccaagcccacatgcgcagtcctcaccttgcgcgcagccccatgtacagccccggacgggctcccagccccactggcgcagaacccatcaccgcttgcccttcacgcgcttcattgggagtgcagcccccaccccgagcgcgcagctccacgcagcctctccacactctccccagcgcctgcagcacccccagtgcgcacagctctgccagtcgcttccccgggcgccgcccctgcaccacttcggcccataaccttgcggcgactgtctgaagaacttcccgtggtttcattcttttcttcgggtttagtcttagctgtgacattttaaccaaaagattacacgttaattaacgaggtattaaagggaaagatctcagctgaaagaaatgactgtaggaagtgtgtcagggaagccaacggaaccgccggcccgccggcggtgcgcccggcattaggaacgtctctactcccctacgatcgctgaggtatcggacagtcagtgcccgttgccaacgcagagggaacgggccgagactgcgggcaacaagtggcagagccggcgtgagtccggtgggtctgatcccagagcctcaggttgacgccacttccttggcacgggacagcgtttactgaatcttagagcaaaatgcttttccaataaggttcctcagaagtcatcagccctaggagcggtgtgctcaagcgctttcagcaccagccaggaccaactaagaggggagcgcttagctcccagtcaccgcacagccctacaagaggccaaagcggctggcacagatgcactggggccactgacattttccatgtcctctgtcacgggccacatgctggagcccacaccgcttcacttcccatctgtttgatgatggatcacattgaactcccataccctaactgaccaatctaaagcctggctcattgtggccaggttaatttttcctgatgcaacacagcacaaaaatgttcgtggcccacaaatcaagtcctaggcttgctcaccaatgccttcaatatttgcccaatataccttttcaactttaatttcccacttcctcgggcacaaaatcttccatctcagtcatttcaggtaaagtccacaacctgagacatcataactgctgaattcctttattcatgtggaaaagccatcccttggcttttgcatccttttctccctgcccatctgaatgctgtcaccttccaagccccagcccatttctccagcccatattaattatgctttttctgaaggtctagagcacttaactgacagtactatttatcttctcactcagttaaattcagtaagtgctactactgctcattttttgttttgggagatttttttcaagcagcatttctgcattcctggcattgtgtttggtgctcaaaatgttttctcacttaatcatgcaatgactgtatgcaaattttaaaatcaagcatcaggatgtagttatttgcccaagttttaacagctaataaattctatctatccaatactgcatttaaaatacaaagtatttacggtggttaagaagaatatattcttgaatggctaggcaaactcaaagcaccttattttaaaatatgactgttttaatgtgttttggaacaataagtgaagtggagtgattgtttttctttttggtcagtttggtttttctggagtttccaattgccttttgcatcacttggtgtcctgatgggatacaaaatgctcttacccatggtctagcccttgaaagtacaaatctggtcatttttatcatttaaaaaattaatctttttataagaatgttcattgtgctattatttatatcg

SEQ ID NO: 916155 - DNA, 4001 bp, Homo sapiens
tgtattccctgcatcttgtaaatgctggttccctgggaacactggctcacacctgtaatcctagcattttgggaggccaaggcaagaggatcacttgaggtcaggaatttgagaccagcctgaccaacatagtgaaaccctgtctctactaaaaatacaaaaaaattaagccaggtgtggtggtgcacgcctgtaatctcagctacttgggaggctgaggcaggagaatcgcttgaacccgggaggcagaggttgcggtgagccgagattgtgtcactgcactccagcctgggcgacagaacaagactctgtctcaaaaaaataaaaaaaattttaaaaaatgctagtcccctcttgctcgatctttgtttcccctttctccacactcctcacccccacccccaaaaaaaggaaaaaaacaaacaaacaaacaaaaaaacacagaacattgctcaccagacagaatggctgcagggaagaagacgccctacattttctatcatagcagtaacaaaccttgggtgtcaccaaccttatcatccgttcaccaaccaatgcctgtccagaggggtcacactacttagataaggatggatggttctaacgtttaaagaatcctgccactatgagaaaggcactgagctggaacccacataggaggatcagaccactgtccctggcactgaagtgcccctcaggaaggtagaggccaaagcacaggaaaagtgaatgggtaaaataacacaaaagatgtcacaagttgttgacaagttgaggactttggggtcacagtgcccagaggtgtctggtgcagctccagagaatttaagccagactcccagagacctgggggcagcacagtgttgctttctgcatggccgggtgtgaattctgctcctaccattaactagtgtgacatcagtgtcacgttgatgatatttcatcaactttacaccaccgctcgcttgcgggaataataagcccaaacatccacttcaagggatgttgggatgcagaagtgaaaatagtggctgtttagcatatacctggatctacctcttgtataatatatgtcatctatcagaacccatcttgtttcaatatcgcctaagaacgtcctgctgagattctgtcccatacccagaatgaaagctctaccatctatcctgaacctctccttgctgccaccctgttccatgctccgggtacaggcagaagtgctcagcgccgcacccgctgcctccctaaacatcccaggctatcgggagcacctctcctcctgctcccacctctgcctgaccacacgacgccccaagctgggtccggacgccttccctccccgtcggcagcgctccctgtggtccctgtgcctgctcctggggccctgacgcccaccctgccactcacctgatatacgggaggaaggggttgacgtgcccggagagcacggcgaccacgtaggagataatgaaggcggctgacgaccaggtcaccaagaggaaggggacgaaagccattcccctcaggaagcacagcatcgcgccgccgccgccgccgacggagtgctgcgcccagcggggccgggcgccgggttgctccgggctgcctggaggcggcggccgggcgcgtacactcacggacggtgggaggggaggctccgcgacggccggggcaggcccagccccggagggaggggaagcgcgaggagcggagcgaggctgcgggcggcgaggctgccgggccagagtgggtggggcgcgggctgcccgggcttgttgcgaaacgagtgaagtcacaaagcggcccggcagggtcggaggcgcccggcgagctccaagcggacgcgactacggagccgccggaggggacgcggggtcgggttcctttcgcttttggtttggacactcggcggaggccgggttgggcgcggacgggcggcgtggggtcactggcggggacgcccgctctggccttcccactctggccctaccgcgctggctcttgcgcaactctggagaaaaggatttatttctcccaacccctccctcccgggggatttccggagtgccgggcctcgcaccccgagggcgccccctccgaggtcccgccgccggcgcttcgcagcagtgagagtggccaccgcgtggtgacacccatgccatccggtcgcgctgctgctgcgggggtcgggcagaagtgttcaatgaggttcgccaggtcacggggcgcagatgtggctcccacctcaatggtgaacacccgaaaacccagacagggtgggaacgggtggggtggagagtacgcgggtggggtgcggggcaggcgggtgggactgcgcgcccacggagccgggaggcccattgtgctgctttccaggagagcgcaactggagaatatttcctggaaataagatttcccaggccgggcgccgtgaatagccatcactttgggaggcatccaaaagccatcacccctggaatgccaccactttgggaggccgagttgggaggatcgcttgaacccaagaactagagatcagcctgggtaacatagcgaaacccctcttctacaaaaaaaaaaaaaaaaaatgaaaaagaaaaaaagccggttccagttactcgggagactgagttgggatgatcacttgagccttgggggtcgaggctgcagtgagcctttatcacaccacttcactcggcctgggtgacagagcaagaccttgtctcaaaaaacaaacaaacaaaaaaaaaacaaaaaaaactcccctccaggttctggagtagcccagactcggagccttggcctaagatgattaatagtgacttgatacatttcaagccctgtgaaagggatttgtgttctggaggcacttataatataagcacatgattttgatagtttagggagtctgagcccaacatatgtggccaaaattgttgggtcattggtgaccaaagataggttcctttcagccacaaacacatttcatgggcgccatgctaggctacaaagatgaaatagtaatagtaccctcaggacgaggacactcatagatcaaaataacaaaattaggccaggcgtggtggctcatgcctgtaatcctagcactttgggaggccaaggtgggtggatcacctgaggtcaggagttcgagaccagcctggccaacatggtgaaaccccatctctactaaaaatacaaaaaattagtcaggcatcatggctcacgcctgtaatcccagctactcaggaggctgaggcaggagaatcgcttgaacctgggaaatggaggttttctcagtgagctgagatcacaccactgcatttcagcctgggtgagagaacgagactctgtctcaaaaatataaataaataaaaacaaaattatgttatgtggtttattaaatggaaaggagaggattttaaaaagtagagacatgcccagagctgagggccaggggcctgggctcagaggaaggaccacggaggttttctgacagatgacatcagagttttcaaaaggaagtaattactaaccaggcaaagaaaaataagattagcattccaggcccagaaaacaactggaggaaatgcatacacagagcttgcttccctgggactatgaaagcacttaaataagtgtgaggcagcaaatggagagagaaacaaagaggcaaagtcaccagagtcctgctgagaatcttggattatttttggtattaaggagaaagtaagaacatgggcagactagtatttcaagagatcactgtggccgtggagtgagtgcccgccatacaaaacaaaatagaaaatttaaaataaggctttttaaaaaccacaaaagctggccaggcatggtagctcacagttctgtaatcccggcgctttgggaggccgaagcctggacaatatagtgagacccgcaaccatatctacaaaaaatttaaaaattagctgggtgtggtgttgcataacctgtggttccagctacatgagaggctt

SEQ ID NO: 916156 - DNA, 4001 bp, Homo sapiens
aactggattttacattttacttagttttaattaatgtaaatttaagtagccacatgtggttggtggctaacatattggttggcacagctctagagggaaagcgagcatcctaccagcctggggttattacgtgtggttctgtcatccagggattcataggaacttccccaaaccccatcagctggtccttggggggtcaaacatgccaaggatttctaggctgcttctgcacggcaggaccccaccagtccccactgcccatggagcttgtcacagataccaccgggcaatgactcagggagatctccccaacgatgacaaatctccagaacaaaagagagtaggcctgagagtgggacctcatcgattttatctccatcatcagccatcacattaccaccaacgcaaccatcaacatcaccatcattacaaccacaacaggatcaccaataccactaagtaacagccacacacagggctaccagccacaccacatggccacgaagactgccaccaacatcattctctcattttctccatcatcaccaccccatcacaccacttccagcaccaccaccaacacaactatcaatgtcaccaacaccactgaatcccatggttaacgctatcactgacatcaccaccaacactgccacgtcaccatcatccatccctccattgtcaccaagaccccaccaccatcaatactatcactgagtcaccaccaacacaaccgctaacactgtctcctccatcattgccacctcaccccaccatcaacaccaccaacgccccccatccccaattaattaccaccagcacgactccaccccacaaaccaacacttggagccagtataggataccagttaagaactttggttctggaactcaaccgcctgggtttaaatcccagctctgagtttaaatcactcagcttctgggagactcggtttcttcatctataaaatgggactcataataatacaacaatacacagacttactgcctgtgattcttgggaaaaatcaaatgaggaagtgcatgtaaagcccttattctacaatcccatgctactgctgttctaggttctgtgctcagtgagcacaattttatttaatcctcactcagctgtgagagatattgatctacccattttgcagatgaggaaactgaggctcagagagatgatgcaacttgctcaaggccctacagcttgctcagaggctgcattggaatccaagtcttaaactggacaaggttagactgccctgtttttctggaggtgaggcagggagatggggaagggatttggcatcagcagatttactgggattttcagcatcctacgctgcaaggtagtgatggctcggcggggcgggtggcatggggtgggtgtctgctcacctgtgtcctggcgaaactggtgcatggactgcaggtcgatgatgtagggcacaagctgggcgtccacctgccccaggaccacggaaccgcgagcgtcctccttcagcacgttctcaatgtggtggcacacggtggccgtgtagggccgccagcggctgtgctcattcagccactcccacaccaccacccgggccacgttctgcggtgggaagcccagaccattcacaggcatcagcccaccgtggcctggccgtgacatggccgccactgcctcaggggccaggtcccccactattgcaggcccagctcctcctgggcctggcagcaggcggcaacttcctctctccccagggggacagcaaggaccgtctggcctcctttctaactctgggttctctctgaggcctagagacctccgttaaaggaatgtgggatggccatccaggctgcaaagaccccttccctgtagagccttctccgataaagggtgctgccctggaaagcaagtgtctctcttatgccggaggaaacagctctaaagtccttggccccctcggctggctcaggtagggagtgaggcagccgcccctgttcgaggtccagcctcttccgtgttgtctcttggtccctcttccccgccagacagggcctgtcacccaggaggcctgggccacagcctgctgctcctgcggctctcagccagccctttgcactcccaactgcgtcccagaccctgcgcccggcttcagtggggcttctcgcctccctccggtctgggcccccttctccgacggctcctgccgaagggggcgtccctgcccccttgttccctctccacggtgtcctggaaggcctgggtggccgcagaacgcacgggggaggggtgcggcgtggaccctcgggcggcgcgcctggactgcggctccggagctgggctgggggacgagggggacgaggggggcgggggcccgtgggcacgccccaccccactcgtgctcgcgacctgccaggagacaagaggggagagggccctttaagaggagagcgcagcaccccctccccccttcccaggagagcattcggctgagaacaatggggaaccgaagggggacagcaaggggggcgtacggggtcgccccgcccgctttcccttggggcaggcctggagggaaggcaggggccgggggcgcggttttccgagactctccgcctggggggcgccctccttggctcccggagccttcccttcccccggggccctcgccctgccggggggatgccgggtgcgctggggtgcgccgggaagcacggggatgcgcggcgctgcaggcgcggcccagggcccctcgggggtcgcgtcgcggagggggcgaagccaggagctggatcgtctctgcctcccgccctgggggtaacagccccgcttccccagcccagacgtccccgagccgctcgcgggcccccagcgggagccgggggtggggtccctaagcacccgcgttctcaccgcctctcttcgtctccggctccggctccggctcgcgctccagcaccgccgcctcctgggctccccccggagtgggagggagccgcggtcccgcctccgcgcccgttccctcccaggcccctcggccgccgcgccgagctttccgcgcgtggacagactgcccggccgacggacggacgcaggagccggctggcggccgccgggatctcgcgggtgggaggaggcctcggccgtgctccgggagggagaggggagggggcggaggaggaggaaggggaggagacagatctcggccctgagcgccaccggcgctgacacgcgagtctcggggcgccccaaatcctcggccaggccctcccgagaccccaaggggccttctgaccccaagcagagcgtgaggcagggagtgggatgtttaggagtcaccggcttgaatctttgtcatctttatttccagtctcccagtccagggcctggcactgaataggtgctcaataaatgcttgaatgaatgaataagatccagagactgtctaaagaaagatcttgaagcattcagagctagcctcctttcctcctctaactattcctgggggtgggagggtgctgacaaggcctgattcagactcagttggaaccgtggaatctgaagagtacagatgaggagactgaagccagagagagtaagagccaggcccaggatcacaaaagcttagagcgatgcccagacaccaaccccgatctgaatctcctgccagtacccagttcccagccctgagcccacttcccccaaagcacccacctgctccaggtgagaggggtgggaccaggggaggggaccctggccaggaggtgagatcctggaggaagagaagggcaggccctctgccatgtcattcacagccacctgcaaacaactggtgctcaataaatggtgggtgagcattggttggatggaagggaaggctggaaatggcagcggctcaagtgttaacgggatggccagtccccctgtcctccagcaagctggatgcggctgagacacacattggctgggaggggggtggaccacctggggcctgggggtgt

SEQ ID NO: 916157 - DNA, 4001 bp, Homo sapiens
gtcatttctcccagatcatagaaacaacttgcccctcccacctcttggggaaaaatgggctgtttaaaggggagggagactctttgcccctcctttttgcttactttgatcctgaagagcttagaattggcatgcaggctcactcttctttccctgctccctacttgtaggtcgtgtgacctggtagggcggaaaaatggaaggaaagtgagaaaccccttctcccaattcccatggcccccaacccagcagcccatggaacagagacagaaacctgggtataggttactaagaatggcattacttggaacatggaatgaaggaaaccagtttaagggtgaaaattgaggatcccttgcgggggagatacctggaaagcccatggaagatgatggcagcagaaatccttctatttccactcagctgaccaggactgggagtgggggaagggtaaaaagttatgatggcaaatgttaccattcccctcagccaacccagaaataaaaactccccttccatctcctctcttctctgcagaattccattatcagcttctccccaagttgctcaagaaggaacttcaacatgctaaccttcctcctttcttccccagctctgaggcccccaagaaagcctagggcacacataagagaagtcaggaaagaaaacgcccacacaggtggaggtcttcttgccacctccctcagatcacatggaccggaatatttcctatgctccccaactcctcgcctgctccacattgccaaataattcagcccctattgccagggagccttccttgagagctaactcagtcccttctgctgaagtctgttaaggatgtgaacaaagtggcagcagcccctgcaataacaaagttctcattgtcaccttttaaacccagcacaggcagtgctgtctgtcagctcccaagtctggcatttagggaggggcggggctcacacaagggctcagctggaggggcctgatgttttccctgagtctggtcgcattgggctacggggctgtctccacaacacttccaaatgcagctcaaacagaaagaagggccattagtgtgacctccatttattgactgatccaagaaggagcagctgtcccttcatgcctccatcatcgtcccccaaggccagatgcacctcgagattcataagtgaaaatggaaccctagagtctcagcccatacagtctatccgcgatgcaacacttctctccccatcacgggggacccaggacctaggtgtcctaggtccaagtcctgctggcacagaaaagggaggcggggccccagtttagggtgggtctgtgattcctctgtggcaacccaggccggacaaggaaccagtctctccctccagacagaggccagagggaggcacagcccggatgggcaagggtccctgggggcatccactgaagcagctcccgccctccccccacggcctcctccaagacccgacccggaaccaactccccacatccctcagtagccaaagcccccggatccccaccgccgggtgggggtgcatgtcggcccgatcgcagccctcagaacccccgaatggaggccaaggctggagggtgctagaaagatgatcggccgggcacggagcggggagcccggagccgcgcgcggggaggggaggtggaggagggggcgccgggggagcggggggcgcgtgaggggtgcgagcggggcccggggggcgcgcggtgggtgtggggggcgccgggctcacctacctctcgtcagcgccgccattgccggtcacatgactgaggctgttgctgggatgacggtccgggccttagcaacaaggagggggagaccccgaaaggtgggggattgcagggggtgcaggctgaggaaaagggaaggagggaggacagcaccccctttcccctcacaggtgataatcaccgttcctttgacccccttctatccgcaagcccctgcccttcctccccaaaacaaaaatggaggcgctgtcccagtctttggagggagggggtggcgtcatggaactgagggtaggaggttaaatccctggagacgccaccctactcgctccccgctcccggcggagcactctcccttttctttcccagccagctgcgtagcagctcccaggagctggtggtggatgggtgggtgaagtgttggtgggtatatggggattcggggggagggcggcaattttttgaatccttatggtagaagggcctttgaggaacaatgtgggatgggaagagtcatagtaaaaagaaaagcattggctctaaaaaataaacaaatccgggtactaaactatttcaatcccctccctcatctcctgcctctttctagattgttacctcctatgacccccacaacctgctctcagatgatcattggtcagtgcctctgatttttctttccacaaacagggatatggaggctggtgcagaatgggaagcgaatacattttttaaaaagtggctcgaggtggtggtggtgtcaagtgtatggttcaaatagagttaaaaactctcaaagaagaaaaaaaaaaagctctgctctgcttcccacatcaagcagtctccgcccaatccaactcacttccctggggccacatcaagccaggtttttccaccagccaaaagacttcctcagccaagacaggcaggaatctcccaaactggcaacaacctctattcatccacccctttttcactcccccctctagactggagggctagtcactttcttcactttcccaggaccctgctgtactcttccttccctccaggaagaggacagctttcccaggaagcctgggggaatactagattccttttcttttagctggtgggctgagaggcctactcacctttacaaagatggagtgttagcaagcccagaactctgggaagaggaagggtcccatcaccctactcttccctggccctcactaccgctgacctcccacaaggttaaagactaagttttccattcccgtgcacacccttcacagcctttttaaaaaagttcacagccatctgtctagaaacccacatccttagttaggggcccaacaccttgaacaccagaattcttcagctggtctctgcacccttaaacacaggctccctgagagaagtgaaatttaaaaaaaaaaaaaaaaaggcatttctgtacagaaatttggattgaataatttattccctgtattattatagtaacaggagcaaatacataaatttttattaataaaacaaaaaagatgaaaaacagaagcaacaaatgaagacatccatactgcccataacacatcagccatatgatcagaaaacccatttctaaagagcaatggttgctggtgtcacagagttttattgcattcatcgggggaaagggagatggttggaatgaaaaagatccatcagtcttctgacaggaagatgttatatgggggctccaacccctaactgggtactcctcttgctaccacctttggagcagaagatgaaggggagagggagcttctccctatggcctcatggcttcttgtgagacagatcagtccagccagatacagagcaaagcagctttgcatcaccacaggccagttgctgatgcccagctttatgtctaaaaaaaaaaaaagtggaagcctcaagggggatggaggatagcaagaagaatgggtgccttggccccagaggcattgtagggagaggaagacaatgtatctcatcagggttctcaacattatgagattatcacacatcaactatctttggaggggctgagtgattgagttatggctctgactcctctctgggggtggagagtgaagatgacaaagaaggccatctgtcccctaggagacacagttgcagtataagacaggacagaagagaacagaaaaacaaatccaactggaaaaaggggtgggagaaggaagtgtgctaggtacacacatccagggagtagggga

SEQ ID NO: 916158 - DNA, 4001 bp, Homo sapiens
caaactcagtaaattccacaattttaaaaaacaaaaacctttcaccgtgcctactcacatttttactaaaatccctacacagagccatacattctgcttttcattttacttctccaagctgctgccttcaccaaatagactccacgagcctcccaagtggtatccaccaatatatgtgatactcaaggaaaagtaggtattaaagagtaattaattcaattggtacgaaatcttttcttttaaaattttaccttaactttaaaaagcccttttcttgatggaggtgaaacagcataaatcctttgaggaaacggttatcctttacgtggactctccatcagccccataaggtgagtggcataaagaggcatttttctgacagtctcagttccccaaacactagtcctaaacttttgcatggatggtaaatttcacacacacacacacacacagaggcggaaaagaaagaagagaaagaaacatacctggtttattttctaaacaggtttgataggtttggttcacttgaaagagcagagtatttacttataatcttttaaaacagaagtgggagccagagcgctgggtaaataaaaacttcagagagttttaaaaccctgcatcttaactcacttccctttggttcaaggggatggcacagcaaaccccacggcaaatgagattatgcaacaggtttttttcctccccagcttattcatcacaggctggttagaggtgtgctttctccaatctgagacacccacgacttcaaaacgccaagaatccttgcagttgatgtttcctaaacttctttaggattttgcagtatccattcattttcagatctacttgccttttctctggttcattattggtattctttaggaaataaacccagcatctgaaaatatttccctctgtggtgtttcattacatgaaactacacgtgatacacagaccctgggcttttttatttctcacgttttgcagctagtgtaaataaagaagtcactaggcgtcgggccccccaacgccaagacccgagcccctgtccgaaaattgagggctttttcggttggttggttgaagaaagcagcaccgtcaccacccaggtggcctcgctgcttacaccaaaggcgaactggggataatgggaacagtcaggccagggccccacttggcaggcgtgttgtgtaacagtcgcgcctggaagtgagcagcttcgcccgcaaaggtgccgcgtcccgcggcggccgctcctctcggcggggcccggtccaagcgccgcgcagcggccgggagcgcacccactgcgaccccgcgcccggccgcacgcccccttcccgctccggccagcctccggccaggcctacacccccgcttcaaacgctcctgcggcccccggccgcggtcgcccccacgccgcctcccgaaagggtggccggtacgcccgggaaggcagagacggcggggctggagcgcggcgcccggcaccgggagtcggggcgcgctgcggagcgtccatgcggccgggcgggagggcgccccgggccccgcaccctcccgcccgcacaccccgcgcggcccgccaaggccacttacttttggggccgccgacctcccaattccctcagagggaaacgaaagttgtcacggcgtctcccctcgggcccccctcgcctcccggacttgcgaggcgccgccgcggagccgagagggcggctgcgctcccgctcgcgtcccgtcccgtcgctctcctcctcctcttcttttcagtatattatcttctccttctctgaggggtgggttggggcgggaggcttaggaagagaggagacgctcgcaacttttcttcactctttctcttccaccctcccccccatcagccttcaaaaaaaatgtcgaaagagatgaagaacttagggaggtaaaggtggggggccgcgttgtgaaagtgggggttgggggggagagagaggtggtaataatcgtttaaaaactgattaaagccccccaaacactgatacatagaaagagggggaaaggcgggggggtggggtggggggttgggggaaagagaaagagtcgctggtcaggaaacttcaagcgcggatgaggtcattggtttaaaaataaagagatggcgtcacttgaaaccaatcccagtgaatgaactcagcggagccccggggaaaggaggagacaggcgagggcagggcggtgggcgccgggcggggccgcgcgctcgcccatcccgcggccgcccgagcccggagcgcggctccgcgcctcgttccggccgctcggggaggggtcaggtcatgttcccttccagagtccggcgactctgaggcaggttccgcgggcgccgctgggaggagccggagctgccggaggaggcggccccgcggcctcctcccccacctctccctcctcctcctcctcctcccgcgcccgcgcgcccgccccctacccccgggctcgcggccccgacccccgggccggggtgtccgcctccagtgctgcgccccaacaggtatcggagggttttctccctcacccagacgcagaacctttccctcctccttgagctgtttccagctgcctcaccaacgtcaaaaaacgcaaacactgatttgagagaattacactcgctctgtaaaaagtctggcgaatgcaaaaggcaaggctctgccatctctcaggagagaagttacaggtacttcaagaaaaatcacactactgttgtcaggcattcagctatctatatgtttatggttgaaagcccccacataaatgttcctacattactttactttgcttatatttacaaatacaaggataagcagcctacattttctttaaaaatgttttctacaggaggcagcgcagaaacatctttaaataagaccaggggttaaccgcctcttgagaggtacaaaacccttgttgatttaactccacatacctcgtgcattttattatttgaattcattaaaatgtctgttttgagatgacattatgcactttggaaaacgagagacctgaggtggtgacaaaccaggacttggaatcactgaataggacaatcggagctttattccaatgttctttgagcatttgagcatgaagctgcttctactgagaagtactcacgtggatatcacataacaaagatgtgattaatgacggaaaagcaccctgcgagtggactgctccatgagccagaatttatgtgtaggaataatctaactcttcaaatattccatttacaatgtgccggattgggacactagaccctaaaggcactgtttgctgtgggatatccatgtgcaccctgcctaaagcacgtttttccactagcaaaagaactgataagcaggtttgggtgggttcgaaagataatacacccctgttactacttttctgcctttaagtcctgcaactaaaggcattccttatgattggtaatcattgaaggttagtgttgcggggtatggccctgggaacttctggcccatcttttataggagggaaaaaaaaagcccatttgaagatgggaggcaccctagcacctctggcagtagtaggtaaagcctgaaggccacagatggagaagcaactttgagcctgtgcctctggcctcttgaagactttgctaggggaagcaaatctctcccactgctccctgtcctctggtggccaggaggtgttactgcagcttccttgggattatttgtgctctaccaggaaacccctaaaaatctaactgtagacctttgttggaggtgttgggatttttaggaaggaagaagaagatagtccttttactagtggtacagagcatggatcttgcctggaggaaagattcatgagaattaatggtatcccctttgcatgccaaagttccagtaaccttgctttaactgacatggcttgaaacgtttctcccctttcctcagttacacaattaagtttgtgtaatgtatgatgtggtgcca

SEQ ID NO: 916159 - DNA, 4001 bp, Homo sapiens
ttggggtctcggtcaaggtcagactcgatgtccgaggaagagtcagagctgatccgcaggcccccgagccccagcactggcaacggcggcgagctgctgctacacgagccgtctagattggtctcgcaatgcagggagaactcggcttggaacttactgaagccacctgccagaacgagaaaagcaatcatctaacctgagaagccgtagtagttttcacagcttgtaagaaccgcagcccggcgcaagaaacaccacaagcatcctacgaaccccctacatacagaaccatctataagagaaacacactttaaatgtgcaccatcgggaatggaacgaacgggcccgcctcgccagggaacccttattcgcttgaatccggaaatagacaaaatggcaactttttggaatattttgagagctaagatgtgccaatttgcatccccaacaatctctcccgtcctgcaaatcttaattcaaaatcgaacgatagaaaacagggtgatggtggaggatgttctggctaagaaggcgcagaacccgttagaaagaaaccgccggtacccgcagccggaagcgagtggattctgagccggcccggttctctggtgcggaacgcgcggttcgcggcccctacctcgccggctgccggtccctaggcgggcagcgcggctccgaagctccagctgagcggagcagaggtattttcaatccacgcgccccgcccgcagccctgcgcccctagccctgccccgcgcgcggagttccctgggcgcgtaccttccaggtagaacgcccggcagccctcgtccttgagcttcttgagcagcagcccgagcaccgactcgccgcccgtattctcgttccagtcgctgctgctctcgtcgtagagcaccactgtgtcggtgccacagcgccgggtgaagcggtcccggtcctcgccgcgcgtgaagagcgcgcgcaccggcaggttacccttctgcaggcgccgcagcatgatgcccgggatggccacgttgatggccgactcgatgtgcgacgactcgtatagctcctgcggccggcagtccatcagcagcagccgctcgttgcccagctccagctgctcgttgagccacgccaccgtcttgctgatcgccatttccgacgcgaagggcacgggtctgagcgtatctatcatgggggtcgagctgcgggagagggcggggtgcctaccagacgcccctcggggcaggcataggccgagcgcaccgcgcgcgaagctgccgctctcggagcggggtttaattccgcctcgccttacccaagccgaggctagcggttggggcagacgagacagaagtaaagccggaggttctctctgcacccagctgcagccgctggctcttagtgtcaatgaatctctctcaatgaagctgcccagatagtttttgttcctccccagtgaatgaaatccaattaattcggactccgtgctactgagaggggaggaaaaaaagtctagcggcttctaatccctccctccaaggctgcacctcaaatctacccgggcgtctttctccccggattatttaagactcgatttgctatctcttggactcagcctcgcacaccccctgcgcgaggcagctcctcaatggatacaaacagcgagcgtctcaatggatacattctccgggccagccaatgagcgtgctgcggaaggggctgttgccgtggggacgggccggctggaacaggttgtgttgatgaattgttaatgagtttgtcattcacaaaaacggaaaggaatttccgctccggataagccccagtgcaaacaagctgcaacagcgggctcggcgggaggaaggagaaagaaggggaggcggcagcggaggaggagcagggcacataaaccagggcacttcagttgtctcatgtttccttctgttgagagttcacacttcgcgtcggaacttttgcgcaccaatggcgcaattagcatgcacaaaagcccttgttcgcgacgcttgcgttcgcgagctagctttaggaaaacttgtgctgacttttcgttctttgtattcccttcaaactcatttggacccaagttcgccttaaccctcccctcccccaaccccccttctttaggcggtgtgtggcatttgtttgccacttttaaaggcccagctctgtttgctctgatgttcttttagccgaggctgtgttggggctggtgaactgactgggctttagtgaccgatgaggtgttaaatgctaatccaacatatttcgaaacaaaccaggattttgttgaaacattttaaagcaaacaaacaaacgtctggttgtgcagaaaatcagaagaaaaccttttttcttaaaataacattttattttcattaaaacaatgtagagtgcagaaacaaactcttaggtcagtccagtgcttttactgtattccgctccggcggcgtggggagttacaagccattgttcgggggaatctatatctctccccccgccccaccaccaccatcgcctgctgggaggtcgcgctggttaatgatttctgggcaaggagctcggcttctgacgggggagccggtctggcggggctgcctgagcgaggtgtgctgggacgcgccgggccgggccagcagtccccgccatgggcgaggcgtgaggaagtcctcccgcaagacctgcaggctgcgggggctcggcaggggggctcgacgattggttacagttggcagggaggcatgtcagagggggcctccccagccctctcctgccgccgcctcctccctttgtccagcgccgggcactccggggagcaccagccgcgcctgcgcgctgcgctccctgccaccgccccgccgtccccgtctccccgcttgggcacggggctgtgcgcgacgcagtggacgggtgcggggctcagcgagggactcccgggtccatagagatctggggagggtggggggagcaaggacgagtgcctgccgggacccccctggctcctcgctcccaaggagtcgaggggaacgtctctaccgcgctgcaaagccagcaggtaactttggggaggtgcgggccaggccagcgagcagcactcggcccaggcgccgcggggcggacggattggaagccggatggaggcgtggccgggtgggggccgcggcggcggggaggcgcgttcccggcgcgcagagctctattgttatataaaagtgccgaagcctgcccctcccgagcggaaaaccacctgtgtgcggccggcgcggcgcgagagggatgcagccggaaggcgcgggccctaatccggccttccctccctaaaccccggcggaaaagaggccgcgctttgtcccaccgctgcctgagaggcggaagcgggggcagccgtccggcggggtgcggctttggggagtgtcccttgctgcgctttgcgcctaccgtgaacaccgcgagggcgcctaaggtcgcggggtctcccttcgcccgacgccccgcacccacgggcatgcctgctaacacccccgctgcaatttgcatttttagtcacccgcctcttccctggtttgggaaatgtaggctaaaaaaaggcggctgcgaggcctaggttgccaattttggagctctgcttcaggcaggccgcccctggaggagcgtgttcgacaaaggtggggattgccgagctcctctccgcaccatttttgggcagtccttggaacaaaactcgtatatttcactgggtatcttctagtttcagccgggggaggcctgcgctggagttgactccccctgtcctccacgatctgtcacagaagttcccaccccgagacgtttcagtcattgggacctggggacagggagggaagaggcaggatgcccttcagcggaactgagaagagcaaacctgttggaggttcagcacaggacctccaacagaagagaaagggagggaagttgggtttctactttgcctgttttaatacgcagctacttgagta

SEQ ID NO: 916160 - DNA, 4001 bp, Homo sapiens
aggcggatcacgaggtcaggagattgagatcatcctggctaacacggtgaaaccctgtctctactaaaaatataaaaaaatcagccgggcgtggtggcaggcacctgtagtcccagctactcaggaggctgaggcgggagaatggcatgaacctgggaggcggagcttgcagtgagccgagatcacgccactgcactgcagcctgggtgacagtgtaagactccgtctcaaaacaaacaaacaaaaaatcctacaagcagaattacaagatcgaagggtatatgtatattatgaaagcctgatgtatactatcaacttgtattccaaaaaagatatacactcagtagtatatgtgggtgtctagtctttggtttgttttgattttaaaatgctcagatggtataatgagaaatcaactaccttctgattaaatgtgtggttttagtccctttttttgtttgtttttgttttgtcttgtttttgagacagagtctccctctgtcacccaggctggaggagtgcagtggcacaatctcggctcactgcaacctctgcctcccagattcaagcgattctcgtgcctcatcctcccaagcagctgggactacaggcgtgccaccaagcttggctaatttttttttttttttgtatttttagtaggggggcgggtcttgccatgttggccaggctggtcttgaactcctggcctcaagtgatccacccacctcagcctcctaaagtgctgggattacaggcatgagccaccacgcccagccaggtttcatttttaatatgaaaaatctttatttatttttgagacagtctcactctgtcacccaggctgaagtgcagtggcatgatctcggctcactgcaaccttcgcctcccgggctcaagcaattctcctgcctcagcctcccgcgtaactgggattataggaacacgccaccacgcccagctaatttttgtatttttagtagaaacggggtttccccatgttgcccaggctagtctcgaactactgacctcaagtgatcctcccgccttggcctctcaaagtgttgggattacaggcgtgagccaccgcacccagcctgaacaatctttaggttaggagtattccagccgggcgccgggctcaagccggtaatccaacactttgggaggccaaggctggaggatcggttgagcccaggagttcgagaccagcctctctacaaaaaaaatagaaaataaactagctggacgcagcgcagacccctcacggcgccccgaggtgggaggatcacctgagtccagcgagatcgagactgcagtgagccgtgttcgcgccattgcactccagcctgagcaacagaataagaccctgtatcaaaaacaaacaaaaagtcttctggtgcaaggcctcactgtaaggtccctgggttcaatgctccgcgttctgggatgtgaatgtggaaaagtaagtgccaaggtgggtgtctacctgagctccataaggactcagtacttaggatgggagcatggctctgggttccattcctgacccctctgtggcctcagactctgcccgggagaggatgaaaagcacaagtcggatgcactctatagtgatcgctgtgatactcattaagagtcttactccctcgactccgacaaactcaaggccaagctatggagtccatctcatgctgacaccgtcagttctgagcaactgtaaaatggggacagggtggcccgggggcctactgacctgaggtgggggccgcgacagcccggccgctgcggggtcagcctgcggtctccgcctgactccagctctcctgcgccccgcaggccctgggcgctacccacgtcagtgagtgctcacaagtctgtgaggtaggcggcgccacagagagaaactgaggcgcgggagcccaagccacttgtccagcgcctcagccgagcgcgaaccgcgctcggggatggcatccacacggcccggccccaggctctccctgtcagcgcccgaaggcccttcgcacctccagggggcgccggcctgcgcgcacgcgcaatggtcgcagccgcgttctctttaagaggactccttttgcctccgccgaccccttcgcttccgctccgcgttcccacaatgcagtgcggctgagcgcctcggagcccgcggggacgctgcggggggacccgtgctgaggcggcggcggcgacgtgggctgcggcgggcccgcggcgtcgggcggtgcggatgtcgggctgggcggacgagcgcggcggcgagggcgacgggcgcatctacgtggggaaccttccgaccgacgtgcgcgagaaggacttggaggacctgttctacaagtacggccgcatccgcgagatcgagctcaagaaccggcacggcctcgtgcccttcgccttcgtgcgcttcgaggacccccggtgaggcccccgcgcccctgccctctcctcctcggtgcctgaggcccccgccttccctgctgtcccctcccccagggctcccctccccccggcctcccctccccccgcctccgcgcagacccctcacggcgccccctcacgggtggaggatgaggcagcctctcctcgcaggcccgggccgtccttcgcgccgtcgtcacttcctttatttttattattccaatattttacttagaaacccaaaagctgagcctttggagggcccaagcccgcctgcaccggcctcggggggtccaaatgagccttgtccgcctcctgcctggggcagcaccgtagggggaagcggccgcggggcagcgcgggggtcgccgttcgcccttcccgctcgcctctcccccggcccgtgctcgccgtggctggagagcaagctgcagggtcgcggatgccgctggaggtcgtggagggatctctggtggaatagctcgccgttcgcgcgccccgccccgcaggccagggcccgggctttgtaaagggatcacggattcgggaaaacttctaaaacagccggagtggggctctgatttcacttccctcctttgatgagggaggcttggcgagatgctaaaggttccagggatttggaaactctagattcctaaccccgctctaaggagtgcttgtgattttgcaaacagcgtcggccctcaggccggaaaaagcccaggaactttcaaaactgtggttggtggtggttagcagctgcggcgctgacctggtcactccactccggccaaataagagcccgcaccctgttttcctagcatcatttgctcccggggaacgcggaatgttcgtagggtgtccgacctacctggggtggacgtattgatagggcaaggggagcatctgaggaagggcaggcaggaagcaccgcgaggcgttgatggctgaagagtcgactctgacagctcatccctagtatctcctcatttgcctcaaaaccggaactgggcatttttacccctaagccggagaaggctatgcctcgcttatttagtaaccgtgccattgtggtttttcaacagttgctatgggtcaagtgccatggtgtgtatttagctttttttctttccttcttatttttttagattgataaattaggggtttcaccatgttgctcaggctggtctggaactcctgagctcaggtgattctcccgtctcagcggatcaaattgttaggattacaggcgtgagcaacccgcccagcctgtatttagtatttttaacaatttatgaggtgtaggtactattttttttttttttttgagacaggtcttcactcttgttgcccaggctggagtgctgtggtgcgatcccggcccaccgcaacctccgccacctgagttcaagcgattctcccgcttcagcttcccagtagctgggattacaggcgcccgccatcatgcctggctgatttttctatgttcagcagatacggggtttctccatgttggccaggtttgtcttgaactcctaacctcaagtgatccacccacctcagcc

SEQ ID NO: 916161 - DNA, 4001 bp, Homo sapiens
aaaagaactaggattttaattaccagaggtcagtgtttgcctcttggataagccagagcctgtaggggcagaaaggaggaacgtcagcatctgcaaattcttagaatgaaagaatgttccccagctccaagccgcctacatagtacattaatacaaacatacttgcagtctgagcgaagatgggaatggaggctgaggaggtcaaaggacgaaaggtcagccctaaagacagggtgttttgttattatggtaattacaccttcataccttctataatattcattgacagacggtgacatcaacaggtgtagtttatcatgttctgtgtagagaactaaactaccctactgtatttgccatgcccccaattccaagaaaacggcaaaaaattagcccatcccattcctcatcacaaagatcttaactgcacccctgcaacacaagacttttccaataggacaaaacttcaaacagcattgtataccaaatgattgcggatcaaaattaaatttacaggaacacaatactgaagcactccactgttgctgtaaaaactgctggaaacagaatctgtcaactggccaaattttatccttaattattatccaaacagccgtcctcttcacatctatccggatgatgctaatctactaccctgtccactaggttagcaagttgtaggaacaactcttcaccatttctcccaccctaagaggtactggggagtagaatgcctgtggggggcattgggtggcaacggttatctttctctgcaaaattcttacaagtgtttgtggagcgtcacacaagatttagctactctaactgcacgcagtgcgaaaaccttttaaagctatgaaggggagtaacgctcttgcaagctagaggcacgcactgctgcgtttgtcaaaaaaggcatttatttctgttccatctgaagtctttcatcttcccattctcgactggaaccctcccacggcttaggctgccagctttcttcccttccagcaaacactgctcgagaagttggcagtcctgccggctttctagactgccatttaccaagcccctaccccagcccccagccccgccaccacccaccaccttccctcaactccccactggaaggctggcaagatctcctcccggcccggctggaaacacccacgcagctcccccctccggaacacccagatggatcctcggcgcaggaaccacacagaagggggaaccgctgctccctgatcttagataccgttgctaggtggcgctttccccccgcggagctgggtaattaaaaaaaaaaaaaaaaaaacttcggacgccgggggtctggtcttctccacaggagcgcaaaatgcatctgcgtcctttctggaagcttctacgccccaagccgccagcagtattcccgggacctgtcaggcgcccttaggaaagcaggatcggggggaaggaaccccctgctcccggctgcgtatcggcccccgcgcccatcctcaccttcttgatatgagccgcaatgtccttctctatgttgtatttctccagcgcctgagtagcgcactccaccgagtcctgttgcatctcttccgacatgtccgcatttttgatcacggcctttcggtcgcacatggttacctagtgggcaaggcctggggtaaggggttgagttgggccgcgccccccaggcactaactgcccccaccccggccggcgccaccacgggacgacgccccccaccccacttctcaggaagcgcgggctacgcggagggctaagtccggagtggggcgaaataaggcagcgaggacaccccctggccccccgagtttctcaccgtggagaagggggctggccgactgcaacggtctcctgggggaggtgctagcacagctcaggcccggctagagataccgtcgctaccgaaaccgtggcgcatctaagcagccccacgccagccgccgccgcctagtgctcaggccccgccctgctcccgccggccccgcccctcgccgcgcgaccctattggcttgacgcagcccacggcattcttccattggtccattgactccatggttccctcaggatctttctcctgcattttgttgcagaccacaatgcaccgctcacggcgtcggttgcccgggcaatgggccgcacgctacgaggcccacacacccagaaggtggagccccggccgggttacgaggaccacccagctgtctggagaggtaggaagggagcttctgccggggccaagggaagtgattccaaattcacggaggttgtcccagggtgtgttctcgaacaacagtctctagaagttggtggccattcctgcccccacccccccgcccccccaccacgacaggtcgcatgatctcgcaccccaggttagcaggattacgacagaggtggcctctccctttactgaaagggtatctctgaagcagggccggcttcgtgggtaaaccagcagtgcagtctcacaggagggacccttacgttttcattttgcactgggccccatttgtagtcggttctgctctgaaatatttaggggagggcatcctcaggattgagggagggcttcaaggagggagggtgtttccttacgaattaagggattatccccaagagtggggtctctgccaagcaatgcggacatcctttaaggggttggggatggggatccgggtggatttgggagtgttgagccccggggtttttgtccagggtgaagcttcttgctcaggtgaggcagtctttcctgtgtgggagagattcttggttgggatttatctctgaggaggaggtattctaatggacgaaaaagcggccgttagagagatgacgtcccctctggcttagggaggagacacgaagtggttaaaaaagcaagatcttgggggagttgagggacaagtcagatctggatttaaatcccagcactgtcatttactagctatttgaatgtcttctttaagtaaaggaggactaaatgtaaaaggaaaccagttcatacgcttgttagcagtattaaacatttgaagttctctcagcacaatgtgaggcacatagtaaatgatcaatgaatcttatcaataattgtcagtttatacaactatcccaaaggccacagcaaggttttgaacaaccagctctgaaatgcctataatgtatttttcgaacctccataaataagttatcaggttaatcatgtatctggaagcttcctatttacatttctacattttcctctgaccatctactctcattactccttaaaacaatttgtggctgggcatgatggctcacacctgtaatcccagcactttgagaagccgagtcaaggggatcgcttgagctcagtagttggagaccagcctgggcaatatggccaaaccccatctcaaaaaataaaaataaaacaatttgagcagaggcacacaactccagaaagaaaaagatgggaataggccgggtgcggtggctcatgcctataatcccagcactttgggaggccgaggcgggtggatgacctgaggtaaggagtttgagaccagcctgatcaacatggagaaaccccatctctactaaaaatacaaaattagctgggcatggtggcacgtgcctgtaatcccacctactcaggaggctgaggcaggagaatcacttgaacccgggacacagagtctgtagtgagccgagatcgcgccattgcactccagcctgggcaactccgtctcaaaaaaaaaaaaaaggaaaaaaatggcaataattagaaccttttcaggttcaacatatgcatatcaattaaatcaacagctttttccagttccatgtttctaatgatgagattcagggtttgaggagttataatattactatagtacctctcttgaggaagaaataggttgacaacaagtgaggaccctggaaatgcaaatgacactaaagtaaagccacggtgactccactaagtagaaaccccaggg

SEQ ID NO: 916162 - DNA, 4001 bp, Homo sapiens
tgagaaaaggtacatgctttagtcgaatccagcttgccagtctccgcagccaccagcaaccagtcccacgctggcctctcccctcccagagaccacagcacctgttaggtgctttttctttcccacctccaaagcaacgcttgccctttccttttgaataatgtccaactgcagaatcctacaggggtggcttgttttgactgctgcggcggcccttatttttgttaatgttgattacaatttctgctgtgctcaaacctgtagcactcataaaacatgcttacacacgcgggggacaattggcgatgctccctgctggctggagccaggcctgggaggctctttgggggatcgattttccgggcaggccggtctggctgtcccctaacacgtatctgtttctataaatacccactacccacggggaggtgggggaaggacagagatgtttaccgggtcagggaagggaactctgggatgcaaggacgaaaaatgaggaaagaaggaaagcagcaaggaggaagttcctaggaagaggaggtcatgggtgggcgagctctggaggggaagtaaggggcccacgccacgaatcttcctttgtggctgcagctttgggctcgcccaacttaaccagggcggcgtcgacgagagaccatcggcccgaggcgtggggctgcttgtatctcgacccctcttctcccggcgtcagacccctccaagtccgggtgcttcggcctggggcccctcccgcccccaccgcccgggccgcccgcgggctgggtctcaccgtgtgggctgcggcggcagcgttgctggcccggagaggcggcagggcgatgggggagggcgggccagtccccactccgctccgggtggcccctgcaccgagccccggggaagcctgaagctgacgaacggcgctgtccccacctcggcctggaagccacgtgcgggaggagacaaaagagggtcaggggggagaaagtcacccagaccccccctccaaccccgctgggcagcgacaaccctcttccaaagaaagacggaggaagagaccggggcagtaaaaacgggcgttcgggtcacggctccccagcgcacacccacgggcggggcgcgggcagctgcaaagttaagtggggccctggcgcgcgagttcgcgacccggcgggggagccgggccgcgccggggctaggcggcccacgttgcagacggccagcagccgggaggtgggtttggacagctgagcagggagccacggccacgccaagccccgggcagcgcagggcggggcggcaggcctggacggtccccgcccgggcccccggcaggcagaagcctcttcgggccgagggctccccgcggaggggccttcggggccgcgcacaaccctgcatggagcccggggcgcgtcgtccgcccgggggctcccccgcgccgcgccgccgactttgttcgaggtcccgcaggcagcggccgcccgcgccacaggggctgcccagggccggcgggggtccggggatgcggcgcggcggcacggcctccttaccggtcgggtaggcggcgggagcggcggccgaaggtttcctggttaacatggccgctggagaggaaaatgcatttcagggctgccgtcgccgccgccggtcctgctgctacttctggcggccgccgccgccgcctcccggccgcccctcgcgcgggtccccggcgcctcgtcgccgcctcgcgtctgctacagccagacacacacagtccactgcatcccctcggccggggcccgccgccgcgagccccccgctctcctcctcgccgccgtcctcctcttcctcgggcggctgcagcaccctccggcccgtgcacatgcctcgccctcccctgcgcgccgcgggcctccccgtctccctcacataggggcgcggggagctggaagcgctgcgaggaccgaagaccgcctggctcgggagcctctcccgggcccgcgcgcgcgcgcccccgcgcactcacacacaggcgccggcgcgcggccccgcccccgccgccctccgccgccctcctccgccgccgcaggccccgcccccggctcccccggccgcggccacgcacaccccacccccacccaacctcccgcccggctcctctcagtcccccggtttgcgcgcagccgcccctccgctccccggaaaactcggcggcctccgctcgccctcctccgccccctccggccatctgcactgcttccctcggctccactccggcgaccttttcccctccccggccccgcggcgccccttctctgccctacagctcaacctaccgctgctgccctccggccgaaagcgccgcagagacccctcccctgccatgcgcacccctaaacataaatgcattttcagctcttcgaactgaatggctgctcacagacagtactgcttccccgtccccccattcttggtcccagcgacttagccactcccctctccccaattcatcatgtagataacttagttgtgcgagggtcacctcggagaggcaagtcccgggaggggcggccgctgagctcgttgaccctgagcaggggcgaaagagggggctgccctcccacctccaccacacaccctccccggtttactgacaccaagtgaccgctcgccagtcgctaggacaaggggaggcagagaggcgcgtgtggacggcagctggggaagcagttggctgtgggttgctaggcaaaaataaacatcagagacatctcctatttccttacaactccgagcctttcccctgcgcggccactgggagagacacaccttcctttcagctctgcggtgagggagcgacacctcgaattcctctcaccccacccgacacatctctttcccccttcccttccaagacacgtggagaatttccctgccttttttattcgccatatacaacctctcttttccttgaagaccaaaaaaaaattgctttcccgtctcacatccgcgcctcgtcgtgcgtggcacacagtgcgcctctgttcaaaggtcacaggttttgccacttcaactgtgagaggaggtggggtgggaaagcccgacaaatcccggatgacggggcagagttatgccatgcacttccttctcgagaggtgcctagtttctgaagttctcttggggccaggggtccattatgctctgccccgcccgagtatctctggctcctggctggacctactgtgcaggcccgaactagtgcagactccagtcggaagggagccacctcctgcggagtttcatccactctactgtttgcaaattgtcatagcaacctcctacagagcgcatccgcagctttatacaaacgccaaaaactgtttcaaggtacagtgtgaccctctcagagtctctgggactcctaaagaggcctccaagttagggtcactgggagagggaacctgtgacaaaaagaattttccctagtattacgtccctccaaacaaaacaaaacaaaacaaaacaaaacaaaacaccctttcggggccttctcctaataaagtagacccacagtaaaataatccaataatatgcctttagaggaatcatgacctgaactgaccctagcaagaaatatccccctatgcttgtcactggcgaccatcacatttaaatccacatgcggaagcatatttagtgtttagaatcgactaaaagaaaagggctactaagtagcagagatgacactagaaccggttttctgactcccagtctgatttcactatgacttccatcacactactttccttacactttcaagaaagctcacacctcttttttctcctttcaaaacaattattttcataccattttcctttttaaaatgagtactccatacaactgatgttcaaataaaaaaatgaaacaaaaaaatcaattttaatataatatgacacccctttttgcttaagttattcgtacaatacttcagtagaagctaaatatgccactgttttctc

SEQ ID NO: 916163 - DNA, 4001 bp, Homo sapiens
cctactgcaacttagaggggcacacagagataaggaaattacagtgtgggtcacctgcccttgctgctcggttcccacccataatccatccattatcctgctcttctgttcctcagaccctttgacactgaggtcaagaggaagctgagtcagttctggggctgtaggaaatttgaaacataggccccgttctctttggtattggaagcaggagtggtctggggatgctttataaaatcattcattatcaaccttagaagccatcttctctgctcccctcattttatagtccagagctgggaaatgcctagtcaaaaagacagagccaggactaagaccccaggtttaatgactcgcaggccagtgttcattccaccacagctatttttacctaagttattttaatattttattattagtttcgatcatgaaatgaaattatctatgtttagtcattctcaaggctatatgtgtttctctgtaactttgagacaatctggaaaatagaaatttggcaaagatagatagatacagatacatagatagatagatagatagatagatagatagccagccagccagctagcttggtgtttgcacacaaaatatctttgttcactgggaaaatcctaaaatgtaaaatttaaaatttttaaagttatttttctattttgtctaatttatttccaaaacaagatggctttcaagtgaaagcataatagatataattaataatcatatcatgagtcttggtcaagccttgctattaggagatagttttcccagaaaactgtcatttcccataatgaatgactaatgcctgaacaatacacatactttgaagtcaaataatttccaattctttgttttcaacattttaatcgggttgtcagctgacaggctggtaaacataattttagatgacagatcaccatttgattcttacacagaactcaaaaggagtcaccgaattagacgacattaattagaacaggcttcctcactgggttcacatctacaccaccaagcaattggaatcacattgatcccgagcccgggcattctagcaagaagcattattcacctatgggtataggcattaatttggaaaaaaaaaaaaaaaaaaaaaaaaaacccagctctattcatttttctaagagctgtatgcccaataagatttcacattttattttcaataattatcaaaatttgcacaccagatatattttaatggtaacttaccagaaagaaatttttacacatgaggcttacggtatcaggaaatttttaaagctataatgattgatagaagtttctaaacataaacgtatattaaattagaataaaattccatagaggaagtagaaaaaagagtagaaacaaaagggaaaaaagaacaaagtaaaatcatggcacaactcttaagaacctgttcacatactatcagatagattttaatgggtgtcatgtccgtctggttttgcattcttttggatatttttgaaagagcggtgtaattttattttaaaatgtcactatttacaatatgatggaaatgacatcctctgcaactatttaaatttatgataaaacgttagatgtcgacttgacaagtacaagggagtacacaatttcaaaactccttttagggaatactcaacaacaacaacaacaacaaggtatgcaggccatggtcctgggcgagtctggtgcagccccgtgtctgagggccaagcccacggtctccgtgggagccgaccgccagccctccgcgtacctccatgatgcaggccagctgctccacctcattctccccggggaacagggggtagcccgtgtacaactccgccgtgatgcagcccaggctccacatgtcaatggccacgtcgtaggggtggcccaggatcacttctggggatcggtagaaccggctttggatgtacgtgtatactgcggaggcaaagtaagagaaacctcgtgggacaaacttcttaccctccagaacgctctcccccaggacaacttctcagttagactgcgcccccgctggcagtgaaagggaagtgcagctggccagcacttagaactcccattacaccatcacagcatcaaatccgccagcaacctgattataaaggaggtgtgactgtccctgctttattgataacgaactccaacgtgggcactgtcgtaggaaagtgaatctaagtgagccaagtttataacaaacaaacaaaacataagacaaatataagactaagttttcaaactgtcagattgatttggggtagacagcttctgagtcttgtgacttggcaagagagttatcaagttagaaagggagcatatcaagttagaaagggagcatgcaaagtctgtattcaatatagcatgtgcacttattgtatagaaagaaaattctcaacaggtgaggatgaacagactgaagtcgaagaaatggaacacggtagttatttccgcataactggggtttctggttacctggggaggggcagggattctgtaaccacttttctgttgtttaaattggttattgtcagaacataattctgtgatttaaaacaaaatagagatttaataaaaataatgtttatatcctgcctgcttcccaaatgtgtttgtggtactttgcaaagtacacatgcacagagtattttagaacatggatttaatggtatttacattatgtttagtatgtgccaggcacgattccaagtacttttatagataagccctttcaacccttacattaattctgtgaagcaagtagtattattgcctccaatttaaagaagagaaaactgaggcatacagaggttaaaatgtcaaggttactcagctataagtgacagagctgggatttgagagtaggcagtttaattctagcatcaatattagatactgcctcacagttaaaataaagataaaaaagatgtcagaaaatatgcaaagggggaaatgactgctagaaaccaaggataaaataattacgaattcagttccgagcatcttggcagccaagataaatgaaaactgaaaagttacacagctttcaacatctgagaagggaaaacatacaagttctttgtgggaagcattactttttagctggaatttcttataggattcatacataaagacacaaaggttttatgtcctcaaaaattgatctgccagagaggcccagatggaggacacagaggcatgctgttgccatggcagtgtggtcctggctgctgcggaggcaggtgccagggtctcccttgcctcgatgtgaagagcttagaaagcggaggagaggagaactcccctggccgtctctgtgaccccagccgccgcattttacacagacaggagggaaacagagggagagaagggaaggacggtgtggagtagaaatattaatggtgggagagaggaaaatgaatgaaaataaagagactgattcaaaagaaagtgaagaatacaaagatgaatctgaaaaggacctggaggggttaactaatgaaaatgaaaaaagtgatgccagcataatagagatggcttgtgagaaggaagagaatattaaccaagacttaaaagagaatgaaacagtaatagaacacagcaaacagctttctgatcctgacaaatctttgcaggatgaggtctcaccaagaagaaatgacttcatttcggtaccgagtattcaacctttggatcccatatcagattcagatagtgaaaactctttccaggagtccaaactagaaagccagaaagacttggaggaggaagaggatgaggaagtaaggtgatacattatggagaaaattgtacaagctaacaagcttctatagaatcaagaacccgtgaatgataaaagggagtgaaaatttaagctcaaggacaaattagttgatctggaagttcctccactaaaagacactaatacttacaaaagttattttgaaaatgaaagaaatatatttgggaaactg

SEQ ID NO: 916164 - DNA, 4001 bp, Homo sapiens
gagctgtaaagtgtctgatgatggcacacatagtggatgctcggtggatttgggctctcttcctttgcatcctaataggttatgagtctctgaatcccattaaaagtctagctactggccaaaaacccatgtgtaatctttcaggcctgaccacaaggcaatccacaaaggcttcacctggcaagcctcacgggcaaagctgccctccctgcaccagagctggtgcacagccaatgcattgcaatctctggaggaagctacagccaaggactgagacccctggctggccatgctcttctacatgtctgcatttctaatcaagatccccctacagaggctcctctccaacacctccttatcaagaggaaggagcaagcttcagcaccctttgctctgctctcagtattcagtacctttccactcctggctcttccactctctcagtgccttcccgctggcccctgggtccataaaatgacaggagccttgtgtctgggctccttaggcaaatgagacacttccttctgtctgcattggtacatcccgcccttgcccagagccactccttgggggaaattcagcctcctattcagcctcttgcttatactaccacagtcagaggttcaacgcttaacttctactttcctcttggctggctgccttctttgactactctgacacctggcagcttagctcactccagcgcagcttagctcttaacaccccgaccttccataagcacctccccaccctgctactgccccaaaggcatacctgccgctgtcagagtcaccttttgcttctttggtgacttctcctctgccttgggatcctgggttttaatgctagggtggaaaggtatttctgaagccttgagctctgaggccggcatctgattgtgagcttgattctcctgtccaggaaaagaggtttgcaataaataactacttaggactctcctgggggccataaaccatttatttaaccaaagacacccaccttcagccaggctctttacctacctctccagggagaaaacagcgattaagagacagaaggttctccctacctctctcccaaaggaagcatctgtctgactgacactattcctggggagacccctgtaccttaccgtatgctgctgacaaccccagcaacatctcactatgggaagagatgggaacagtttttcactgctgctcttaagaaggtgagctcccaacaagacaaagtgacttgcccaggagcacatggacttatgtgtgtgtgacgcctctttcagttggcaccttcgcacctattatcttatttggtccctacacaaaagaagtaggaggacatgggaggaaactaatattttgtatggttccaccttttatgtaccagcacttcatttttcctcaatgaatcctcctgacagctctagagagggcccattttgtagctaagaaaaggtcaaggacttatttgctcaagcttatagtcattgtaaagaatgagaacaggactagaacccacctcttcagcagctactgtgcttttccccactatcctgggcctttctaaaactggctttggactaaaaccaggtctttcacctgccttctcagggtccagtccgtctgcactcacctgatacagcagggatgacttcagcaggactttcttgctaatgtgtgggaagcttaccgtattcttcttccccttggtgtccacaaaggggagtgaagtaacactggtgttctgtagaaggagaaattgcatgtgttacaaaagccttaggcaagaaaacgtctccaggggtcatttcttccagcctcccttcccaattccccaacaagaatgagcctaaccccaatctggacctaaacctattcttaaagttcttggcaagaaatgcagattccagagcagcagagtcaacaaacacatgggctctgggtttgagtccctgctctactacttactagctgcaggctttcaacagctcacactgactctttctcgaaacctcaattatttcatcactaccatgggaacaaaaatggggcctacctcataaggcttttgtgaggtaaatgagtcaatatatagagagtattctgtaagtgctggccattattattattactccaatatcttaccaccctaacgcagggaagttcttcctgttatatcacacaaatcttcctcagtgcaacataagcttcaatttcctctatgactacattattgacttgacctactcacttggatccctgcctcctgcactgactgattgactgattaatcaggagagaggtcagaagagctaaaatttggaaacaacctaagtgtccatcaacagatgaatgaataaagaaaatgtgatacttaaacacaatggaatactattcagtcataaaaaaggatgagaacctgtcatttgcaagaatatggatagaactagagatcattatgctaagtgaaataagccaggcacagaaagagaaatatcacatgttctcacttatttatgggatctaaaaatccaaacaatttaattaagggagacagagattaaaaggatggttatcagaggctgggaagggtagtggtcaggggagaggtggggatggttaatgggtacaaaaacgtacactgaataagacctcatgtttgatagcacaacagggtgactataatcaatagtaatttaattgtattttattgtatgtaacacaaaggataaatgcctgaggggacaaataccccattttccatgatgtgattattacacattgcatatctacatcaaaacatctcatgtatcccataaatatatgtacctactatatacccacaaaaattaaaataaaaacatttttaaaaatcatgtggaggagatggggcgtggtgatgtggagatggggtgtggtgacgtggatagagtgctgtcatcatgttatgatacattttatgataaattggccaaaactgtctgttcaaagctaccctggccacccacctctcctcattctctcctagagaaaaggagctgaccatcactccctaccttatgaaagacttgggtcattctggagttcttgatattggaaggtggcttctggatctgaaccgaaagtttacttccaacctggatcaagtggaagaaaataggaacaatgcttggcatggctttatcccacactgtatatttttgttacattacaataaacaaactatgcttgaggccagctctcctgaatccttagctgggaagagccaagagaggctccaataagtactcaatgaatgtatgaatggatgattatccaaacaaatgatctttcccaaagtgttcatcctggatgggcttggcctatggttttcatgctttaaaaaaaatcaatatggccttttcttccaacaaaatcttaactagagaccctgcttacggtaaggagtaacagctgagctgctcttgctctttagaaaagaaaatggccattgccttgcctggaagtcttttcgccctgagtgtggctctgaaggtggcatagtggaacccacccagtggaacacaggcacccagcctggacaccagtgccctgatcagaagagacttcacgcctagaagggtgaggagaagaagaccaaaatactagagcagtgtgtcccagagggcggcaagcaccccgcagaggaagaggacgtaatgtgtacagtacgcagataaagagctatctaatgggtatggatttactgtaatatccatttgaaaaactgtaacaagcacattgaacttgtaacgttgtggttgttattatgtaggatgagattaaaatttaagttaaaaaaaaaagtaaggccaggcatggtgtctcacacctgtaatcccagtgctttgagaggctgaggtgggacgatcacttgaggccaagatttccaggttacagtgagctatgatcgtgccactgcactccagcctgagcaacagatagagaccttgtctctacaaa

SEQ ID NO: 916165 - DNA, 4001 bp, Homo sapiens
gaacacattccctgtggataaggggaactactgtatttctttacctaataaaaataaatcaaaatgccggacaaaaaaaaaatccctagatgggggagcatacaatttcgcatctatcctaaattagcaattatcaagtattcttcaaaggctcatatgagcctgggttgctttgcaaccaaggagtttcactgttgatgctaagcctaaaaataagaccaggagctcggagaagttcaatgcccaagttgctactcacagatttatattcaaagtttctaaaacttggtttgttatttctatttgcctgtgcctaaaaatgctcagatagtttagacattgttatggccagtttactttgtaatgttcttgaaaacaacatcttggtcttacaaatcacaaggggtgcaaaatgtaagggaatggctcagtgcaaaactagcaacagtatggtaaaatattcagaatatactgatgagttcagccactttatctccctatatagtaggcacaggtctactcttgggtgaatggaacagtctctgggagctagttcattggtatgaagacatttcacagcactttaataatccagcatttatgcctgcaaaggtctattttcctgggaactgaggcttagcattcctacagagcactagctacaccacccttgacaactgtattataaactttgattgctgtagccagcatatttttgacttatataaattggttacaacattacatgtaaccttgcctatttttcccactatatctgagagtagaattccaacaataatggtttggatggctctatttttaaaaaagaatgtttctataatgtttatcaatattaattattatgcttaaatacaaatacaaatggcatgttggaacacttaattgaattcaacatcaccatccttaacatattagaaactaaggtgtttatgtttgcttaccttttgtgcattttccccatcttcaactgcaaaatctagtctgggctgcctggggctgatcaggtcttttagtgttaaacaatttacctccatctgtaatgcacaattacactagaaaatgattttgcaattaggtattttttcctcaaacaaaaatatctacatatgtgttacttgtttgtcaatatgaaattcccccttctctaagcacatcctgggcatttccaggagttgtagccaccctcaactttctaaaactcacgcgaacaaactcaaacacctaaagtgtgcttagtaatactgaaaatctgggaagaaaaaaatctacaaaaatagtaactccttatgaaaagctagatggcaaaataaagttaccaagtcggaagggtgttgggcaaatctgtcagaaaagtacagggtctcccaggtcagttaattttggcgcaaagaactgagaggaattcggctttgaggggttttgaatcgggggaaggaaacccgatcgctagaccaaacccactcagcgctgagcgcagccccttcccaggcctccaagcagatcccccaaataaacttctccaatgaaagctccaagttgtggggaagggcaaatcccctctactgccgggccggagtgagagctgcacccggcacaccctctgcgcaccgggttccccggcagaaacacctcgagccctcgccagccgggggacgtgaggagtggcaggctggcagccggggcgggagtgggccctgtatcccaattcccgcctccccactggcgctggggccgcacgcttacccctgctttcctaaggaggcttcctgcctctgcagggacctccacggacccaagccgatgagggaaggtggtgcggcgatcagcagccgggcggcggcatcgggaagggagagcgaggcgcgcagatccccgcgccgagtgccctgggctggcggggaccccgcggcgtccgggcagcgccagcgctcagaccggccgagcgcaactccagcctggatcgtagtccccgctaaaacacctcctctggcgccttgagaccgaatttgagaatccaccaatcagcggcggccggcggggcggccccggccaatcgtgcggcggcacggcccgggctcaccgcccctcggagtcttggcgctccgagccgcgcgttttgccctcacccgcccaattgttgccgcctcggccccctcccccttccgggtacctggaaacctcgggcccgggagccaattcctgctggggacgcgggccccggcggccgcgggaagccaaggtgggggcggcgcggggcggcgcggggcggcgggagaaggaagaggaggaggagggctcttttgttatgcatagaagacccgcgcacgtccccgcggcttgccgcgcccggggaccccgggcacagccagaggacaggaaagcagatggggtttggaagaacgatctacaccctctggatgctgctgccgccatccccgcccgccctcagcaacctgtgcggaagcggagttgtccagacttgccggggcaaacttcttaacatcgcacgctggtgtgacacatgaaccatggttaccgctctgctgcgagcagatggcacgccagttagccctggagacaagactggaagccaaaccagaagtttttctaacttttttttgtttgtttgttttgtgtgtgtggcaaatccggaaatgttttttggtgttcccttttcggcaaattgcaaataattaggagggaaaaagctttatataaaaaagtagttctttgcaatagggactagcattctgggagacagtctagaaaatttcctcaacaccactgatctgtattaaatgtttcacttctttcatcctacagtttcttgtttaaaatatgaatgttggtagagatggactttttacaaaacagactttattgtttagaagttttcaatttacagaaaaattgagatagtaccaagaattcccatatattcagcacccaatttcacccactattaacattttgtgttagtatagaatattttttgaaattaatgatctaatattggtacattcttctgagctcaagtcattactttattcagatttacttaattttttcctaatggcccttttttctgttcaggataccacattacctttagttcctatgtctctaggctcctcttggctatgacagtttctcatactttcctcatttttgatacctggacatttttgagtagtattggtcaagtattttgtaagatatccctcaactgaaatgtgagacagccttcttaaagcatcagacattcttaaatgtacagacatgtccctaccccccatctactttacagcaaaggtatcattttcctttctataccaagactccattcttcaccacttaccctccaaatatttttattttattttatttttggagacggagtcttgcactgtcacccaggctagagtgtagtggcccaatctcggctcactgaaacctccacctcctgggttcaagcgattctctgccccagcctcccgagtagctgggactacagccgtgcgccaccacgcccagctaatttttgtatttttagtagagatggggttttgctgtgttggccaggttggtctcgaactcctaacctcaggtgatctgcctgcctgccttggcctcccaaagtgctgggattacaggtgtgagacaccgtgcccggcctcaaatacatatattttaaatgaactctcagcagaattcagaatgctcaatcaagtccttcacttcgtactctagattgctggtaaatacggcctaaaaaaaaaaaaatcactgctaggtcatacattgaaaagagaaaagtatgcaaaacattaaacaaaagaaaatagtaataaaaatctgacattttttataggaataacattttgaactgaaatctcttttgtaggtagaaacctaatgagaagtttaaacaataaaaaattgcaacttattaaattttgcacatatgtggaagcagaagt

SEQ ID NO: 916166 - DNA, 4001 bp, Homo sapiens
actcagttgtcaactgacttattcagaagtgatgattcaatatcacatctctgcaataaccacaatcaatttcacttttgtagtttcaacagaagcttctttaacagttgataggtatgcaccaacattaaaaatgatcttcatataatctcgatgtttaactttaaaccaagattactagaaagcatcccatatttctgaaaaccaatctataactacagctgagctacccttaaaccagtaaacacttttatttgtaaacttcaaagcaaaccacaggcaaactaattttcacttgcagaactatgacagaaacacaatctgaaacatgaggtaatcagttcctccaggtctgataaaagaaaaatctcctaaagcctgaaagtaaatcatgcacagatgtctttactgctgaactaaggaagtgatggggaaagtaaaggacatgcccttgttactgccaaaatcatcgcttaccgggatttcaaaattcacaaaacactgcaaaatacaattaaatgtcaacacaggttgtcagataaagaagttaactatttctccctctaataactgaccaagtttcacatgacttcattctttcaggagaaagctaggcagaagcaagagcactcccttcctatctactggatgactcaactctcttccgcacattcctcggctgaatcctacaaattcactaatttcttttgtcctttgaactagttatcctactccctcggtaaagaactaataggctcggcacctacttttcaatcatttacattttgttacaccctatcagcctcaaaaagaaaagaaaaaagctataccaaaaaaaaaaaacaaatttaagttgacaggtacaataactcttacaggaaaagagatgtgaattatgttattctagtaactgattcttaaatgatacacctacagttttctaatgctctaatctttctatcctcaaggttttccagatttcagagacagcacaggcagaaactaagtgtatataccacttgatcaagcttactgcggatttattcttggatagctaaaataaggtagtggggcttgcacagaaaacatatttttaattaaaaaaaaagtttccaacagtgagtaacatcttccttctcggctgactgtgccagtgtcagtcccacgcctgggcccaggctaggccggggctcaccacaccaccctccactgtggtccaaaggagaaagcagggccgtgtgtggcaggtgcgcatcgtgtcaaattggggggcacggggagtgcggcgggtggggaaaggcgaagcaagccgcccgaatctcccatggggcgttctccagcccggcaggcggcggctggcccgtcccacgggcaccaactctccattttcactcccactcagggttcccgggaggaacgcgccggcaccacaccctccagctcgcagcccgctcgcacacacggagccccgcgccggagcgggcgccaggcctggacgcgcggggccaccagggctctgcctgccgccccgccgcgccggccccacccgccctccccgcccccgggccgggcgaccgaggcctaagcgcctgccgggctgtggggcctagggaaggaaggagcccgcgctgaggaggggcgcccgcgccgcggccccgagctccggctgtcccgctcacgtgctgccagaaagacggtttcactctcttaccctctgtaaaatcctccttaacatggtttaaccaccacccggcgccgccgcggtgactctccagaccctgcgcggggccactcactactcggggtgcgcgggcgggagggactgggccgggaggggaccgggaaggaggtcggggcgaggcggtggcgacggccgctcgggcggccccgacttccccacaggcggcgagagggagcacgcgagagagagcgagcgaacgactaggcagcctgcgagcgcctccagcccgcccgccgggcagcccccgtaactgacagatgggcgggcccgcccgcggccgccggggggcggggcggtggcgggcccgcccctcgcctgtccattcgcgggaggcggggctgaagggggccggtccaggccagcgaccaatcggaagcggtggcaacgtgggcggctgcgtgacagacaggcggcaggacgctgtcgccgcagcttcttccggctagctgggggacgccgaggctgcggagtgcacgcctgggctccgtcagagggccgcgcccgcgcgacgaccgcgtgcccgctagtgggaggcgggcgaggacccctgggggtgtccctccctgacccaggcgggaggaggggacgccttaggctgttttgtaaaatgtgtcggtgtgacccttccggcgatggctcctgactcgacgtggtattgagcctgagctatatgctagtttctgctggaaacgctgactctgcctcttagcccctgggttgaagccgactagagaatctcagacgtgcttaaccggtctgttgggcttccctgcccttttccagtcccaggtttcctttccctgctcccttcctgcttctaatttcagccaaagagaaagcaaagatttagaaaagaagggtaggaagaagctggaatttgaattggcaagagaagtttgaggttgtcttttctagatcaaaacaatttttaataggctgatgttcacatgttgcactttctaaagcccgtgcttgacctcctaaggaattttaagtcctattctgataatcgatttatgaagtaaattgtcattaacgcctctgttttatagattaagaagaaaatgaggtcacagataaatatcgtgccaaaacgacgtggtctttgaactgacctccaggcacgatgtcattatttaactcgagaaatcacagcttctgcgtcctaccattctgccaatattcacagccaagaggctcaacttaacaccctggtagaaaaagagaagcctttaatattgcttgaatagggaaggagagggaataatggaactaaccttgctgggagggaaaaaaaaaaaaaaagaaaaaaccaacagaccactgaatgaagcctatgaagcaatgaatggagtgctttttggaaagcacttccagatcttttgaaaagcagcacaaaattaaatattatttgcaaatcagttaatgaataggaaaatgttttgtaaagtataatgcattatataatgtaatatgatatttctatcccaaatatatttggttttttattatgtgtgtgtgtgtctctcgatggtgcagcagcacggtcatgcctacagctaatatatgagtaatcactagtgataatgcacttacaaagaacatacttttccatctttctaaacatgaggtgctttattttcagacaatatgggaaacattctcagcgacatggggtgataaaagtgactttttttctcttttttgtttgtttttcaaaaattagtttagggtcaggcacactgattttatgcctgtaatcccagcacttcgggagacggaagcagacagattgcttgagctcaggagtttcagaccaacctggacaacatggcaacaactcgtctaaaaaaatattagctgggtgtggtggcatgcgcctgtgttcctagctactcaggaggctgaggtgagaggatcacctgagcccagggaggttgagaatgcagtgagctatgatctcaccactgtactccatcctgggtgacaaaatgagaccctgtctttaaaaaaaaaaaaaaaagtttaaaactgcttattaatgttacatgctaagaccttctttactggaattctcatgtagaatcctttgaataatataataggctctcatctacagctgagctagatggattattggaaaatctgtgtactcccctgcacagttcatgataactccatcactgggataatacactggagaacttaattactccaaaagaaaataagcagtgggtgagagctaaccatgtaagaatac

SEQ ID NO: 916167 - DNA, 4001 bp, Homo sapiens
tataatagtttgacaaaaacatcttctcaggatattaatagatgaagttattcaattgttgcccagcttatcaaatataatagtttttccataaatctaatggtcctctcgtgcctaacttctaacaattccatgcatttgaccttgctattctcttgcctagaatgccttttccttcttcgtgtttctactcacctttcacccttagctgatacctcaactactacagcagagacactacttttgctgagtacaataacagaaattgtttagaatatggatactcactcataaatcctaagtcttccttgcaatgacttttttagtcttaatgttgcatattcactgccttacagacaggtttttttttttaacttttgttttttacccactctttgcccaacctggttaggaaccctttctgggattctcttggttccctatgacagagaaagcaacgcatcacagagcatcatcactgattttcgtaaattattatgttttgcaaattatcaaatatcccttaatttggtatccaaaacttgtttttattaatagtcttaaagggcattcaataaaacgttcccataaatatgccagtgaatttgttttaataacagaagatcatgaccttataaattactaagaaaaatatgctgcacagtaaaacaatgtctgatgttcttgaaaatactttttcactttacaagagatacaatatgtgcttcagtttacattttactctccatctaacttcagaaaaaaaacacaaaaaggatgctatactaagaaatctttagtatgaggagtatgtaatcatagcctcagaaatttcaaaagctgccacaatgtttttccactcctgtaaagtcaaagatataactccctgtttcctgccatggcaactggaatcatttccctcacccatttggttaacattcatcggctctaatattggcagcctgtcttcatcaagccttattcttgcaaaaccatctcttacaataaaagaaacataaaatatattctccacagtacgagaaaaagagtttggatcaatcacaaactcaaaataggacacaggagtatcaggatactttcgaaagtaggtttgcaacaatcccaaaatcctttctacgtttttttctgtcgcttctggataactactcaggtccaacttctgcaactttgtaggcatgttgccattttcttccatcttgcgaacttttttctggtgttcaagtcggggctttggtgcagaacgttctagcttgaatgaaccaaaaacaaaatggaatgtctcagcttttaccatccaggatgttgcttccttttctattgccttccagaaggaaagagctatgctatcatcacaatcactcaacttgtcaggatcgccttccatccaattcagacccacgaacagaaacagaaagtcacaaaatgctaactgattaaagaagttcatatctgagtttaactgctttgccttttctttacccaaatcagaagccataacaagaaaccgggcgtcgagggctgcttctctggttcggctcacgccatcaaagaggacgttggcttcctccagagcctcggttaaggagttgttcgccgagctcacgatgtcctcccggttctgccgcacgcagtacatgagctgccggtactgcctgcggatgctgcggcacttctcctcgtcagcggtgagctccaggagctttgggtctacgtcggcctccccagagctgaggtcgtcggagcagcccgcggccctcactgacacatccatcttcatcagcgctccctccgccgccgcctacttcgccgcgtactcgctaccggggatgatcacgagctgctcctctcctttctcttcgtctcccttccgggaagctttttcaaccaacatgccggccacgggtatctctgaggtaacggccctcccagcgtgtggaaagtggcggcagttagagccgaggacgcccgcccatgcgcactagcggcccggcccggcgcgacccgcccccagcacgctccgcgggaagacagccccgccccggcccggcccagccacaagccgaggcgctcgctcatagaccagcgcggcgctcccaacacgcgcaatgatgggccctgacctcacacgcgactaatgcccgctcaggggacagctattctttttcaaagcgtttaccgactggatcacctcactttaaaaaaaaacacttttggacaactttacacaaaactattgaggagactaaaggtcctgcgctttaaaacgctcgctgccatcatatactgcagtgaggtcgacctggttttggttttttgtgaactaaatctggctggactgtaaaccgtcggtaaggccaaggaccgtgaaaagcagaaactccattaagcaggctaaactctcagttcttttgcaaggtggtgtttggactcattatacaaatgtaaatcgggttaattactttcacatgtcctcttaaaaaccaagccccctccaatacccatcctgagtatctgtgggatcgggggagcctccaatatccgtgctaacccctgcaggaaactgggtgctgggcacgggcattactcaggtgaactttggttctccactacccaggagtggaagaatagaatgggtagagatctctgcaaaagagctatttacttggaagcttgccaacagctaaaggccaccgacactgaatgggtagtaactctgaaccctaaaaggtgggcaaagctatgaaaatttcagatacagtctaaggatatgaaagcttaatctgtaaactgggtgagtaatctgcgtgggaaaatttacccattggatttaatggggtcactggaaactcaagtgcagttaaagacgtgactccttatctgtctcaccagcagcaaatagcaaagtatacataacaatgggaatggccgggcgcggtggctcacgcctgcaatcccagcactttgggaggccgaggcgggcggatcacgaggtcaggagatcgagaccatcttggctaacccggtgaaaccccgtctctactaaaactacaaaaaattagccgggcgcggtggcaggcgcctatagtcccagctactcggtaggctgaggcagaagaatggcgtgaacccaggaggcggagtttgcagtgagccgagatcgggccactgcactccagcctgggctatagagcgagactccgtctcaaaaaaaaaaaaaaaaaaaaagggaatgaatacatctggtttttaaagagaacatgcacacaaacaacccatgagcatcaacagcttttcaaacctgcaacaggtacaccttaaaaaaaaaaagacacccacaattgcacctgtccaattgccagtttcatagcaccaggaagtaaattagccctaccttcctttatgcatatagacttgttctatttctttagcattagcagaaagttttttgtaaatgtataaacagcaaaatctagtagtattaagttactccaaaatccttatattaccatttgctcccaattattttattaactaggggtaattcagggagatacgtgcatttttcaaaacaccatgcattacggttagttgtacatatatatgatcctaccctattagattgttggcttctcaaaaacaaaagctgcgttttagatcttccaaacatagctgtttttacacggagatgcacttatgtactgaatgtataacttaaaatagatttaaaactatcccagcatctactgcaagttatttggcagcaaagatttaagttcacagattcgtggaattaatcctacacactgaaaggaaaagttgactgctcttcagaaaaagttcttatccctcttctaaaataaaggaaaaatgaaagaaaggtaagttgagacccaggatcattcaaggatcgtatctgtccctagtctggccaattacaaactagtatttgaacttgttttaaatcttaggtgaaaatacag

SEQ ID NO: 916168 - DNA, 4001 bp, Homo sapiens
agcccgggtgacagagcgagactccgtctcaaaaaaaaaaaaaaaaattttgccaggcgtggtggtgcatgcctgtaatcccagctactcagaaggctgaggcaggagaatcgcttgaacttgagaggcagaggttgcagtgagccgagattgtgccattgcactccagcctgggagacaagagcaaaactctgtctcaaaaaaaacaaacggccgggcacagtggctcacacctgtaatcctagcactttgggaggccaaagcgggcagattgcctaagctcaggagttcgagaccagcctgggtaacatggtgaaaccctgtctctaaaatacaaaaaaattagccggacaaggtggtgcacacctataatcccagctactcaggaggccaaggcaggagaattgcttgaacccaggaggcggaggttgcagtgagccaagatctcgccactgcactccagcctgggtgacagagtgaggctccgtctctttaaaaaaaaaaaaaaagaaaagaaaaaaaagactatcctaagtcccagagtgttaacagatgactctctatatacctttatctctcttcaagaactccagcaacgtccggatggcagccactgctgaggccatgtcaggatcttctttcatctgagacttaaagtattcaattaactctggaaaaagggaaaaaagtgattcacctaattcatttagcagcctataaggcaagagagcttgttaatgactgttgactttaagaagcaaacaatttaaaaaatactttctttttagggtatttggtttcagggatgcaataaatgttgatgggaatagagaaaataccactttgctgtttgcaagagctcttttttattttgaaaaagctactggtggccgggcgcggtggctcacgcctgtaatcccagcactttgggagtccgaggcgggcggatcacgaggtcaggagatcgagaccatcccggctaaaacggtgaaaccccgtctctactaaaaatacaaaaaattagccgggcgtagtggcgggcgcctgtagtcccagctacttgggaggctgaggcaggagaatggcgtgaacccgggaggcggagcttgcagtgagccgagactgcgccactgcactccagcctgggtgacagagcgagactccgtctcaaaaaaaaaaaaaaaaaagctactggtgtgcaaggcctaaaaattaagcccgagtaaatgatgatgaaaagtcattctctcttcagcctctttggtcctaaaatctgagaggatcccagagtcaaccatcttgccaatttctcctgcacccctccagacagtctatgctaatacatgtctattcacatacacatatatgttacaaatattatacatggagttccacccactcccctttatttctttacatgaaaagtgtattagtttgcccttgtttttcacttaataaccatactagatgagcacatcaaatatgccttattcattctaattttaatgacagatccaacaaggcaggaaggagactggcactgggaaggagcgtatgtgtgggagggatgcctgcagatactgccagggcgcatccctgaaaacaagagcagcgcgagggatttagttgtgactctggaaacacaaccagcggagcagcctgaaattcaaaagaaatctcttcgggagctcagcctggatgtgagaggttggggggacccctgaacggcgctgctgtagcctagcagccctggcctgtcttgatttacccttgtcgtccatggcgtcctcctgctgcggagccccaggggacccgagccgcccgcgctgtctcgaacgggtccgccggccgcgccgcctgcgagccagtctgacagcgcgctgcacacctccgcaccccacttccggcgcacttccgtacccctcttccggcgcactccccgcactccacttccgcagattagggggctggcacgagtcacagcacctcgtgcgtcacttggcggcgccggacgttgggctgcgcaggatttgagacgctcccctgaccaccacttgctctgcgctgaggtgctgggacagccatggtttcagacggtgaggaccctgcagggcgggacttcgactccggggctcggctgtctcggtccggctacgactggccagatggaatgtgtcttttgggctggatagaatccgtttggtctttagaggagtagccaaggcattcagtcattcattcagtaaatagttttggatcgcctcctgtgtacaggcattattttctggattttagcagagatcgtgacagacaggggccttagtggaggttacagtctactgggtgaaacagatgacaataaataaaaataatttcggccgggtcgcaccccggtggattaggcctgtaatcccagcactttgggaggccgaggagggagaatcgcttgaagccgggagttcgagacctgcctgggcaacacagccagaccccatctctacaaaaaaaatgaaatattagccgggcgtggtagcgcgtgtctgtggtcccagctacgcgggaggctgaggcgggagaatcacttgagcccaggaattcgaggcttcagtgagctattatggcagtactgcacccagcatggccgacagggcatgacctcgtcaataaaaaattaaaaaataaattatttttcaaaggatgaaaagagctatgaagatgatgtaacagtacggtcctagttacaatagtacattgtgactaggattgaggaggagctgttttagataggggcctaggaaaagtgcaggatattgaaaccgacttgaatgattatgtgaagttctgggggaagtgcactttaagtgcatgggccctgtggcagattgagccaccaagttacactgagaagggagaaatggagagcttgcgggtagaggatggtggggagactcattcatacattaaactaccacatacagagtcagatgtcttgaagatttaaaaggaggctagagggatgagatcagagaaccagccagtttcaggtcatgcagggccttattggccgtgatagagaagttggcctttatttttaggtgcaatacaaagacattgtagagttttaagccagaaagtgttatgatctggtttgcaattttaaaagatcactgtggctgttgtgtggaaaatggactgtggggagcaagaatagagataggggagtcctttcaggaactgtaataattgtccatcctctcttaattgatgtgaaaccataccacaaccctgtgagggaggcaggcctggcattgctcctgtctacaaatgaggtagcgaactaaagaaggaaattcacagggtcattgcatgtgtatagatgcacacctttctttacaggcaacgctttttctgtctggcagacacagttgtattaagtgcttctgtcctaggtgctttgttgtgtgatttacacatttttttgttttgtttttctattaaaaaagaaaaaaagtggctgggcacagtggctcacgcctgtaatcccagcattttggaaggccaaggtgggtggatcacttgaggtcgggagttcgagaccagcctggccaacatggtgaaaccccgtctctgctcaaaatacaaaaaaattaaccggacaaggtggcgcacacctataatcccagctactcaggaggctgaggcaggaaaattgcttgaacccaggaggcagaggttgcagtgagccaagatcgtgccactgcactccagcttgggcgacagagcaagtctccgtcgcaaaaaaaaaaaaaaaaaaaaggtagagataaggtctcactgttttgcccaggctggtctcaaactcctgggctgaagcaatcttcctgcctcgacctcccaaagtgttgggattacaggcgtgagccactacaccagttctgatttacacacattattttatcctaggattagcaaattccatcattttttaagaagtccacagt

SEQ ID NO: 916169 - DNA, 4001 bp, Homo sapiens
tttccctcaactcggtaaaacgaaggacatgaattgctgtcctatgttccgcctctaaaaattacacaaaagttaagaaaacacagattttcttcactaaattacgatactaaactgttaaggtggcaaatccagaccaagtaagtactttaagcaatggttagtttaaaatatatttaggacttttactagcccactggagaaaaaaatatgaacatttttgtaaacttcagatgctttcgggcagcgtcctaaactgatgatgacaccttgatacttttaagttgctaaggagtctcaaagattatgaccttgctctgccagctgagagcagtgtggccttaaataatattccttagctgagaaataccactagctctctgcagtacctcaggatggaaggagacaacatgcacaaaagtgcttggtcaactgtcaagcgttacaccaatgaaagatgttcaaatgcacctcaaatttctcaacattttccaaagccaaccaaaacccttagcttctttgtaatagagacgatgaattactaggtaagaaatgagcacccagagatagaagttcaaataatgttttgaagaatgcaaggtcatgccagagaaaacaaactatattcctcaaactaaaatcaatgctacaagatgttgggtcatcactgcttttataagcccattagaaatgtaattagacttgcaaggcactgatactcccctccaaggttgtctaaagaagtaagcaactccagccattagtaagcactattttaaaagtacctgctggtagttgcacagttaccttaaaaaaaaaaaaaaaaaaaaaaaaaaaaggctgaaatctaccattggagctatccaaattcaaccaacatggaagcgccggaagcgaaacctgatcctggcatatagctgcgctgagtaaaaaatgcctccaattgagtatgagaaaaaagcctagaaggaaatctaggtgcacaccggtgcttctccaacacgtgggcgcacctaactggattccccacccccatctaacgccaatagcaccaacctccaaggctaacacacacacccttagaagaatacaggcacagggcccacactctagaaagggaagagacaacctaaaaggacataagtgcgcaacacaggcgcgttaaaaagcttcccatctgggttctagcgcacgcattgaaggcgcgcccgtctctactaccctcgtgtctcctaccgcgcacgcgcaccgctgccttcccccgcccctccaccaactcgcgctcgcgttccaactgctcccccccaccacacttactcccctaccccccactccggtccgctacagcctcgcgccttggagacgtagtctaatgtgcactcgtccgcgcagcaaccgcctccttccttcctccacgccttcacgcgggcacggtgattcacgtctacgaaaaggcctcgcaccacccgcacacctttctgcgcctccttccccaattcaagccagagtctaccattactgcctattccaatctcgcgcagaaagggtgaaaagagtgtgagggggaggggaaggtgtccttcccctcccccccaaacatccagaggcagtaacctaacagggccacgccgccagcctgccgcagccctcaattcagaaaggaaccagtgccagcaattccccgacttcaggaaatcagtggatcacgctcggaggggggtttcagagcccagtccttggccgcgctcggctgctcgctcacctgaggccgccatgttgggagagggaaagagaacgcaaaagacccggatgaggcaatcacgtgattatagcgggcgcgtcgagctaggagacgcgaagctgggagggggcggggaggtgaggacggagacaggaggcggggcggcgctgctctaggttcgtaaagctgcgcggcgaggtggcacgccgtccgacgggaagacatgcgcgacatgtggccaaaggggcggggcctgggttgtcgcgaaacccctcacgctttacgtagggctacacgcgagcgcggggctggagctgagtcctggccggcctcctgacgcacagacttcctgccggaagagtggcgggaagggcggggcttcgctgctgcttctgcttactctgcacggagccggtgatgggtgtggcgaaatggatgtgctgaaagggaagattctgagtttaatgtacttttttgagacggagtttcgctcctgttgtccgggctggagtgcaatggcgtgcgcgacctcggctcattgcaacccccgcctctcgggttcaggcgattcacctgcctcagcctctggagtagctgggattacaggcgcccaccaccattcgctgctagttttttgtatttttagtagaaacgggatatttcaccatattggccatgctggtcttgaactcctggtctcaggctatccacccgcctcggcctcccaaagtgctggattataggcgtgagccaccgcgcccggcctagtttttaaaagccacatcagaaatcactgattttatttttatttatttttattttttgagacggggtctcgccctgtctcccaagctggagtgcagtggcgcgatctcggctcactgcagcctcaacctccggggctcaagcagttcttccacctcagcctcctgagtagctgggaccacaggcgagtgcctccaggaccagctaattaaaaaaaagtctttgtgtggagacagagtggcgggcttggggggggcggtgtgtctccctgtgtcgcctgggctggtctcgaactcctggactcaagcattcctccctccgaggcctcccacagtgccgggattacaggcatcaaccactgtttgttttcaaattactttttgtaaaggcaaaacaaatcgaacgtcttgtgtaagaatggttttaatgaggcatatttagacggaataagaaggtaacaaatgctgaacacttaattgtcatgggcttttacctcatttaatggtccaatttgctgactaggtttagtccaacttaggcctttaggatttctgagactagggctattcatgcttcccctagctgatgttccatttcattcattaaatgaaaatttttgtttcccaccgtgtgccaggcacagacacttgcgggtacaacatggaatagaactgtcccaaaagaggttatattctagtgggggaaggacagataataagcaactaataaaatattacaacaagtattctgtgagtaattaaaacaaggtggtgtaataagttattaggtgcaactttagattgcctgtcagagtagacctctgaggaagtgacattcagacagaggtctaaattacaagctgccatccctgggaatgtcttctgaagaggtttaggagaagacaggatgcgcagttgggtttgctgcaatatggtgagggcaggggagggaggagtggtacaggatgaatcttgagagagaggggctggatcatgtgaggctgatcatgtgaggggattgggaaagtgtggaatgatttaaggcagagaaatgtcatgagttgaaataaaattttaaaaaggattacttagtatcctgatgtgagtggtggttacatgggtgtatatctagaattcgtatacttaagatttgtgaatacttaagatttgtgtactttatgtaagtcacgcgttaattagaaaaaaagagattactcaggctactgaatggagagtgcaattgtcagaggtgtttgaaccggagcaactccttgaatagggctgggtaaaataagtctgagacctactgggctgcattcccagaatgttaggcattcttaatcacaggatgagacaggaggtcaacacaagttataggtcacaaagaccttgctcataaaacagcatgcagtaaagaagccagccaaatcccatcaaaaccaagatggcgactaaattgacctctcctcactgcttattatatgctaaatataatt

SEQ ID NO: 916170 - DNA, 4001 bp, Homo sapiens
ccccccccacccccaaagacaagcacagatggagaagatgggtgtgtgtgagctgcttatctccccccacctctcaacacacatacacacgcgggaaagaaaaacctgcaaatctgaaatccaaaatggccaaagtgacttcaaagttttcaagacatgtcctgaaaaggctcgttgggcggctgcacccctaagtaaataaagccataacttgtctccttccccagcgccgggctcccaggctgacagtggctgcacaaaacccctcctgtgccgagcagcggaaactcctaatgagattagttggtgtgtgtgcagacattacttagcaatgactaagggggctctctcttcctgcagcagccagtggaaaattcaaggaactttttccccctgcagcagcagaatccctttaaccctctccgcagccaactccaaaaacaactcagcctcccctttccccgccacccccaggctggaggactggggtgggggtagttaaagaccggccaggggctttcaaatgagggagggtgggagggggctggcggggaaggggcgggggacccctcgaacactacaaaggaaactgtaaaaggcacaaatacataaacctaagaaggagcaaaccacagtttctttgtgagctcctctagtgagtcattttcaagatgctgtctgctgccagtttcaaagcggaagcgcatggcaattagtcttgccgtttccagacaagccagaaactctcccgacactcgtttttttttctttctaaaaagccccttttgcagtttctgaaataacatttcttgcttccacctccacccgccgcctaactgcagcttgtccctaggatgattcggttcagaaaagataacaaaaccaagaccttttatttttgctttttaactactccaaaatcttaatcccgcctccccaaaagttacagtagcgtcacaggccaacgttgagttcgaaggtaaacagggatggggagtggaaggggccccaagatcatttcttgcctggtccttctccaaaaccatgcccaatagagaccaccggcttttaaatgtccgatggggcgtgcgcctggggcggtgacctgggcgggggtcacctgccaagcgagagtggacgcagcccccagccccacaccttcgcgacccatgtcctccaccgccctctccatccctgtcttcctccctggatccgagcaccagtgcactttgcccactcgaggggagcctgactgcggtcccagctggaaggtcggcggtggtccagcctccaggcactcagcctgctcctgccacggttcttcccagggacccgaagtctcgccgtcccccgctccccgcgctgcctgcagcggggccctgggcgagctcccagggttgcacgcccggcgccccttcctctggggtcgcagcgcagccccagggaggggagccgcgggcgcagggtccccgcagccccgggcccggcgcgagctcgggcgacggcggtggcagcgacgcgggcgcaggagcatccgcggcgccccctccccgcggccggccctcccgcgcggacgcaccgccacccccaccccggcccgcagcccaccccgcggcgccccccgccccacccccaccgcgcccaagaaaagaaagaaaaaaagaaaacacccccaaacaaactttttaagtgtccgagcaacaggcagaagccctgttacctacccagatgtgggggagtcttcttcggggggaatttctaggaggacccgggcgaaagcccccgactttccatgctgacaggcgtctgcagacggtctgtggctcttgtaatgagatcctgatttttccccctttttttctttctctcgctcctctttttttttcccctctggtgtgtgtgagagcaggaagttggagcagtcaggccgagccggctcacttcctttactgcattattccccaggcggtgtgcagtctgtgtaaacaggcttttccgccccgcgccgcgcgccccggccgcggctgtgcgccggggctggccgcccaggcccgcgcctcccccgccgccccggccccgtgcgcgccccgcaccgcccccacccgccccgcttcctgcgcggccaccccggggaggagcctccgacccgcggcgactccgcgcggccgcagcccctccccacggggaggggggtccgcccgcaacccgcagaagccgccgcgcttcccgggacaccggggatccctcctcacctcaacccctgggggtcgagcgcgcggggcaccacgacggggtcgtgccctgcgcagttggcccgggaggggggtcccgaggtggggaggcggctggactcgctgtttcccatccgctgggatggaagagttggggggcagaggggaatcgagagtggggttcagggtttggttgctctgggcaaaggactgcttttcttgtgggtgcgggcacagtttccgtctggggttggagatggacaccgttcctgtctgggttttcggtgttttaaaagccagccctcggccgggcgtgctggctcacgcctgtaatctgagcactttgggaggccaaggcggatggatcacctaaggtcaggagttcgagaccagcctggccaacacggcgaatccccgtctgtactaaaaataccaaaacaacaacaacaaaaacagccaggtgtggtggtgggtccctataatcccagctacttggcaggctgaggcgagagaatcgcttgaacctgggaggcagaggttgcagtgagctgagatcgccccattgcactccaacctgggcaaccagcgaaactccgtctcaaaaaaataaaaaagccagccctcagttggggggcgagcctgtggggaaaggataaggagccacaacactggaagtcatggaaataatgcccgcagggtcagagactgaggcttgaagggagcctctgtggtctcagaactggtcttcacacctccacatccctcaaggaggtcctgcctctgagggctcaggccaggctctgatgggagagcctgcccattgccctaggctgagacaaggttgggggggatggctgttgaagagcctctcccttcccaggcctgcgccccaacctcactgctcaccttccagaaccttccattcccatgccgccacttagcagcccagacccctggttttcaaacttgacccaaggggcttgttaaaccactagtggctgggcctctcctggagtcccagattcagtaggtcgggggtggttccgggccccggctaatgtcagaatcacctggggagtgttttgacactctccaacaatatactcaacccaggccaattaagtcagattctctgggggccgggtgtgagtcctttcaaaaggaccacattctaagagttcctccactacgtttgtttctagttttgcagtctctcctgaaagattattttgtttacaaatttctcactgccatcaactgtgagctgctaaagggcacggggtatgttttactgattagtaccacatcccagctccaagtgcctatcagagcacacaggtgataggaatttccttcgggcatttgcttcagggctcctgtgggtagtccactggaaagggtgggagaatgccctccagacctctgagaaggagtgggaaacccgtggggtgtagggtgggggcacggtaggagagtggggcagaaggagaagatatggaaaagagggctgcttatcaacccctgatttcccacagctaattttccaattagggtattattgttttaatccccagtcatcttcttctgtcactcagtagaacacctatggtgtccctatatgatccagctgttggactgagagaatgtaaacttattatcctcagggaaaaaaaaaaaatccacacagttaagaactcatgttgctttgctttaggagatatatgcctgaaagaaaccggtctgaaaaggctatgttctgtatgattccaa

SEQ ID NO: 916171 - DNA, 4001 bp, Homo sapiens
gggcagtgattatatatgaagctgctttgtaaaccacagaatcctaatgtatcaagcacaaagccaaaaataattctggagtaagcagggcaggatgggaatgactgacagacactatcctaacaactctctgtacactggaaaagacatcagaagtttgatgttaaagaagtggactacatctgtagcagctaaaagaaataattccaagttgcaatttggagtcccaaggagcattagggtggtcagtaaaaagtctaaaaacaaactgttatatacaaatacaagttttggaaggttaagtttttatgtatcactggaatgtatatgtctagcaacattcttgagatatatggctccaaaaagtctgcgaaaaaagggatgtagattttgaaattgaatagttgaagtaatgtcacagagagcacaaagaacaaatgaccaagaactaagtccatgagacacccttagttatagaagaaaaaaaccttcttgaatgaataatacagtttcaacccattagtaggatataatcatgttttctattcttttaatagattacaggcgcaggcctgtaatcccagctactctggaggctgaggcaggagaatcgattgaacccgggaggcggaggctgcagtgagccaagatcgtgccactgcactccagcctggtagagactgagactccatctcaaaaaaaaaaaaaaaaaaaagtgtatttagaacgaagattaaaatcctggcctgacttctaaaccaatgcgatttcttctgggcctattcaattagttctaacgggtaagagaaaggaggaggaagaacactgcccaaggctttaagatagagaactgctggttctattacatgtggggaaagagatgaatgatagataaaaatgcagatgtaaaagttttaaataataaccaggtctggacagtgtatcataggtggatattagagagaggtgactatggatactaatgaattgaaacacgaagcccttacaaaaagtgtgggcagactaggctacataactacgtttctcatctgcccagtaacttgtcttgggatgtggaatgacgcaaggaacgaaactttcctctgcttagactactataccacagaatcctggtaaaccaattggaagcaaggaggtgagggctagaatatcattcaaaaagagcaaaagaaaatgagtactaccggccgggcacagtggctcacgcctctaatcccaacactttgggaggccgaggcgggcggatcacttgaggtcaggagttcgagaccagcgtggccaacatggtgaaaccccatctgaactaaaaatacaaaaaaattagccgggcgtggtggcacctgcctgtagtcccagctactccagaggctgagtcaggagaactgtttgaaggcgggaggcagaagttgcagtgagccgaggtcgcgcaactgcactccagcctgggcgacagagcgagactccgtctcaaaaaaaaaaaaaaaaagaaagaaaaatgagtactaccatcccaggatgtcaaatcaacgcaaagccaaccaagccaccttccttcaaaagcatctttcacccctctctgctttctacatccactctgggccccttaccctcattccacggagtcccaacctatcgatttactacttctccacttcctgtcccaaactaccttgactgtctccagactggccccttccagcaccacaataagcctacggcctccgatcttgtttcctgcccctagtcggggccgcttgggtggcagagcatcccagtcctgtgcctgctccccaccgcttcgttcacgaggcttgaatccatcactgggcgcggccatcttgcaacaataccggaagttgcgctaacgctcttaaataagaacagcgcggcttctaatcacaaatttccttccggctgccattttgaaagtgggccaggaaatggagatgacttgctgtcttgcgctgccctccctgggagggcagccttccagaaaggggcgggacttccgtatgcgcgattcctgtgcgcgaagttcgggtccgtagtgggctaagggggagggtttcaaagggagcgcacttccgctgccctttctttcgccagccttacgggcccgaaccctcgtgtgaagggtgcagtacctaagccggagcggggtagaggcgggccggcacccccttctgacctccagtgccgccggcctcaagatcagacatggcccagaacttgaaggacttggcgggacggctgcccgccgggccccggggcatgggcacggccctgaagctgttgctgggggccggcgccgtggcctacggtgtgcgcgaatctgtgttcaccggtgagcaacctccgcctgctcgccggacgcttccagtccctcccccaaaccccttgccctgtccccgcgcccctccacgggcctagcatttcctctgagcagcggcctggcctgatcaccacccatctccccacagtggaaggcgggcacagagccatcttcttcaatcggatcggtggagtgcagcaggacactatcctggccgagggccttcacttcaggtaatggcgggcagagcctgctgaccctgacctttcacccttgacgccgacccagcagtggctatagtcggacgtgcaacaggattcaacgctgctcttttcccaccctcctcatccctgcccctaggatagtgggtgctgcgagaacctccagcagcatacaaactgttgttttccagagggacaagagaatctctccttgtctgtggtcgtggagaggagcaggccaaaaaacgcgtggtgaggggaaaccgggcaaggctagtgaaactgcggccttttctttttttttttttggagagggagtcttgctctgtcgcccaggctggagtgcagtggcgcgatctcggctcactgcaacctccgcctcctgatttcaagcgattctcctgcctcagcctcacgagtagctgggattacaggcgcccgccaccacgcccggctaatttttgtattttagtagagacggggtttcactatgtagatcaagctggtctcgaactcctgacctcaaatgatccgcccgcctcggcctcccaaagtgctgggattacaggcgtgagccaccgcgcccggccgaaactgtggcctcttaatacctatccctgtcctctccaggatcccttggttccagtaccccattatctatgacattcgggccagacctcgaaaaatctcctcccctacaggctccaaaggtaggtctgagcacttggtaatcacatggcaggtgggatgatcaaggtagctggcaagaaaccccaggggaatatggtagtgtcaggcctttaggcctctttccacatctgcaagagctgtaacaaaaatacctgcctcctggggtcaaagcagcaaattctgaacacactgtgtttgcgtgctttttactgtctcctccctgacgtgtattcaataagagtattgtttgtccctcgtcttgttcactgcctagatcaaagctttgttttaaagccttttttttctaactgcttgacttactatatctacagttacatccactagtacactctgttctggagaagtttgtccctaagcttgactagttcacctgttctctccttctagaccatacataaaagccgtgcctttgagttccccagacctcttcctcctccccacccacgcacacatatacaccctgggtcaggtagctcacctgtaacctgtaatgtacttctttgtgctatacctagtgcaggtcgcttattcatttactagactgggccctgggaataaaagattcattaaacacaattcttgtcccccaagtccttacaggagacatgattacggtacagcacgaaagcgcccacgttagaggttgcacagagtacagagggggaaagagtagtcagctctgctggtgacggggtttgcagttcaaggcttcacag

SEQ ID NO: 916172 - DNA, 4001 bp, Homo sapiens
tttaacctgcacagaactaaaagatttgtataattttcacaggatattaacactattgatttaataatggctaatccacatccatgtaatgtggaaataataaacatgtgaagcaaatgtaggagttcccttcatcttgaaaagttgccctgatgcctactcaatcgtcccccttggggcagttttacaaggagcattgcctgctcaacacagggttgattacatgtaacttctctcccaacgtactgcctttctaaaggaaaagcctaactttgtcagacaagctgaatcctgtcattctcatcttgtttacttggggaaaaaatataccagtgtctatgttgaaatgggccacacctcggtagacactcacccaaaatgctaaccgaaaaaaagaaaaaaagaaaaaaaagaaaaagcacccttcttcattcctccagatttcatgattagcatgagtgtttgcatttatacaatcacatttcgggaacaagagaaaagataagcatttcaaaacaatcactgccttccatgcaaagaaattccacatccactttcttttaaaagttcttttatcgtttctggtatgccatcttttcactcagcactgaaaggcagctctttctggggtgaaagcacaaagccactcaacaatttttaacaggcacagatgaagttctcctgccccaccctcttctccaaacccagcttcccttttgcctcccccgccctccacatctggccaagagaaggcatctggaatcctcatcagctcctgcttcgaccaagtgaacccctcccacgtttcatttaaaacaccatttgcctccctctctttctctctctaacagttttcttttttcattttttttctttttcttttttttcctttttgagacagagtctcactcagctgcccaggctggagtgtagtggcgcaatctcagttcactgcaaccaccatctcccggattcaagcaattctcccgtctcagcctaccaagtagctagaattacaggcacctgccatcatgcctggctactttttgtattttagtagagacagggtttcaccatgttggccaggcttgtcttgaactcctgacctcaggtgatccgcccgcctcagcctcccaaagtgctaggattacaggcatgagccaccgtgcccggccaacagttttctttaaacaaaccaatccccctcttcccatcctgtgaggagaaaaaaaatacttaaatttaaacagaagtgaatagggaagcaaacaggcaggaaaagcaatgtcaaaaataaactgaaaaccagttatctatccaccaccacccaaaaaatcccaaccaacaaccagcgagcagagtaacagttcaagtcctgaagcaatcggaatcaaaacggaggaggtgaaaaacatctggccagttcccgatgtcatttccaaggtgtgtggtgtttcctccataaacaggatcctatcccagtttgtttcaaagtccctgctccctccacatcctagaacaagaacccggtcactgccaggcacgattttagccccatcccattgatttccccagactccgtcctcaaaatacacttttctgaactttctagaaaaagttgtctctgtatccactttgagccaaaagtttcaaggacttggttcttagaggatcatagaaaaatagcgaaggaagaaaagaaaaagcaaaactaagatgaggtcagaagaagcagagccgtggaaaggaaggagaagttttgctgagagtccccacagcgttgggagctgtcctacctgaagggtcccagcgacagaggcgctctgagtggcaggtgctggcagcagccctggtccgctcttctggaagtatgtgaccgcactgaggggaaggacctgcctcccgaggttataagtttcctctgctggtgtactggggtgtgtaatgggcggtttcttttcaccgtgttttaaaggagtttctatgaatcagtctggctttaaaaaaaaaaaaaagatttgttggtaagctacgccctgctaagctggcagtcagtcaagagtggctgggagtgagccatcaattcaaagaaccctgttgtaggctctctctgactcagacacacagaccacagtggaaaaaaggagggacattgcttcaaatgagtaacaggatcacacaaatagatctgtttactgaagcccattcctcctcaccaaaaaggagacttggttaccatggacataaggcaaaacacaaggtttcagcctgggagggggaggaaaggggccagtgtcctgctgactgaagtcctaggtcatcatcaagcgagattcccagtcttcctcccccattaaaagcatcagctgctgctcactgtcaggaattatcagattcctttttttatttacttccctgcctgaccctggtgcactgtcctgtgggtggctgtacagggaggccctgaaggcgaaggggacacactaggagctcttgcagccctgcctctgagtgatggagcactgattgaacagcagagaattcctggtctttcattatgctctgctagtgcccgtgtggactctccacattccaggaggaagtcctctagttaagaactttgctctctgtaataatcagctggaccttgttctacaattgactttcttgaacttggccagtagcataatcatccctactacctccctgcaccactcctctctctctctcaactctggagctgggagaggcctgtgaagtcatctcatcccacagcccaggcattccactggagagagtaaaagcccagatgcctgagttcaagcccagctctccacaaatttgctgtgtgactttaggcaaaccacttaacttctccatgcctattttctcatgcataaaatggagatggcaggtatgtaactcatagagctatgatgagaaatacacatataggggctcatggcagtgtgcatagtgagcgctcaacaaatcttagctacaaggattattttactgaagaagcagctcaggcccagagaggtgaagtgacttattcaaggagatacagtacgttaccagtagcagcttggatctaggtcagcacatccaagcaattctatttctgttattctctgctgcaccctgacaacttatttcaattcaaaatatgcgtgtgtagtatttattcattcattctgccaatacaggctgcacgtcagtcttcactgggcctgattcagagcactgagtcacagaagtgaatgacatccctgcctcttggaacttatattccctaaaaagatagaaaacagactggtggctattcaccaaaatgttgatcaaattcgatgataaaattatggatgcagtttagtttgttctggtcacaattctgtattttccaaatcctctgcaatgaacctatattactgtctttaggatgttggcatgtggatggatggattttaggaaaaaatattttaacatgggaatgtggagaatattttctaaggtggatgataaggaaaacacaacacacacacacacacacacacacaatgatttgatgatgctgcatcttcacaagtccctgagaactgaattctatctctgtaaaagtaagaaggtctggattttctcactgaaaactgatgacgtgataaaagactgcatgtttctcatagagttcctcacctctcccctctctcattgctcatttgataataaaaatgcctgtctgagaggggccactcccagcagtgggttgagagtccctgtgatctctgagcatcccaaccctcagggaggggagggtgtctgcaggtgaggccaggaaatccccaggcatgtgctggcgctccagatgggccagtctcccctgctggaatcggcctgtctccctggccttttcctactctcagggttgcctttcacccctgatgccctctgccagttttaaagtctctcttccctcagctgcctggaaaggagaactggac

SEQ ID NO: 916173 - DNA, 4001 bp, Homo sapiens
attcccccaagaaatgctcaatttctctgcactttctaagacttcaatatgccagaacagccactccctatccatactggccatcaaggaagcttggtcccaagcctgggtggacacagtgtccctgtacactggtgctcagcccctctgatgactgggacatcctacacatctgtaccgttagaaggccccagatgctgtttccatggagacctagtcaaccaagaagcctcaccccttggactagcttcctgcctccattcacaaccaaaaaaatcaaccaaggttctccacagacatccagctcataaaggaggacctgaggctgtcagtgattccccatgtgattcatattcttgcctctcagttctgagatgttgggatagtatcaacaagtgcagagcctcttccctgccaccttaggaagcctcatacacttgacctcacttccccatcgatcccacagccaaagcagatactgccctccgacctagcagcaagagctccacctgcacttctaaagccactgctacctctgccccccagggaccaaatatccagagttgctctccttccctaaggctggaatatgccaagcccgctggccacccctacacattaagcccccaagttccaccttcctcccaaccaacagggctgaggctggtggctcccaggcccaccctcatgctctcccactgcctctccacccactagggcccaggcagagctggtttctggtaagatgcactatctcatccatggttgggaggcacaacttcctcttccaggggttttccacttagaaatcccataagggtctcctttccacaacccagttggaaatgaccccaagcggaagtttctcccaagaaaatttatagtcataatcatagcgaatttccagttcactgagatctcactttgcaccaggtgcttctcatacattatttcatttaatcctttccacagtcctacacaggagcaacccagtggaaggattctttctcctgtgggcagaggaggattctccccacactcctcagctcagcccctcccttggcactccttcccacccacccactagctaccaattaacccatcagcaccagcattttgcacagttactaaacaggaacatggtcctgttcctctgccagtcccatcccctggacctctcataactgtgggccaggtcccttctgtattcttcaattctcctaacactgcaacagagatccattcctctgacccctgtacagccccagataggacgaggcccacctcctggtcaaaggtcctttcagtttcctcctaagcctgcccacctcctaaggctctacccaaagtaacatcacaccctaaacaacctcacctgtcaccaggcagtggaaggagtgaccaagggcagccaggccactcagaccccatggacaccagccctagctttattccttacagtggccccagacaacaaaatcttggggagatcaaaagtcaggctggactaagggatatttggggctgatcctccaaggtgtcaagaagggaattccatgaaatcagaccatcagccctgcaactctctccacatagtccagtccattccgggaccaacgcctgcaccctcagacaaggacaacccaaaagtgctctgcggctttaggacagagctcaccctcccttgtcccacggccctgccctctaccaagttctccaactctctgcttctttaggcaagatcccgccccaccagcaatcccatgcccgccagatagtgacttaccagcccaggccaggccacacagcacggccaataccagggagatgcaggccctcatggtgcccagttggaggccaaaaagggagtggctgttggactttcactagagtcagatgaatgtcacagctctcagacgagccttattcctcaagctgatccttttaaagacaccaggacttgtggagctggtgtctccagatcctttcaggaagaaaaaggggagggagggaccctagatggataggaggtggggccctacagctgtttgaagcctgagggaaggtgactaagaaggtaggtaatgccagatgttgagaacaggtaatgctagctgtttgcagcttaaaaaataggtcatgcaggcaggcacaccaagatgggtccagtttggagggttctttgtccaaattagggacacccatgggctgatctttgggtgatccccaccaaacagacacctacttccaagtctcagacctgactttccaaggggccacaggttggattcatcttcaaattcctggagcttagcatgacactggcacacagtaaggtgattggtccaaatttgacaaacagtaagtgcccaagcaagggttggggtcattggacagagagatagaggatgtgtcggtcagaaccagtgctattcttatgaccaccaagcccagcatagctaaatcagccacatgtcgagcgcatggctaaatcactctaaaatattatgcaaatgactcttactgagtcagcctctggggtttaaacgtttcagattccttatgaggcaggggaggggcaagaggcctcttaaaggcagccgaaggcccactcttcttcccctgggagcccagggtttcactcccttcaccccaacttacactcctctcctcaggaactcctccccagtgaggttcttttgtttccaagtccaaaagaaggggagcagctccccgtgactgtccagttttccccgataataaaggtaaaatctgccaagtatgatgcccttgccagaaagagcactgcatggggattctcaaccctctcaggaaagaaaactatcatataaaaaggcaaaattggtgaacagtggaggccactctatcagtgatttttttctggaggttgggagtggagcacgtcttcatccagtgtgctttaacaggagaagtttcttcctctcgctggtcttcagctttctcatctgaaatgatggggttggatctgacaatcccttccaggttctcagactttaatctcgagttttcctgcccatgcgccaggttgaacagttgctggtgggttaaagagaatcccccagcctgttgctgtgtagagaggagtccaaacatagggactcaggggtagagagaaggacaagcctagggcaagcaaactttgcaaggggctcacacaggaagtgcaatgtatgtatatattttgagatggaatctctctctctgtcgcccaggctggagtgcagcagtgtgatctcggctcactgcaacctccatctccccagctcaagcaattctcatgcctcagcctcccgagtagctgggattataggcatgcaccaccacacctggctaatttttgtatttttagtagagaccatgttggccaacctgatctcaaactcttgacctcaggtgatctgcccaccttggcctcccaaagtgctgggattacaggtgtgagccactgcatccagcccggaagcacaactaaagagtgagcctagcccttctctcccagaagggagctggttagaatgagtaagagcagaaatggctgcttcatttgcatagatttcatttacacaatccaaaagcaggctgaagagtcactgcccctcagaatcctcatcctccctgggttggcaccacataaacgtgtctctgactcctgttgtttaggggacaaaggagggtgtcactggctggcctgggaagcaatgatgcctcagaatttgggaatgaatggtctgtcccttccaagtgtccagctgggtggaccctagctgaagccaaagctgtcagagtggagtacagcctggctaggttctcctagtgtccagctgaactggccatgggatggtgttttgagggcaggagctctccccccattaatggaattttaggtcaggagcaaggattggagctggggaagacagttaaggatgactccatagagccagatggttcatctgagtacc

SEQ ID NO: 916174 - DNA, 4001 bp, Homo sapiens
gaggctccactgggcactgcagcccggaaaagacctaaaggaggaacatggaatgagagggagtgaagaggacacaggggccagggagtccttcagccttctggctctaaactgcctgcctaccacatctagctctctccccacactgctccctaacatccccccacccccaccccacacacacactgaggcagatgcacaagaagtggcctcctcatccacccatctgaggccccacatgcacaagtgggagcccgcagaaagaaaattgcttgcagcacacgtctgcacacatgcaagtgcacaggcagacacacggaggcaggacatgcctcacacgctaaactcgaacacagacccacctaccctggctccccggacaaggaggatccaaccgccacaacccaggcttgtgagcctggcccagcaccccatacccctgggtatcaaaaaaggcctccgaacccctggccgaacccagcctggccgtggaaaagctagggctgtaggaaggcccatgccacacccattacctttggcagtatagagatccacctccactgtggggttcccgcgggagtccaggatctcccgggcccagatcttctctatggacatgatggctgggatctcctcgggtggaagggaaggaaggagaaagataagaggcttagaggggtggagcctgagatcaatgggcggggcgggaggctgggagggatgggaaagaggttactgcagtgggtggggggtgggtagggaggcgctggctgcagtctagggctgtagaagggattccccctcccccctgggaagaggagaaggtcaatgcagtgaggaaggggaggtcactgcagtggggggcggggtaagatcaaatgatgagatgggagaacactgcagtgaggaggggaggggcacgacagtggttcccgcgcctctttgcagcttggccagccggtggggttcccccagatctcctcagagcggaatggctgccaggcttgcatttctcctgggagccaagaagaggatgggctgcctgggcctctcttccagagcccccatacctccccaacttaacaccccagctgcctgaacactgccccttccccaaggtcccactctctcccaaacgtgtatccctcctcttcccgcgaaaggcgcatgcaatacaggtgtcggggaagagggtcctgagaaaggccctgcagtccctgggggttgcagcgggaagtgaagaggataagagccggtggggagtggaggcgagctgggcctgtcctcccctctgcgcctcgacagatccccacttcttccatctctcccccgtgcagcagaggggaggaagcgcgaacggagaggggcgccgtggggaagagcaggagagaggggagtccaagggaagtctgggggaggtgaggaacggtgagagaagacatttccccaaatgcaaaccaaaagggacgctctaggataaaaatgcaccgcccggagaggctcccaacttagaaacaaatagaaccgtagatgagggcgagcaccgggagagaggcaggcaagggtggagaggcgcagttagagataggcgcgcagagggccagaaagcgaaggcagcgggcggggaaggccagggagggaaggcgccctgggcgcgggcggcggagcaggtgcgcagctgcaccgggccagagatgcggagaggtgcgcagcggcaccgggtaaaggaggcaggggcgccgcggcgaagggagggggccacaggggctctgggcctggcgggggcttcacctcgggactgcagactcagacggtggtagtggcggtggcggtggcggtggcgacggcggcgctgagagagcgggagtggcagtggcggcggcggctgcggctcccgggcggcgggcggaggaggcgcctatagggccgcgcgggcgcatgtgacccggagcccccgatgagtcaggagctgccggcggaggcgcacgtacgagcgcgggtgggggaccgacgagggtggagtggggaagggaggaggatgggggaagggtgggggcacccacgacctggccccagcgcacacaagcgctcatacccacggcccgacccactcgacagtaacaggcagagccgcacccctgtagcccgggtacgaaggcccacactgccagtgaagcccaagacagcctcaatgtctcacaaacccggtcagacacaggagcatcactctgtttctttattggaaatccgaacaccccagccgccttcgcaagtctctccaaccactcctaccagcaccccgcggcccacgcggtcttggctctcacccacgcctgcccgagggcggcccccggcctaggctccaggcaacgctcaggcctaggcaccccattctgcaccccacactgcccagaggaccggcacagagcagatcctgggcctcaggttgtgatgaatttccagctttggggcaaaaacaggcatcctctgttctctgtcatacatgtggtggctgcccctgggagtctgatcaggtctgaaggccagcgtctttgatctcctggaggtagaagacagaagtaaatagggaccaggcgctgtggctcacccctgtaatcccagcactttggaaggcggaggcgggcagatcacgaggtcaggagatccagaccatcctggctaacgtggtgaaaccccgtttctactaaaaatacaaaaattagccaggcgcggttgcatgcgcctgtagtcccagctactcgggaggctgaggcaggagaattgcttgaacccaggaggtggaagttgcagtgagctgagattgtgccactgcactccagcctggagactaagcaagactacctcgcaaaaaaaaaaaaaaaaaaaaaaaaaaaacaaacagaggtaaataaagcctctcccctatctaaagtgcctggcggccaccctcatctcttcagtctctttttgcctcactctgccctcttttcttcccccatctctgtgtcctgtttttagcttcagattttttgtgctggatcttcctctcctgcttctctcctaggtccagctgcatacaccaccaactttcccctgcagcccctaccatgcacccacacctgtcctttcctagccgacttcactctgtgtcaggtatggctgccccaccccccaccaactcctctgcctgccaccccaattcttttcacttactcttctggcctcctaagtctttctcagctggtcccaggccccttgggtcccttttcctctccctgactcctaaccctcctctctttaagggtcctgcttgtctgatgctttcctctcccacctccttctgcagcagcttcccctcttgcctcttcccctacctgcccagcccttggcctcctcccactgcctccctgcaggcttccttactatctttagaggctagaactgctgctagatcaatgactgttcgggttccaggtcacgctggggctcaggctcctgctccttttcttccttcagcctctgtcgaatcacatcagcctcagcccgttcctcctcctcatagaattccttgtccaggcgttcaaggtatggcatctgcaccagggcctcctggcggtagctggtttcgtccgtgcatgggttatcaagcagcaccaacgctcgcagcttgggcaggtctcgaagcttggccagctcccccaggttggccaccatgttgcccctgccagtgtggtcaggaggggttcatgcaggaataatgggctttggttgccagttgctaggaatggggcctctgggggactctcggggttccagtgtccctagaaacactgtgaggactggcctgccaagccttgccagatttactgcagaggtgctgtgtgaccccgctctggtcctgcttctgcccttcaaggaatccctaagtgccatattctactctgtaatacattcatgtgttcttttggtgcagcaaagctaggccacaaccctgtcttgta

SEQ ID NO: 916175 - DNA, 4001 bp, Homo sapiens
cctgtaatcccagctacttgggaagctgaggcaagagaatcgcttgaacccgggaggcggaggttgcagtgagccgagatcatgccattgcactccagcctgggcaacaagaacaaaactccgtctcaaaacaaacaaacaatacaaaaaaattagctgggcatgatggcaggcacctgtaatcccagctactcgggatgctgaggcaggagaatcacttgagtctggcaggcagaggttgcagtgagccgagatcgcgccactgcactccagcctgggagacagagtgagactctgtctacaaaaaaacaataaaaagaataattacagaaattattttattgcacatattctgctaaagaaaatgacaacacaaataagtaaaaaagaatacaactcatccacgaacccagagagaagccctattaacacttccacgtgtcccggcgcggtagctcacgcctacagtcccagcactaggaggccaaggcggtaggattgtttgaggtcaggagttcgagaccagcctgagcaacacagcaagaccccaactcaaataataaaaaattggccgggcatggtggctcatgcctgtaatcctaacactttgcgagggcgaggtgggcggactgcctgagctcaggagttcgagaccagcctaggcaacacagtgaaaccccgtctctactaaaacacacaaaaaactggccaggcgcggtgactcatgccttcagtcccagcactttgggaggccaagggggcggatcacgaggtcaggagttccagaccagccggaccaacatgatgaaaccccgtctctactaaaaatccaaaaaaaaaaaaaaaaaaaaaaaatagccaggcgtggtggcaggcgcctgtagtcccagctactcgggaggctgaggcaggagaatcgcttgaacctgggaggcggaggttgcagtgagccgagatcgcgccactgcactccagcctgggtgacagagagagactctttctcaaaagaaaataacaaaacaaaataaaaagtgagccgggcatggtggcccaagcctttggtcccaaccactcgggaggtcgaggctctagtgagccgtcatcgcgccactgcacgccaacctgggcaacagagcgagaccccgtctcagaaagtaattactaataaagcactgggatacgttacttttctgtcactgacacagcgacagctgagcagaagcccgtgggccgcaggtgtgtgacgagaggcgcccccggggaggcagcggcaattactaaggctccgccgtggaggaccgggcaggtctacgccgagaaggagcggattcggacctcactgtaacccctgtggcggcgcgttccgggacgcccgggacgcggggtccttaagttctgagtgaattcgccccgtcgcgcctcaggaaagtggttctggacgtcccatccccgcatctcagcgtcgcgtccgtgaccccgagggaagcccacgcaagcgccaggagcaagagccaccccctcagccccgagaaccaggaggcgcgggccggagtcccccggttcccgcaacgccgccgcgccgagctgccctcggccacgcccccagcccaggagcccggggggccacgagaaatgggcgcggatcgcgcgacctgcgggggacgggcgctacgactcgaaagacccgggcccgtgagccctcagcccggtcgcccgcccggggtcgctcacgacagccgccacggcctggtccccacgcgacgcccgaggccggccggcgagcgggccctgtacgcccgcggctgcggctacgcgaccccggaccctggacgctgccgtcccgagagcctcccgcccccgtcccgcgcctccgccctcacttaccctgggcctcagggctgcgctccggccgcgtcaggagggcgggaggatggaagccgcgccgcagccgctcagtgcatccggggccccggcgggaggaagcggcggcgcggctgctacggcgagccggaagggacgcgcgtccgcgcgcccgtagctgcgcttccgcggcgccgctctgaccgcgcgagggcgccggaggtcgagggcgccggaggactagggcgccgcgagactctgcggggtgggcgggggccgaacccaaggccgagagggacggaggggggccggtcccagacagacggaggcggggccggtccgagacagacggaggcggggcggggccgagactgaggaaggcgggggcggggccgagactgacggagtcgcggcagcccggcttttccacgcgcagttcgggaaatgcgcccacgtggaacagaagtgggccgccagctctcacactctgcagattcaccaaacagaccaggctcacatgcaagacccaaaccctgtgtggcccaggctggcctcgaactcctggactccagtgatcctcctgcctcagtctcccgagtgggtgggaccacagactcgcgccaccacccctggttaattttttgtatttttagtaggggggttggttcaccaagttggccaggctggtctcgaacgccggacctcaagtgatccgcccacctcggcctcccaaagtgctgggattacatgtgtgagccaccacgcccggccaaaaacgacaaaactctattaaaagacacagacgtagctcacgtctataatcccagcactttgggaggccgaggcgggaagatcatttaaggtcaggagttccagaccagccgggccaacatagtgaaaccctgtctctattaaaaatacaaaaaattagctgggcgtggtggcaggcgcctgtaatcccagttactccggaggctgaggcaggagaatcgcttgaacacgggaggcagaggttgcagtaagccgagatcatgccactgcactccagcctgggcaacagaatgagattctgtctccagataaagacataggcataaatcttcggggttgtgggttaggaaatggtttcttagatatgacactgaaaacgcaactaacaaacatagatatattggacatcatcacaatttaaaacttttgtgctgcaaatgacaccatttaaaaaagataatccacagaacaggagaaattaccttaagtccatatgtctgacatggaactcgtgtccaaagtaaataatttacaacataacaattaaaagggcaggcacggtggctgttgcctgtaatcctagcactttgggaggctgaggcagttgtatcccttgagcccaggagttcaagactagcctgggcaacatagagagaccccatctctacaaaaaatttaaaagtcagtcatggtggcatacacctgtagtctcagctactcaggagactgagggagaatcacttgagcccagggaggctgagggtgtaggaagccgtgattatgccatagcactccagcctgagtgagactctgtccctccagccagggcaacagagcaagactccatctcaaaaaaaaaaaaaaagaaaagaaaaagaaagtaaattagtggttgtcagggactgtggggagaggataggcagtaactgcaaatgaatgtggggtttcctttttgggttgataaaaatgtcataaaatgagatagtgttgatggttacacaactttataaatttactaaaagtcactgaatgatatactttaaaagggtgaatgttatggtatgtatgtgaattatgtctgcatttattttttaaaaaagaaatgtgggctgtgaggtaaagtgatgaatgcttaactttaaacacactgaaaatttttggctgggcacagtgtctcttacctgtaatctcagcactttgagaggctgagacaagaggatattgaacacaggagttcaaggccagcctgggcctcatctctacaaaaaataaaaaataaataaactgaaatttttaaagagaaaacaatttggctataaaagggaagagacagagggaaggttggaaggggataagattaggtggataac

SEQ ID NO: 916176 - DNA, 4001 bp, Homo sapiens
tacaaagagaatgcaccaagtcttgtaaacagcggttatctcagaatagtagaattaaaagcaaattatattttccttcttttttttctgctataaagtgaatgacttgtggtgcaatcttacaaagtctcaatctgtgtattctgcaataaaggcattatattatcactattgcatttgtgatacattctaccttaccctttatgtgacaattctatactgttttaactgtcaaattgtaagtaaaagtgtgaattcgtgaccaaaaattttccacaccagcaacttaagaactacagcaatatgtttagaaaactgcgatcccaaacaaaaaatctatactaggtgagacaggatgacattgactttaattccaatagactcactaccacatgacgtccattactagtgctcactttccagaacccaaggagctgtggaagaatggagtcctttcaatgaaaataaactagaggcaatacacaacacagttactttgaggggctttttcaatataaagaagattgcccggaatcctaactctcctatttcccaaaaatgacaaagccaaaaagtcacactcttcacacatctgaaatcaagttttacctgaactcatcctaacatattagctcttttacctattccccttactatctaaggcaagaaaccttgaaaagagaagcagtaacacatttcactgaaacatattttgtaaaggaggattctaattcctaatccttcaccgctctagatgtctgcggatttcaaatcctaaccacggcgtcctgccccccgcgagattccaacagtactacgggccctatgggaggaggaggatttgagaaacactgccggagaacggtcggtgcaaagattttgcaaacaggtagtcctaggaaggaaagtaagagtgagaacatcggagagggcagggagtacatgggtggggaaacccctttcaaatgcatgaactgaccacaaccggagaaaggccgtctgtcttcccaaaagtaaaatggtgagtaaagtggagcaagctaagaaagtcaacagccattaggcattgacaacgattccgaaacaattagctatgttaattcgagggggtaaacgggggtgggaccctgccctaaagggtcattttgaaaagaacccctccccatttgaggcgggttggcagagcagcgcacaaatcccaagtctaacgtaataagccgagatcgggatactcggtctgcagtcgccccacggaccagatgagcgcaggtgtatctgcggaagctcaggttaccatgaatatcactgggccacggcgaaccctccctgcccagcctcccggagccctgggcgcgggtctgcacgggccccacagcttgcccggacccggcgagcggacgcctccggccgcagcgccctaccgcacctggctgccaacaccagttgaaagcagtcaaagtgaagggaggcggacgcggctcctggcaccgctccgattccagcacacaaaggcggatttttaaaatcgagaaagtcaaagccgccggaccccgggaccggcgcctttcgccaaggggctcttacctcggatccgccctcggggccacggctttccccggagacgccgcgagcccagacgaggtgggaggggaccgggagaaagccccccaatctgattcgcgcccagccagtcgtccgcgagccgcggagccgccttctgcacccagctaaagagcagcgatctccgaggcgagcacagcgccggcctcgcgccgggcgagaccgcctcgctagctgctgcctgtgaagtctggagccgcccgcccgctcgcagccagtgccaaccgcgcgccgcgcatgcccagtgcccgcgcgaggaacgagcgagcgggcgggcgggcgagtgcgcgccccgcagccaggagcgaaatccgctatccgggtcttgccggcagccgagccgcagagttctggtcgactccagcgcttgaggcgaagtggccggtgaggccgggtgggcgggagagggaccggaggaaaggagacggggcgctgcgccaagttatcaaggccgcgatcaaagtcggaccaaggcagcgagtcgacagcaggtttccagaagtgccctaacaggactgactagcagccaggaggcgcaggaaggggcaaagagcgtgtggagagcttcgcccccggcgaggatggacgccccgggcggagggagcgctcgggttgcaacacccagtctggctgcacagctcgtaacccctgccctttggcggcaaacaagacgcatctaatgaccagccagccttcgtcttcctcctctgatcatcggacctattttcccccttttgtcgctctcctctttttttgtctctccaacccatgcggtaaactggtggtgcccaaggccctccatcgggtccctgagagtctcccaactgccggtccttagcgccagcctgcaagcccagacccgcctcgccaggctgcctgtgagcctatttttcatgtagctcttgccaaaagccctgatgtggtttgaagtagtggaggcttctttcactttgtgcctctcgtaccttaaccaaccctcataacctcctctctgagtagctcatggagcctctaaaagagaagtccatgttctcatagacattgtgttttctcactcttaaaactcctcattgtcatagctactcccccaatccccccatgctgtcctaacttcgaagtcagttgacttccagaagtccacgaaagcctataaattaaacttggttaaaagagattggacttgcttgctttgtgaagcaaataaaagcacagtcagggagaaacgacgtaacatgccaaggtggacattcaaaccattctaaaagttggaatcgatataacggctaagtccagtcccctattttaagtgggaatactctctccaatatttccaccagaccactatccacttgaacatttccaatgttgtaaatttctatttttatcattacatataaccatgattatttgttgaatatttacctatgccaggaactgagcaacttacacacattattcctagtccttaaaatgagatgggccttattatacctattaaacacattaggaaaatgaaacccagaagtttccttctttttgccaaagccaatgctgacgccagaattaacaaccaggtctgcttaacactatagcctgtatcatttatgaacatcaaatcaacttccctgatactactggtcttggttctgcccctaggaacaacacaatatgaatctcattctttatagacactgcaagccttgaaatagtaggggcaactattaagtaaccaacagatctaatacatttcttcaaaaattctcttttaagtgtttttcaaatagcagtgagctgccataatcacactattcaccttgctttgaatgtgttttgattttcattctcctctctaaattgtgcactgagaatacaatattcaaatacagtgggccaagaactgagttccagttctccagctgctgatcagccacccctttgatgcaagcacacactacctagattcaaacagaacacccaagtctatttcacatcaactaaattaaaccgtatcttccacctttcatagtctatacttctatgtatttaaatcttgatttttgttttattcttattaaattttatcgtgtttgttttaggacacaatttcagataaatactagtgatcacttttaacatttgtaaatttaataagtatgccttgtttggctccatttacgtctagtaagaaacagtaacacagaacgggctttaaaaaggcctgtgatattataaaatatatatttggtcttcatcccatttccagacatatagctcctaaaatccttgaaatctccaaagtgatgaacatctttttgtatttgaatgaattggctgatggctgggggctccagcatagcttcaggatggggactggtcatagg

SEQ ID NO: 916177 - DNA, 4001 bp, Homo sapiens
ggtaatgcaactaggatatccacaaataattccaatttcagtgatccacagtgtggcttaggcattggggttttaaaaataattttaaaaataggactcataactgtttcttgtacatttaagtctaaggccttcttcagaacaaagtaacaaagttttgtttgttttttctgttacttctttgtagcctctggacatataaatacatacattgtttaatatgtacgttagtatttcatgcaatattgttcaaaatgctcctaatgaaatagaatagaaaaaaaatttcctttagtcctcagtattttatttaattcttaatagctatctaagatttgaactcagaaccaacaggaatacatgtttaaaaggcactatttggtaagattcccttgtatgcctgtgggattatagccatctttgttttttaattccttaataagcacaattcttattttccattataacattatgctttttgaggattcaatcaagatcctataatttaattatttttttagttctgtatgtactcatttgaatacattttggtttagaaaaaaaatcttcacatttaatttgaaacatttaagttagtcttaccaaaatgttacctagtgatcccttattgagcaggcaaagtattgtaaaattctgtatcaagcatgtctaattttagaggcttttacatttggacacacttcttgggtttactttaagaacagtacctgtggtgttactacctatgcatacatataaaagggaattcatgataaatattacttttaaacttgaatgcactggcagacaaaatgaccttcagttacttgaaagaaagcctttatgaagcaggtttaggcagaaggatatgaaattcctctgagaataagaagcagtacaaggagctccttcttagctctcctatgctttcttcaaataaatttcttattcacacaggataaactaagcctctatttcagttgcctttgcagaagtctttgcaggattgcagatttggaactgttctaggcaattaccaacaaagtcctacttaataaaacagtgggtttgcaaatcttccaggaaccattctcccataatcaagttggaaacattaacagaagccactaccaacttaaaaaaaatttttccttatatgtttctggcaacttccattattcaaagaaattatacacttgctggccttttttctcacatcatactatatttgattacatatagctacatctcagaatttgcttgcattttgcatcactcctagagctatcaactataaggcaggctgtgtgaatcttaaaaatatatacagcatctatctatgtttagttaaaaaatttatattcctttcttcaagtaattgtattagcatttaatgtagtttcttaattaacactttaattttgtgttcactttataccatttattaatattttaaaatttgtgtatttaaaactttcaatatatagctcaaaaaaattttaaatgcataatgtcatgtaatcattacaatacttttaatctcaggaaatttcactatttcctcccttttcacaaaatttcaattaatatcaatcaatagtgcctgtctatactggcaaagaatgtggtctgtgtcaggaaactttacttaaggcatatattggaaactactctaattttattggcatctgtcatgactactgagattaactatttgctgtatgttattaattcctaagctaattcaaaattttggattttccaagaataatataaatacaaagtcaataacaaaaataaaccaaatccattgaatcaaaattcaccagatgacattaaggcaagttaaattattttttaaaggttgttatagtagggaaagaactctgacccaagaagaaagcaagtataaaaacttacctttggctctgacctgatgaaatggcacaaagtgactgaggatgcagagctagtggtatttgcccctgaccaatggctgtgaattctggtctgtgggaggtggaatttataacactcaactttctgtttgcaaaacctaatattgagaaatacttctcagtctttaaaaaacctcaaattattttatagtcacccaaactaagcagtaggatccaaatcacatagtatacaaagttcttgaaattatgttaatggagttataattgccaaagtatcaccttaaaatttttaaatggaaaaagttggatttaacatacctcatctgtaacaaactcaccaattaagaaatgaagttcatgtatacagtgatactatagatggatattttagttctaataagaaataattttcccaaaacttgaagtcttgaattgctttcttcacttttcattaatgttaagtgaaatttggtaaatgttgcagaaaccttacctgtttaatattgggtaagtaaaaaaagatatcccaattattttgattgcatggaatgctttgatagcaaaacagggaaaaatgaaccttttgcataactttaaaaaaattacatccagaagtgatgcataaatatgatctgcgtgttttggggagaaaaggggctttttttaaaaaaagttattgtatctatcatagacaaataaatcaaattacacattttttccttagaataggagctttattttaagctcttgttaacttccatggtttgtaaaattgaactttaatacaaatatgaagagaaaaaatatgctttaaatttccatacctcaattttacattgtataagtcctagagaaaggtgaaagttgcatcttgtattctggtatgctttagataaatctaggaatttggttctcacttatgcttcaggaatcttttccttcatgtctgcaagtgaatagatgtattgaattttgaaagcggtattactcctgggccaagtgatgggagagaagaaggtttgtctttaaggttctctcactccccttcctgcctctgctcccatcttccctgccctcaaaatgtctttgcccatctattcagggcattcttatttgtcatccccatcatccaaccctgtttccaaatgatttgttcttagtatgcattgtttttctcaaaaacaattttatttggagcagaaacagtgataatgggtaatgtatgaagtctaccaagacctctcaaaaaatagagaggccatcttggagacaggaacttatttctggcatctgtgaagtctcaccccaccatataaaggccacttttagaagcagtgctggaaagatgcctgaatccaagtttctaggcttgtcctctttagaagcaaggtccacgtggggtgtcaggtgatttcatatatgattgttaatcacctcaacacattcttaagcagagtgcttaccactattcacagatgggactactgagactcagatgataaatgatacagcaccatgtgtgacacaaaaaaagaggaaatcaacttggcttttctctgtgtcaggtccctagacatgattgagtctgtctgagggatacgtgtatacacaaaaaggcagtgttagctctcagttccacgcatttctgattcaaagcctatttatctgtcactagcttcaggctctgctgaatgttttagaagaaacaacagattccttgagtatctatgaaaataccaactttcttccttttccctcaatatttgatctagtactctgtgcaccttgttaggtgacagagaggtgagagctacctagcttcttgctttctggagggctctggttaaacttacaagactatttccagaaatattgtttcgacactatcctttgttgaactgttggtgtttaaattgtgtcttccttaggcttcagaacactgtgcagttgaagtccgattttcatgacaatttaaaggccaaactacttgcctttgtgtagcattgcaagcagaaatgatcattcttgaaccttttcttcctccaaataaatacgatttttacatttccttgtaacagttga

SEQ ID NO: 916178 - DNA, 4001 bp, Homo sapiens
agactttgtgtctgtgcttggaaggctacagtgttagaggtagcccagttccctgctaccctgagggtaaagtccatattacacaaacagggggcaaagggcctgggcaggaagggagcacaaacaacacctctggggaggagctaggcagcttggggagcagggcaggggaagggaatcataaaaatccctgctgtacccaggaaccgggagcatagggaggggcagtgtcacaggccctcctttggtagagagcactaggggtgggatagagccagaatctccagcccctcctcaaccagaggcctcccctccaacatcccccacccccatcacagccaggacaaaggggctatagaaggactgagacagggccggatgcccagaggctgcaggacccagataaagggtaaagagacccaaccatgcctgcctcctgcctccccagggagggtggccagactctggtactcctgggtttctgggtgaagattgcaggagtctggatgggacagttatacagtcactccactgctccctcccacgccagtccccagaccacccccctccaccagctgggagtgttcacatctaaaaatcccaggatctaaatttaggcccagcaactgtgagggaagcacaggtggtttcttccactcccacactggggaaggggccctggctgtgccaaaccccaagctgagatctgaggggaggggaggagatccacagaacttcagtcctcaggtgtccacggtcccagagacaccccaaaggggtgggctcagatagcatgggagtcgggggaggactggagaagagcaatccggggctctgtctagggtcctagagacagtgtcagacaataagcaaaatgggggcgggaggcacaagctgagcccaggaaggactccccaaggcaggaggcttagaaagtagcagaggtgccctcttgatcctcaggttggggagagaaaagaccagaggctggacatccttgcccttacagctcctggcccagggccttgtgtatagtagatgctcaataaatatgagttgtgttgacctgggtcttgacaaagagatgttgcttaagctctgctatactgaggaaagggggcgccagcctctgttgggcctcctgcctgatgtcacctgaacttggccctctggttaatctcagacctccccagggcaggctcactcacggaagaggaggtgccgctcctgtttttccaacaccagagaacaacaaccccctccaaccttctgtagctccgccctgtcggcaaaacaacgaaactaggggtagctgaaatcggcgcgggtggggggcagggggttggcgagcaaaccgagacccttcccgccaaggcccccacctccaagcacctcctgtttacagaatgaagttccctgctcccctccctgcagggcccctcagaagtgtgaactactgtttcggcctcagcctcttctggggagaccaattagagggtcggcgacgctctggagaagggtggcgtgagggtcccggaatgccgccctcggccggaccacgccgataacccgagcctgaccgcccctctcccaggtggtcctggcaaaccgggggcagcacccacaaccccgcgccgcctgagaccgtgcccataccctccgaggctgcgcgcactgggttccggctcccaggtgccgagcccgccggtgctctcgcgccacttacctgcctgagagttgcccacctcggagccccgggccaggctgaaaagcaagcccagcacctgcagagcgtcgttcgccctcatgactccgcagagggtgaagggagcccagccaagtccggcccgggggcccctaggctaggacatcgaggcaagagccacctgaaccgctggcgaattggtggctgctgcggcgacggcagcggaggttgcaaattgcaatcggagccggagccggagtccggggagggatggcaggggaggggtgtgtgtgtgtgagagagagagagagagggagggaggaacgcagagggaagggggtgagtcacggccgcgccccctcccgcgcgaggctggagtagggattgcggagcctcggaccgcctgccccgagcgtgccacgccccgcggtcccgcaacttggcggagcagatcgaggatggggctcaccctaatttttctgcaggagataggccaaggggaggtcgagattccgaaagcccccagatccagggaagggtaatgaatgagggagtggaaagctctccaaagccctgccccctgaaagttggcctcgcccattaaccaaatcactcaactcccctagccggttggttcacttggtggattttctctcagaatgtgaatatttctctctgtgtgtttttgagggggagggtgttttttgcctcacgtccaggccacctcagtttctcccagactcgaaaccccataattcatccacccagcccaggaacccgagccacagagaccgcgtgaaattgcactgtctctggccgcttcctcctccagacccggcgccggccgggcctctcccggggatttggatggggggcgggggtggtttccagcctgggaacagaccccggagcccgcctttccacttctaccccgggaggggctcccgcacctgtcgccgtcccctctgctgccccccacggccgcctgggagaacagctgcctccccttccacactggagtctggccgcaccgtccgggcggccgcagttcccgccgctcttctggggacccagatgggcacacaccaaggcgcttacaccctcccaggtgccttccaagtccaggctctcgcaggaaaggggatggggcagtgaagtgggacgcggagaggacactagagactgcgtccacgaatggcgtggacctctggaacctcccccaccagctgcccggacctggccagaggcggtcgggctccctgcgggttgctgcccaaagccctgctagtcccgggacggatccgaccggcgccgcctggtgcccatccgtggcagtggagtcccagacggccttgcatttcaaatcccttaaactggtattcgggatctcgcccggagagcctagttgttttctccagaacttcaagcctgaagacttcgaaaacagttgagccttgataaagaaaaatttcacccctcacacctagcaaagactaccggctaacattccttaaacatgctccctattgatatgcaacctagagggcctgttctctactggagaatctccgctttggggaggttggctttctccagaccatgtgtatagtagtcataataataatagcaacaacaaaaccattaacatatacaaacatttccatatatcatttcatttacaaagtatgtcctcaaacttagtgccttagagaatgtgtcacttaacataaaaattatatgatttaggcaatataactccccattttacagaactagaagtgtgtgacctctccaaggtcatccacctggtgacagtggttgaggtgatcaggtgattgggaggtggggctcagacttttacctagggtttctttctctctttttttttcttttctttttttttttttttgagacagagtttcgctcttgttgcccaagctggaatgatccacctgcttcagcctgccaaagtgctgggatatcttccatcttaaaaaacaaaacattcggctgggcgcggtggctcatgcctgtaatcccagcactttgggaggccgaggcgggcagatcacttgaggtcaggagttcgagaccagcctagtcaacatagtgaaacaccgtctctactaaaaatacaaaaattagctgggcatgatggtgggcacctgtaatcccagctacttaggagactgaggcaggagaatcgcttgaacccgggaggtggaggttgcagtgagctgagattgcatcactgcactccagcttgggcgacagagtgagacgccatctcaaaaca

SEQ ID NO: 916179 - DNA, 4001 bp, Homo sapiens
caaacagggggcaaagggcctgggcaggaagggagcacaaacaacacctctggggaggagctaggcagcttggggagcagggcaggggaagggaatcataaaaatccctgctgtacccaggaaccgggagcatagggaggggcagtgtcacaggccctcctttggtagagagcactaggggtgggatagagccagaatctccagcccctcctcaaccagaggcctcccctccaacatcccccacccccatcacagccaggacaaaggggctatagaaggactgagacagggccggatgcccagaggctgcaggacccagataaagggtaaagagacccaaccatgcctgcctcctgcctccccagggagggtggccagactctggtactcctgggtttctgggtgaagattgcaggagtctggatgggacagttatacagtcactccactgctccctcccacgccagtccccagaccacccccctccaccagctgggagtgttcacatctaaaaatcccaggatctaaatttaggcccagcaactgtgagggaagcacaggtggtttcttccactcccacactggggaaggggccctggctgtgccaaaccccaagctgagatctgaggggaggggaggagatccacagaacttcagtcctcaggtgtccacggtcccagagacaccccaaaggggtgggctcagatagcatgggagtcgggggaggactggagaagagcaatccggggctctgtctagggtcctagagacagtgtcagacaataagcaaaatgggggcgggaggcacaagctgagcccaggaaggactccccaaggcaggaggcttagaaagtagcagaggtgccctcttgatcctcaggttggggagagaaaagaccagaggctggacatccttgcccttacagctcctggcccagggccttgtgtatagtagatgctcaataaatatgagttgtgttgacctgggtcttgacaaagagatgttgcttaagctctgctatactgaggaaagggggcgccagcctctgttgggcctcctgcctgatgtcacctgaacttggccctctggttaatctcagacctccccagggcaggctcactcacggaagaggaggtgccgctcctgtttttccaacaccagagaacaacaaccccctccaaccttctgtagctccgccctgtcggcaaaacaacgaaactaggggtagctgaaatcggcgcgggtggggggcagggggttggcgagcaaaccgagacccttcccgccaaggcccccacctccaagcacctcctgtttacagaatgaagttccctgctcccctccctgcagggcccctcagaagtgtgaactactgtttcggcctcagcctcttctggggagaccaattagagggtcggcgacgctctggagaagggtggcgtgagggtcccggaatgccgccctcggccggaccacgccgataacccgagcctgaccgcccctctcccaggtggtcctggcaaaccgggggcagcacccacaaccccgcgccgcctgagaccgtgcccataccctccgaggctgcgcgcactgggttccggctcccaggtgccgagcccgccggtgctctcgcgccacttacctgcctgagagttgcccacctcggagccccgggccaggctgaaaagcaagcccagcacctgcagagcgtcgttcgccctcatgactccgcagagggtgaagggagcccagccaagtccggcccgggggcccctaggctaggacatcgaggcaagagccacctgaaccgctggcgaattggtggctgctgcggcgacggcagcggaggttgcaaattgcaatcggagccggagccggagtccggggagggatggcaggggaggggtgtgtgtgtgtgagagagagagagagagggagggaggaacgcagagggaagggggtgagtcacggccgcgccccctcccgcgcgaggctggagtagggattgcggagcctcggaccgcctgccccgagcgtgccacgccccgcggtcccgcaacttggcggagcagatcgaggatggggctcaccctaatttttctgcaggagataggccaaggggaggtcgagattccgaaagcccccagatccagggaagggtaatgaatgagggagtggaaagctctccaaagccctgccccctgaaagttggcctcgcccattaaccaaatcactcaactcccctagccggttggttcacttggtggattttctctcagaatgtgaatatttctctctgtgtgtttttgagggggagggtgttttttgcctcacgtccaggccacctcagtttctcccagactcgaaaccccataattcatccacccagcccaggaacccgagccacagagaccgcgtgaaattgcactgtctctggccgcttcctcctccagacccggcgccggccgggcctctcccggggatttggatggggggcgggggtggtttccagcctgggaacagaccccggagcccgcctttccacttctaccccgggaggggctcccgcacctgtcgccgtcccctctgctgccccccacggccgcctgggagaacagctgcctccccttccacactggagtctggccgcaccgtccgggcggccgcagttcccgccgctcttctggggacccagatgggcacacaccaaggcgcttacaccctcccaggtgccttccaagtccaggctctcgcaggaaaggggatggggcagtgaagtgggacgcggagaggacactagagactgcgtccacgaatggcgtggacctctggaacctcccccaccagctgcccggacctggccagaggcggtcgggctccctgcgggttgctgcccaaagccctgctagtcccgggacggatccgaccggcgccgcctggtgcccatccgtggcagtggagtcccagacggccttgcatttcaaatcccttaaactggtattcgggatctcgcccggagagcctagttgttttctccagaacttcaagcctgaagacttcgaaaacagttgagccttgataaagaaaaatttcacccctcacacctagcaaagactaccggctaacattccttaaacatgctccctattgatatgcaacctagagggcctgttctctactggagaatctccgctttggggaggttggctttctccagaccatgtgtatagtagtcataataataatagcaacaacaaaaccattaacatatacaaacatttccatatatcatttcatttacaaagtatgtcctcaaacttagtgccttagagaatgtgtcacttaacataaaaattatatgatttaggcaatataactccccattttacagaactagaagtgtgtgacctctccaaggtcatccacctggtgacagtggttgaggtgatcaggtgattgggaggtggggctcagacttttacctagggtttctttctctctttttttttcttttctttttttttttttttgagacagagtttcgctcttgttgcccaagctggaatgatccacctgcttcagcctgccaaagtgctgggatatcttccatcttaaaaaacaaaacattcggctgggcgcggtggctcatgcctgtaatcccagcactttgggaggccgaggcgggcagatcacttgaggtcaggagttcgagaccagcctagtcaacatagtgaaacaccgtctctactaaaaatacaaaaattagctgggcatgatggtgggcacctgtaatcccagctacttaggagactgaggcaggagaatcgcttgaacccgggaggtggaggttgcagtgagctgagattgcatcactgcactccagcttgggcgacagagtgagacgccatctcaaaacaaaaacaaaacattgttttgtttgacctcatggccttctggtctgttgcttttttttttttgacacggaatcttgttctgtttc

SEQ ID NO: 916180 - DNA, 4001 bp, Homo sapiens
aaaagtatgtttaacattttaactagtagagcctgaatatgatttgttcacatctttggagtcatcagcttcctcactgaatgtggcatggctatcatcaaacatcaactataacctggaggagcacagaaaaataagtgaatatttcctgtagctaatgtgacagcacttagctctcaaattgcaaagcccataattataatgcccagtcatctcatttattttctacaagtaaacaatcacaccaagttgcctttcctccaccttaaatgtaaagaattacagaacgaaaagctacaaaagcatcctgaagttaaacttccatgaatggcaacaaaaagaacaggtacttattgtttgtacttaataaatacatcatcaacattaacttttttttcttttttgagacagagtctcactccagactggagtgcagtggcgggatctcagctcactgcaacctccgcctcccaggtttacgtgattctcctgcctcagcctccttagaagctgggattacaggcacacgccatcacacctggctaatttttgtatttttagtagagtcagggtttcaccacgtcgccaggctggtctcgaactcctgacctcaatgatccgcccacctcggcctcccaagtgctgggattacaggtgtgagccattgcacccggccaacattaactttttaaaagtaatttctgttctcagctgacaacactgacttatcctgtgatagtcattttgttttgtttttaagaatgactttttgacattatgacaaatcttaatggtataccttacatttaagttacctactctaaaatacatttggtaatagatattagagagtgtggcaaaattatactctcagaagaattggaaaaaaaaaaaaaagataacatatgctgaaaggaaagacacgaagagaaagagaaaccagagaaaagaaccaagcaagaatgggagcaaggagacatgggcagctagaagaaaacagggtacaggaccaaatttggaaagggctgagaaatggaggacacaaaacagtaaaatcaataggaaaaaggaagatacatatactacgaagggaaaaatctaggaaaggggaaaaaaaggctatttcatttatatacatgaattcagccaataaaggtaaacacacgtagaacttacctggttttcctcctgtacaactctgtactgttccttccaaatggtgattttggaagcttcatcttttctcagggctcgttccttcttcagctctgggctccagaaggtcttgatgctattcattgaagaactcaatttgctctcctttacttccacatccttccgcaagagatcattttctcttaatacttccttcagctgtgtctgcagatccatgattgtgttatctctcgcctgacgaagggagtgaggtacagtggatgccatactcacaggagggaggtgatgctctccaaatgctatggtgtcactagcaaccccactgctagctatattggggctactacccatagcagtcatccgaacaccgtaaggcagacgtcccccagaacggccaagtgtcatggtgcttttaggtgtttctgaacccacattttcatggtcacttagatacatagggccagaggtggcataggcagcatttaaagattgtatattttccattgaaagggttttcccactgccacctccaacactgcttcccgaactccctcccgtactgttggttcgacggtgacccaagcgaggggaacgtggaagcctgggtgaacgcccagggctctggctgctcggctccaccttcccaacagagcgggcacttccatacatggttgcaaggtcaggaaaggtgtgagcagaaaatcaacaacaacaacaacaaaaatgggaaccttgtgaggtgtctctatggctacaagttggtttaaggttaatcagaagaaggtccccagctgtccaatcttgaagaagtatcttacaccatatctgtaatgaaaagatcacacattaaatcctccaataataaatatttcccttctcagagactttccattacccccacttaaagaagatctagcccttctaccatgtatgtactcacgcattcagaatgtgattacagcataatgtactcatagtaaacaatattttagagatattttagatgtctcaaaactgaacgctgaaaacataccatgcaactggaaaacaaacaaaaaaagtgccaagtgcaatggctcatgcctataatcccagcgctctgggaggccaaggtaggaagatcgcttgaggccaggagttcaagaccaacctgggatacatagcaagaccctgtctacaaaaaagaaaaagaaaaaaaaacaagaagtataaagattgacaaggaaaagattaaactcaatgtctgaatatctgacttgctaactgaaaacccaagataatcaactgacaagttattagaataacagaactcaacaaactggtcaaactcaatatcaatatataagtatcaatgtatacatcagtagtaacaactagaaaatgcagtttttaatttaaaggaaattttaaatcccattcacaacagcaacaaaaccataaaagtactttgatgtaaatcaacagaaatgtgcaagaattttgggggaaaaaaactataacattttactgaaagacatgaaagaacacctaaacaaagttatctgtgttcatggatgagaagacaaacactgctaagatttagttcttccccaactacttagcacaatcccagtgaaaaatctctacaggattttgctaaccagctatagatcccttcctttcacaggtgttgaaggatttttcaagtaactcaacaagctgactctaaaattcaaatggagagtaaagatacaagagtaaccaaacaatttaaaatagatgaacaaggaaggaagacagccctcaacagcaacataaattacaaatccataattcttcatttgtactgcaaaaatccaaaaacctctgaaaataagattttccttttaactcatctagcagcaaaccttgacctgatctgagcttacttactgtttatatgtatcccacatagtgtgacttcatatatttcattaagaaaacaatgtgtgtgattactggatactacataatgtccactaagtattactggaaaaaattcctgacaacaaaaccacatctgacctgcaaggtttcttacaaagtattgtagccttgtaaaactataataacgaaaactgtatagtactagcccaagaacagggtctaaattatatatgggaatttaatatatgttaaaagtaacgtttccaaacagtgagtgatatggtttggctgtgtccccactcaaatctcaccttgaattgcaatcatcttcatgtatcaagggtggggccaggtgtacttaactgaatcatgggcgcagtttcccctctactgttctggtggtagtgagtgcgtctcatgggatctgatagttttataaattggagttcccctgcacaagttctcttgcctgtcgccatgtaagacataattttgctcctcattcgccttctgccatgattgtgaggtctccccagccatgtggaactgagagtccattaaacctctttcctggcagggtgcagtggcttacatctgtaattccagcaatttgggagaccaaggcgggtggatcacctgacatcaagagttcgagaccagcctgaccaacacggcaaaacccaatctcactaaaagtacaaaaattaaccaagcatggtggcaggtgcctgtaatcccagccactcaggaggctgaggcataagaagcttgaacccaggcggcagacattgcagtgagccgagatcgcgccactgcactccagcctgggtgacaagagcgagactccgtctcaaaaaaaaaaaaaaaaaaaaactttcctttttaaattacctagtctcgggtatgtctgtattagcaac

SEQ ID NO: 916181 - DNA, 4001 bp, Homo sapiens
caaagtcaaaactgttcactttaccaaatgaattaactgaatacagttaattaaatcttttatttataattaaaaattggaacacacactttctcacttaatacctattatgtcctgtttcccatacctctctataaagtagaagtatttgctggaagacaataatctgctcattaagtaggcacttagaaaaagcaacgatctgcaactactgaaattcttatctgtatatttctcttttgggttacaagaaagcacttctctggctattttcccaaataaactaggcaagccttgggaaagtcactgcttaaatcccactttctgacagcttctcttcctccataaatgaattattgagagccatgtctacttccatccattacataatacatgtccatcatgggacctgttttctgaacaagaaatagcttaaatgacactaactgataagtagggccagagaatactgtaatctaacagggagcaagaatccagaaaagaagattctgatttacagtgctaagttgtgaaagagtgatgtgaagaacattgaacactgcttactctaatatttccatacaaagtgacacacctgcccccaaaatgtttttaaagcacttgactccaagaacatttctcagaaattgaggagcctaccaaaaaaaaagagttccatttcattttaaagtgttttaataaagactgcaagaaacataactgcaaatgagaaataaaatttcaacaatttagcactgaacacaaaatgtctaaaagtcaaggtgtactgagcaagcaacacgctataaaagacggttgtactttaaaacatttaagcatttttcatataattagctccaacagaactattccaattgttcactttatccacccaaagcagtcaaccacaaccacctgcaactattattcagcaatgtgccttccaaagcaaccacctgagtttggggccttctctcaaggggccaggataaagcctgtaaaagggtggtataaagagatcttttaggcattggggggaaaaaaaactggaagacaccaccttgaaggagctaagcgtaatgcgacccaaatggtggctgccggaacgaagttgtctaaaccgaagatctccctcttcttcggtgtaaaactttcagatacatccacgctcacaatttacctgagccaaagtaaggggattctcttccctctccgaccccccacccaccccgccagaagaaaaagaatcgaaccctaaagtagaaacgtgagatctagtgcaataaaataggttctgcaactgcctcaaaggcaacatgcacagctcatcgtccttttgaaatacacttcatcttttatctcaccatttcatcgaaaagaaaagaatcatcttcagcattttacatcactcacctaacccaaagatccaccctgaccgcaccccaacctcatggctccccaatttctccgtctccccactacctcgtccgcggcttcactagtcctaagcctccccccctccgctccccaagtgcccagagccccagtccccactcccccacctcccgccccaggatccccacatctaccgcctcggctcccgcccgatcccggagcccggctgggtggagcccgcgggtgggcgccggtggtctgggtggggcccgcccctccccaccccccgggctgccgaggagggggagggggtcgcgaagcctcacctacagctccgcccctccccgggggcgcgttgccctgcccagcccagcccgggccgtgagcaagaagctgggtaggaaaggcgaaagcctcagcactagcgacaggggggaagctctgggtcccgcgcgacttccgcgctgtcgccgccgccgcggccgtctcaccgtcctcagggctgccgctactgctgctgctgccgcccaggcaccgccgccgccgccactaccgccgccgccgccgccacagcacggcccaggcgcccgcgacgtcaccgcgccccgccccctgcgcgagacacctagccccgcccccagccccgccgcggggcgcagcgcgcctccccgggctcccggctcggctgcctccctttccctcagcctcccgggagcgtgacgcggcggcccgggggcctccgggcgccttccggggcacgcgggtgaggaactgggaagcgggggaaatcggcgccacggcggtcgattagcaccgaaacagagtgatgggcgcggagcgtccctgcacacacacacacactcacacacacacacacacgacccctgcggccacgggaggggagagccggggtcggctccgcgagcgcagggtggcgcttgtctcctcctgcttgccgtaggaagtggacgctggaagcccgaggagccgcttcgtgtcttcccaaacctaagcggcgccccaccccctacttctcgtggcccgttacgcccggggcagccaagcgccgcgggagcagcgccgggatcgaccctggctgctggggggacgctttgtcccaagaaagctggttttttgccccttagcttcgtggaacgcggccgcgaaattagtggtcttctgacctgagactcgcggggctgcgcacacgggcatcgccgaggaccccagcaatggacgtcgtgtctgtggtgatcccgccaggacgcggggagcgtgggcggaaattagtgtccacgttccgaccctgcgctgtgccaaacgctgcttcgggagctgtttatttagcctccgacagctaagcgaatcggcgggcggctggggcctggtgcaacccgattttctcgtgcagactcgcagccggctttggttttgttttttgttttttgttttttttttggagccatgcagagggtagctacagccattaatttaaggatgtagataagctatctctaaaccaagaaagtaagaatggtgtgaattatatttattcccagccttccagtgtttattaaaataattttcggtgtccttgagaggagttaaaagccatcattttactcctgcttacctccgccaccgtaattaaccactttatactgcctcataatcccattaacaaattgcagtcgctcctcagccttcacattcattcactcaccagtttctactgtttcatcctgcccggactcttaactgttccctcccaggatcgacatgcacttggatcattgcagtttctgggcctgctgtcatctcccccttcagtacttcccacatatgactaccaactgttagacgatgtgctgctgccagaccagcctttcatttcttggacatccggctatttacccaggaaaagtcatcctttgactatttttcatgacctttctcatctgactcgtgatctgcccatcttgttactccctagcagtgtggtaaggtaagagaaaattcaactaggagtcaatagatatttctgttctcattctcccactgtctacttgtgtggcctcaggcaattcattctacttgtggtcttacttaactgtaaagtgaggtttgaagtaggtgtctgagatacatcatgtccttaaaatatgtggatctggagaattaagttgctaagcgctatgttatacacggaaatactgtcctaacacagattcagatttttgttttttattttttgccaccacactggcaaaaaatattatttcctgccctgctccagttatcttttttaaaacctacgtttaggatttttgattaaagctagctaaccgagcacatgtatttactgtctcttcttcctgagaccccataaaatgatgataaataaaagtgatacaaaatagaaaatgagaagggggacatcggaagataatttttttttatttgacatgcaaaaagtaagtgtggtctgacaaaataaaatggagaaaagcataatgtagaatgggtgtagagggtgctgtagaaaggaaggggacctgtcagcccagaagtgctttagggagacggagatttggagataactacca

SEQ ID NO: 916182 - DNA, 4001 bp, Homo sapiens
agttaaaaagtattaaggaaaaggtcagggacacatgaaatatatttacaatagaatgaatgttctcaaaagcaaagagtatgggggttaataaggcactcagagggtagatctgagccacactacaacgtgactatatagagcaatagaaaggaagaacttatgctttagtcattaaaagaggataataatttaagaaaacaagcaactggataatgggagtttaaggacacattaaccacaccaatcagagtgtttaatcaatctggagttcagaaagatattattttaaacaatatcttcttcagtctacattttgactaagtaacaaggcaacatttgtaactacagatgttagaaaatgaaaataaaaaataacaagagctaacatgcattgagtgtttactgtgtgccaggtattgttctaaatgctttgtatgtttcaacacattcaatcctcacaaccttcctatgagttaagtatcattatttcatttggccgatgaaggaactaaggcacagagaggttaaataatttgaccactatgacattaagaggcagaattacaataaatattgggaaactattaaataggatttttagcaggcactgactgcctaaaagtaacttctggtaaagaaaaaaaaaatagccatttctttcacttaaatcatcaatccccaaagaaagaaaatgtgtgggtggttgttgttgtttccctaactctcgttgttccagactaggcctgatttcctttgagagatctttcaaacttgatatatttttatgatttgtaccaggaagccattataacacgcaactgtatactaaagttcaccatcatttaaaaaaaaaaaaaaaatcctcctctctctatccatccctgcaccgccaacccccaccctcccaaaaaatcagaatttttttcctcatgttttccactagaactggcataattacaacaacttaaagatatcaacaaacaaattaggtaaataaccatgtcttttttcagtgaacaagccaggctcattctttataattgctgtatactggagtccaatgtatcaggctaggcaattaactgaaatactgaattacaacttcaaatgaataaatcctgtttttaactgtaactttcattgcttctgaaaaccagtctggcaacattttaacagctattatgccactttgtctttaagtctcgggggcactaaaatataaaagttatttaaacgtgttttctcaaacaatgacctgtcaactctatatactacagataaacaaggctattctccaccacgagttgacacgttgccttcggaaggtttcctgcgccgaggaaaagtagtgacagtcgaacctgtctctcagcatctcgccctcccccgcccccttctcattttccgaagcactgtgcgaaactccttccgggcaaggccaagactcttaaagagacagagggcaacgtgctgccacgaatgtggcatttgtctgaatgggggtagggagtctgacatccgggaggactgggactcgaccgattgggatcctactcgcctgcggactggagaaaccacctgggaaccgggcactgtgacaagcaaagggtcagaatcaggtgcgatcgaggaagcacctgaactccttcgagttgcaggatagcacacaagcacccggacctggcaaagggaagctcccagtagcatcgttgcctagggtcctgccagtaacgcccccgtgggaggtggagcggcttctccgtccgaccggctctctagagatcaatgaagacaggaagccaagcccatgacaggctcccagttccctcaattgcatttacgccctaaacagccctggaacaaccgagggaacagcacccagcggtgtttcagtattttaccttgtgttatggtcccagcctaccgccatgtttcacagaagcccgggtcgccggggctcccgcgtacccggaaatatcgcgagaacaaaagcgactatcacagctgaaaacgtcagaaaagagacaatgtacagatctcgcgatattccctttgcttacgacgtgcttagggaatgaagaggcgtggttaagataaaagaggcgtgcctacagggaaatgaggttgcaacttgttttaggtgtaatcgcgccgccagtccggttctgtttctatgggaagggaggggttactttccgactaacactgagactgcagaacgaatctcagctcctcacaccgtatttcattactaataagagccttgggcgcagaaattatccctaacaaccctaatgcatatcacctgtgcaattgttttgtttccctctttcagtttttgtgtcgttttcccctgacaagaacatttgagcttccttttccgccataggtaacgctttttattatttgatcagcgtttttattgtcttccaggttttaatatcataagaaagcacatatgtcttcctcatctcccttcgccaacaccaactatgccttcaaatatttgttaagaaagaaaattaatacctcatctttttctaccacttcatagaacaggagttaatagacggaacttcggaaagaaaagttaaatgtgaactcctggagagtaaacccattccaggttccttttcacccatctgttaccagattttataatcaaacattgagatttaaattttctgattcattgacctagaagtctaacaacggcataattatgacaactgcttataattactgtttaaaggctttaactgcttttttaaaaaatctgcgtatcctcacaacactcttagaagataataccagtatttacctgttttataaatacggaatttgagtcaaggggtagtgaagtgatttacccaaattcagaccgctgggagagtcagggaaatcttgatcacaatactaaactgtgcctcaaaggaaaaaaatcacattgttttatgtagtgaattaacctttactgaaatactaaatttcactaaattgaatatcccccaaaataaggactgatgaaaagtttccaatgaatcaattttattttcagactttcagagttagtctaattaaatcaatttaaagttctcactttcttgacatgcttaagaagtatagtgtagtgggtgaaatcatagacactggagacaggacttcctgggttagaattccagatcagcaacttactagcatgtaaccttgaccacattatttcatctctttgtgtctccatttgctcatctgtaaaatgggcatgataatatctcagagttgttacgaggattaagtaaattaatatacatctaaaatgcctttttttaatctttgccgtaaaggcatcagcaactcttccttctttgtgaatatgggctcttgcttggatggaggctggctgttgttcacttagttacatctgatccctcatctcctggataacctactttcagggtaacaactatcccatgagagttggatttcccagtgtagcaaaactgactaatttgatccttcttatttagaaaacaactcaccattttctaatctacccagtgaagagggaacttaatttcccctgaagattgaaactctcgggctgcagctaaagccgcattcttttcattaaaggccagggtttgatctaacagtagcacgacatctctgcaagcgaggtcaaaggtttgccctagaccctgtaggacatctatgtacctatcaggatcatctttaaaaagagatagatacttaatcttgtgttatcagtggcgttatgtctgaaaaacaatttgctttaaaaagtccattatgtattacccgcataagataggttttagactgagattaataattgttccataacaacctgtatttagtaaagatgatcaaaaggtgtttttgtgccatttttttctttctctagttcgattgaataattcatgggcttttttctaattctccttagtccttctagaacacaggtcaacagatgttta

SEQ ID NO: 916183 - DNA, 4001 bp, Homo sapiens
agtcagctgtgaaccttatggttgtccctttgagagtattttgatgatagtctctcttttctctgacttcttttaacattttatcttttgttaagttttagatgtactatggcatggctaagagtggattatgcatattccacatgtatatatatttgcatatgtgtaggcgtatgtgtgtatatttgtgtgtgtgtgcgtgtgtgcatgtgtgtgtgtgtgtatatatatatatatatctaaaatcactctaattcaatttcaggggctgaaatgatttgcatctgtgctgcagcccttgagagggcttatctactatgattcattcctgtttttaggtacagctctgtaggattcaaaggggatgtgaaaggtgttgtactagattcacctcctatttccccttgtgaggcctggactccaacatttaattttcaactcctgaggatctcaaaatgcaaatttatttcttagcttcttggctgcttctagaactgaccaaagccgtctagacaaaaagcagtcctcaatgcagggttcatcttttttggttttcatcttcttccagatcttgacctagatattttccctcttttactggctctctaatgccttcaggcacacacacacacacacacacacacacacacacttacacacacattcatgcacacacattttaacttttaaaaatagtctttggtggaaaggattgtctagctacatgatccattatcccagatttgtatttcagaacaagctttccaccacactcagatatattgaaagataggacttcattcttccaatcattgttctcagttttctatttcctcaccccaatctactcatacccataaagacacaaagatagtgcctccaccatccatagatagatccacgcctatagataaaattattagtatcagctcctgaacaattttgtccatttcctacaatagtttgcatcacttttgagatccttaggccatctgctcttggacatctccttaaccctttcccctccatgtgctatctgtataggtcctgcccaatcagatcttgccttggatcagaaccacccttttttccccaaggtactttctcctagtctacccagtaagatcagaagcaaatctcatgttagttaaggtaggagggaattcaggcaaagggaaattaaagtcactaaacagcaagaatctaagattgctctttattgtcatcccggtgatgattcctatttcacctcttttcttcaagagggtctcccattggggtaactaaaagcaataagaactctggagatgcacaatgcaccccttatggttaattttaattctggatagatctagtcattctcttccaatccatttgtttcataattatttgccgagtgcctgctatatgcactgaggcataaaattgcagccattcattcagatgacaatttaagcactctttattttgggactgctttatacaatttaaatttatgaaataaataaatgttgaggtacagaaaagtttgtatttctaaaaaagaattttgaaacaaatcaaaaccacagggtaaaaatgaactccttgtgtatatttaattgtttaaaaattcacaaagttttgagtagaaagcttgggaaaaaacaaaacaaaacatgaaagcaagagaaaaggtcttaggtagatccttgcccaccctcctaccacctccttccccttcccttgcccatatcaagacgaatgagtaaagaaataaaatgagcacacaaaaaaataatatttgcagctcctctagatacttaatgctgctaccgacctgtatttccagctggcaagtctccttcatacttaaggctttgctattgcaaccaccaaaatcatcatcattatcatcataatcaggactcgtttaacatttgatgtgtctaaatgcttcctgactatttttctaggaattcctaggtctggtgcctgcacctcagctcacatcgctgtgcatggatcaagaatccccccctccctgtactcttttccgggcagtccttcatacttcccagaacagggagaacaagaaaagccagttactctgggtgtttctggacttaaagaatgcactaaattggaggcagaggatgttaagtggtgataacattctctaagaagcaaaagagctttaataaaagccactctcctgcagtctctccagtttgttgtacttcttttaagaaaacatgcccgatctttcattatttcttaaactaataaactctggaacattcatgtttagggtttctggaagcaacatttgaacaggaaatctccctctgtaaagggaattatttgcataatgcactggaaagaaaatccaacccaggaaccaagagttggaaaaaccttttaaaatgtcttttttcagttttatggaaagaattttacttaaaatatcatatttttatttcagagaaaagaggcagcagaagaaaaacagaaatagtaaactggaaatattgctaccttaaaacataattttgagtttcctcaagagtatctgaagtagattttttttgttgttgtagacactacatcataccaatcactcattttctgttcattagtatttcagctatattcatttgaattcccatggaattttctaacaacccagatttttataaaatgtattaaaattgtcttagtttatgccacagttatagtattaaatgtctttggtggcactgagaaatcatttgttaaacaaaggtcctcacgtcctcggtttgtttttttaaagctgttcagcttatcatatatttaataaatatatactttaaaaaaaagtttcatcatggacacaggtaggggaacatcacacaccagggcctgtagggggatagggggctgggggagggagagcatcaggacaaatagctaatgcatgcggggcttaaaacctaggtgacgggtagataggtgcagcaaaccaccatggcacacgtacacgatataacaaaccttcatgttatgcacatgtatcctggaacttaaagtaaaatgaaataaaataaaatagaataaaataaaaaatgttttataatctgacatatcttcttgcatttcttatcagtttattctcatgcacgagtttcttctgattctctttgtctggtgaggtaaatttcttataatagttacccaataaataactgtaaaaggaataaaggatgactgcactgtgttttcattactatcccattaggtcaaagttaggttaattatgtttctttaaatagtagtgactgaaaaaatccaaagcagggtaaacattcaaataatatttcaaattccattttaggacaggctcatagtttatttaacctgggagttacatctctgctagggcaacaataagagtcctgttgaaaaatttgagagtttatatgctgttacactcacaaaagacaggctgtgccctcacacagcaagactgttatatgcaacttatggtttcatgaattttacctaaattcttcctgattacatttatatagttggcctgcactatttttggagaatattatgttgcataaatacagcactggctggccttttattgctccaacatttcaagcatgagtaatatccatttattgttattttttcagttaatcattatttcagcttatttctaaatatgttcttaaaatggaaaattttgtaaatttagacaatatataatgtctagattaaatcttgataaataattctgcagtttgattaaggaatgctaggaggctagaggaataaattaagagaaaatagttgaaagaaaaaaagtaggctttagaatgagggacattagatagaattcagtgtaaaaacaaagtttatcttcagggtcaagtgcttaagaaagccactataatatagtaaaaagggtatgatttgtagacagcaatgctgggtacgaatcagacatctgttacttcacagttgtgaga

SEQ ID NO: 916184 - DNA, 4001 bp, Homo sapiens
atatggtttggctgtgtccttacctaaaatctcatctttaaatgtaatccccataatccccacatgtcaagggtgggaccaggtggcagtaatgggatcatgggggcagtttcccccatgctgttctcgtgatagtgcatgagtcacaagatctgatggttttttaagcgtctggcattcccctgcttgtgctcattctctctcctgccatcctgtgaagaggttccttctgccatgattgtaaatttcctcaggccttccaagctatgctgaactgtgattcaattaaaactctttcctttataaattatccagttttgggtatgtctttattggcagcatgagaagaaactaacatacccgtcttgcatctggggtcaagcagagggagctggtatctactcttctagaggccatgaacaataattaattgaggcctcctctcttattctgctccttcagatggaattgctggaggataaaatgatggcatctggcggctgtttaagttattgcacactcctccaattccatgctcttgccccttccccatctttctgacggtgtttttgtctacagctcagatttctcattcctgaaaaatgttgtccctgtctttctccctgacttgcatctcattgcagtgatttccaactgtgtacgcagaactgacagggtaatcaggagttgtaactgagaaatggaaacagacaagaaggtctgctatgagagagtaggggcttgatcagctgtgaggatttccagatgctaccaccagagaaagatgaaaatgctggaatgaggcagtctcatttatggctgcctttcttagtcaagaagctaatctggaagatggaggttaacaccttgaatatacaaaatgccatcattttccaacatttcagacaaggcaaagagaaagaaggagagtctaccatatttgggggaaaggctttaaaaggctgtgcactgactaatgtccaggatgtttggcatcctgtaaacagtgttgctggatgatataaattgggttcactctggcccctgcctattcatagggtgctatgagagtatagaccaaatgtgtttaggacaatggtggggttccatgaaggcattctttctgcagatactgacttgagcttcaaagcatccatagatgaggagatgcagcccacaggctcagaactcttgaagtaagtatgagaaagatataatttagagactgggaatgtcttgaaaataagaggtcccaatggacaagatgaaatcaaactgggtggctgtctccctttacccccacttctaatgcagtgccatctgccagcagcaggtggctgctgtggttcccttaaggtagaacatttctggctcttgggggaattgcaagtagggaactaacctggaagaagcctatgacagccacctcagtggcagcaatgaattccatggcagctgggacatctgtgagccacgtgggttcctgggcagcaccaggaccatctagagagagaagcagaagatgtcagggtactgaggcaagaagaagcagctctaaataatgagggcatctataccttttatctctatactaagggcaagaagagcacaatttataggagtactgttggcattccaaggcataatatttttactaacatatggaaggtgaccctactgatggtctgtctctgaaggatactgccagacttccctactctctaccaggcaaaatgcacttatccaggatttcctggaaagctttctaggtgtggaggaaaagtacccagagaaccaccatgctccctttccttctcctaataacactttcacactatagccacccaactacatttttcttttacctgaggatttctcaacttctgcagcaacttctgcagccagctcacacgtgaggagaaataagaggaacatgaacctggacggggcagcttccattgtccctctcctgctcctgctccaaccctggactttgtgttggggaggccgactcagggcagcctactctgtagctgattggctgtggggttgttagggctttgggaactttgcagctggctccaggggagccttcaacttctgagataaaagaccaaggttagtaatagggactcagaacatatccaaccagaagaaagtcaggtcagtttatttaaataaaaaatgtaaatatgctatgccaggcattgatcctagcgctaagaatagaaagataattatgatctgatccagcctctgccagcttagattatcagtgggagagatgggcaagtaaaaagattatttaaatataagatggaaagtgatatagaaaaattcatagggtgctatgacaatacatattaagggtattagggacaatgctagggttcaatgaaagtgttcttcctgcggaggatgccggagcagagttctgggtaagtaagattttgccaggcaacacaaggtagaaagggagtttcatgtaaagaactaaagcacaggccgggcgtggtggctcatacctgtaatcccagaactttgggaggctgaggcaggtggatcacgaggtcaggagattgagaccatcctggctaacatggtgaaaccccatctctactaaaaatacaaaaaattagccaggtgtggtggcgggcgcctgtagtcccagctactcgggaggctgaggcaggaggatggcctgaacccgggaggcagagcttgcagtgagccgaaatagcaccactgcactccagcctgggcgacagagcgagactccgtctcaaaaaaaaaaaaaaaaaaaaaaaagaaccaaagcacagatatgcaaatataatgtgtgacagaattactagtaattgagaatgatgaaaaggaaggaagtgatacatgtggacagaaaggcatgttgggaccagctcacagcaggctttatatgatacactaagcgcgggagcatcaattttattctgtaggtgatgggaaccactgaaaagtcttaagcagaagaatgagatgaagtttgattttgctcacaagtgtctgaggaagtccaagatgagatttccacaggcattgggatatgtagttttaagcttaggagaattttcatgtgaaaatattacaaaagaaattaggaagccctagccagggcaattaggcaagaggaagacataaaaggcatctaaacaggaaaagaaaaagtcaaactatttctccttgttgacaatatgattgtatgcctagaaagctctgaagactctgccaaaaggctactggaactgatgaatgatttcagtaaggtatcaggaaaaaaataagtgtacaaaaattagtggcatttctatacagcaataatgtccaggctgagagtaaaatcaagaacacaatttcatttacaatagctacaaataaaatgaaatgcctaggaatacagataaccaaggaggtaaaatatctctacaaggagaaatacaaaacacttttgaaagaaatcagaggtgacacaaatgaaaaaacactccatgctcatgggtaggaagaatcagtatcttcaaaatggccatactgcccaaagaaattaacagattcagtgctattcctatctaactaccaacgtcattcttcacagaattagaaaagaaactattctaaaatttatatggaaccaaaaaagagtctgactagctaaagcaatcctaatcaaaaagaacaaaaacagaggcgtcacattacccaacttcaaactatactacaaggctacagtaaccaaaatagcatggtactggtacaaaagcaaacacatagaccaatggaacagaatagagaacccagaaataaagtcatatacctacaaccatctgatcttcgacaaagttaacaaaaccaatcaatggggaaaggattccctactcaataaatggtgctgtgatagctggctagccatatgcagaagaatgaaactgcaccctcatctttcaccatataaaaagttaactcaa

SEQ ID NO: 916185 - DNA, 4001 bp, Homo sapiens
gcccagctaatttttgtatttttagtagagacagggtttcaccatgttggccaggctggtctccaactcctgacctcaggtgatctacctgcctcagcctcccaaagtgccgggattacaagcatgagccaccgcacccagcccacacttttttttttttttttgagacggagtatttgctctgtcgcccaggctggagtgcagtggcgtgatcttggctcaccgcaacctccgcctcctgggttcaagcaattctcctgtctaagcctcccgaggagctgggactacaggtgtccaccaccacgcccagctaatttttgtatttttagtagggacggggtttcaccttgttggtcaggctggtctcaaactcctgacctcaggtgatctacccgcctcagcctcccaaagtgctgggattacaggcgtgagccactaagcccggcctacacttttaaattcttgaaactttgccttgaatgagctgcaagtgccaaatccacgacagggaacgcttgaaaataggagacttcaaccactggagacaactacttcttggtttcacttccccacaatgagtacaaaacctgaaaatgaaatgactggctctctcgcaacactaagcttgcccatctcctagaggaagttaaaagctgctcgtgggtgaagacaggtgcaagaggaggggactgggactgcggtgttgcattcagccaccatttccaaccgtccatttactcaggccaggatccctaattctgcaaaaatggaaggggggaaaggcggaggtagtggcaaattcttccatgccttgacccaattttactgattttgttgccaaccccaagatgtttcctacaacagctatccccaacctttttggcaccaagaactggtttcatggaagacaacttttccacggggttgggtggtttcgacatgaacctgtttcgcctcagatcatcaggcattagattctgataagaagcacacaacctggatccctcacatgcgtagttcacaataaaggtcgtgctcctatgagaatgtaatgccgcagctgatgtaacaggaggcggagctcaggctgtagtgctagctcgcctgccgctcacctcctgctgtgcggcccggtttctaacaggccaccgacgggcctggtggttggggacccctgctttacagggtggctgaactgaagcttattcttcacgcttgcactattcaagatgtatgatatctgatcattgtttgcacactgcaaagcaggctgcaatccaaccctgggaagaggggcgcggacacgcaggctaacgcgcctgcatttccccccgccaacccctcccagcttccacagccgggagcccggtggcgtcgacctcgcaccgccctccggttctcccacttgggactcgagggttggatctcgccaggcaccgccctctccccacaggtgaagggaaggggcacccagttccctcggctgcatctttgcaagggtggatgcaagtataaatgctgcaaaagcaagggtgcgccggggccctgaagcgtgcatgcccggtggtcataacattctccgctcagagtccactaggcctgtaggacgccgggaagctctgggaccgttgctacagaccacctcccgtcagctcccggaatccagcgtctccccacgggcgcgcgctcttccgggcgccccggcggcacctgcgcgcgacgtcccccgccccggttaccttgtagaaagtgaccgtatccaggggaagggcgcccttggtgtgcaggccgctgccgccatgcggagcggagaggagcaggaagcccaggagaaggggaagcagcggggagagaaatgcggcgcggggcacagcggcagccatatcgccgggttcctgcagagggaggtaggtaagcgatagtggagaacgccccgagtcagcggtcacgtgactgggggggcggactcacgcgcgctcacgtggacaccccaggaggctcccatctgtctagggtgagagggtggggccacgtgaggggcggggcgagggaggggaagctgctgcgcacgcgtactcggcgaagctcgcgtagggcctgggtaaaagggcggggccacgttgcgggcgggaaaatgggctcctgcgcgcgcgcactcgccgagtcttccggcgggtccgcccagttccgttcctgctccgcttgaggagaagcgccaagtgcgcatggggacgctatagcaattcgtttgctgtccttcctctccttcgaagatgacaaggcctaccatcgtttcttcctgcctttgggccgtcaggcagttggttgggacccgctccaaccctcggtcagtctattagtcaagttcagccgttattctcagtcaggctccgtcaccaccctgacccaggcgggcagtggctccgcggcttccctgagctttttggccaggcttggcggtcagtgtggcaagcagggccctcttaggcccgatctgaggtgagcgcctcccctgggagacgccaggctcctgggatccgcccagccaaggcccaccctccaggaaccccagacgcaattctaatcattctgttccgcaggtagtcactcggtccctggcttgtgccagactctggctttgcctgcggggctacggaataagcagaaacaagaccgttgtgtgctgaaggcacgcactttgttgggggaggaggcggcataggaataatgatctaaacagtgcagtgtaattgctgtaaaatattattccggctgggcgcgttgactcacgtctgtaatcccagcactttgggaggccgaggcaggtggattacctgaggtcaggagttcgagaccagcctggccaacatggtgaaaccccgtttctactaaaaatcaggcgagtgtggtggtgcgtgcctgtaatcccagctactcaagaggctgaggcaggagaattgcatgaacccaggaggcggaagttggggtgagccgagatttcgccattgcacttcagcctaggtgacagagcgagactcagtctcaaaaagaaaaaaaaagaccgtattttcttattgtaaagagacagagattcagccatccctgctcaggagcatcagaggaagttgtagacaggaggtgacttttgagctggaccttgaaataagagggggcgtgcatgaggcaaagagaaacagggcatttctaacaatgggaaaattatgcacaggcatgttggggaactggttgagatgaatctatgtaaaggcgaactggcgcaacagctgctgccgctcttttttattttgattgattattactgagcttccatggggcggattcgaaagggtctcaccaagctaaagggtttggagtcaccagaagttttaactaggagagtgaggttagatttgtgtgtagaaacagcacccaggtcagcctgggcaacgtaatgaaacctcgtctctacaataagtagaaaaattagccatgtgtggtagtgcatgcctgtggtcccaggtacttgggaggctgaggcagcaggatcacttggacctgaggggtcgaggctgcagtcagccctgattgctgccactgcactccagtctgggcaacagagaagactgtctcaaaacaaaaacaacattactcaggaatgaaggaaatggattggaattgagaagacgggactaaagccaattaatggggtatggcaatagtctagttggaagaggttaaggtcatgcagtaggacataatagggctgaagaagtatggatggaattgacaaacttttaaagggtagaattcacaagatttgatgaacaaatgcatgtaagagaacatatacaatgcattgtaagggacttactgctataattaaccattgtatgtttccaaaatgtatgtgtataaatagtcaacagtgataacaggatccaatcatggacaaccagtttgattggatataaattttgaaagaaagtgtgtgtgtgtttgtg

SEQ ID NO: 916186 - DNA, 4001 bp, Homo sapiens
gagagctgacagagcccagggagcacgaggaaggacatccagaagggccactgccctctcaggatagactaggctgtttgctggctcgctaggcactgtccagagagcagcttaacaaggagggagccaggacctccagatcttgccaaataccctaggctggtagtgagtccacagaccacgtccccaccctacctccaggtccttaactcacaccatcatcccgcagctgctgcagaagagagcagtaccctccaagaaaagcaaagaggctcagaatggcatcaagtctatagcgcctcttggtgcctcgttccaggcctgaaaggaagaactggcagctctcatacaatgcccgaagtgggggtgatggtgcctccatactcttgctcaggacagctgatgccttgatcagaagcttggccactgcctgaggtccttcctccccaacctgcagcagcttaacccccagctgacatagctgaaggctaggggctagattggtgttccttaggtaactgtgagccttctccactgcgctgatggctttgtcatggtggcggctccagcaaaagcgacggcagtgttccaaggtgagctccaagaggcagagggccctctggggagaaagaagcccagaagagctccctctctcacccaccaaggctctgatcacgtgcctggagagcaggtcatctaggaaatcagcatctgcttcatttagaccatggccactggcatcaaatagctgatgggcagctaccgctcgacaggctgttggagaagcaaagtgaggaacctcacaaggggtactttcatcctccaagagtactaggaagctcaaggccttcagccgagctgcaaatgcagctcgccgttccaacagggcttctgcccccttccaaagcagagaaaagctgccccgagccacggcctcatagtcctggggagcagcctcgcgagagcactgcaccaagcaggcatggaggggctgagcaaggcggagtgtggcctctgggcttccttgtgcagcagcattccgcagtaagacaaagagaattcgttccaggtagaggggaggacgctgtggggtagacactaagtagccatcacaggccagctctgccagctccagcaggctccccagatgcctagggcaagctagcttagcagtcagctgctggttgcaagccctcaggatggcatcacaagcttgtctcctctcagcatcagatcggctgctgggaaaaccagctggagggttggacaggaactcctaggagtagagaaagatatgaatggggctagcaaaggcaggaaagaggtagagaaagtaactagaaatagggttactcagagagggtcgcctacttatccatctcttcaaaaggcaaacacaaaacagctcagtttggaaagccaggtgtatcccgagccaggcagcacccccaccttcaaggcgggcagcaactcttcagcctccttctggctgcttagcagagtcccaaagttgactcttttgaagctcctcatgacaccggagagctagggaaaaggagaccaattagagaagattgttaatgaagctaactggaggaagggaagagggctgaaggtcgtggaaggaggcaaagaatcacatcagaaatttcatcggggagaaaacccacgccaggacgccgtgctcccgttataaaaggacgattccgctcttccttcctccgggcagatccccgaccgcactaccacaccactcgccgcgctaccccagaggcctcggcccagcccttcagcggcccggggcagtcccaaggcctcccgacactccctccaggagccacccacgcctctcctcgcgtcagcgctggggatccccttcacttcagcacgtacccacgctcacgagtcccttccggccttaccgccccagagctcgccctctttcctaggtacaggacttaaccgcctgaccagtactccgcgaggatccaaaatgtaaccttcgttttccgcgccagaccctcctttcaaatatccgcggctgccaatcagcgggcgcggcgcaacgccgggcgcgcggcacgctgggagttgtagtttacccgccgcgctgcgcgctcccgcggcgccccggagggtcttgctgctctgcgcgttagggcctcttgggggtgcgggtttcccccttttttccagtcagagctcagtttctcagctacctgtcgcttagtcgctatcggtaatgccaccccttttcctcctttatcttcagagctcaggcaagagtttaagtttcaagagaagagaaataacaaaaagaacttaggaactcacgcggtttgggttactagaaaaaaagggcttagacttctacgaattttttttttgatagggtcttgctctgacacacaggctggagtgcagtggcgtgatcacagctcactgcagcttcaaactcccgggcttaagtgatcctcccacctcagcctcccaaagtgctgactacgggcgtgcaccgccacgcccaacttcctacgaaattattttaaagatggttttctaggggaactacaatgagtacccgtagcgacctccagctctctctctgccttccagccttactccttctattggttgtatgagaaagacaagatctggtgctcttcgatgggggagagagggtagtggggtggggtgggagttgtgagtagcaggaagaactatggaaattcattccctgggatatttcacagtctttaatggcttatgtttttaagtactaaccacttccccaaacacagattcagctgtctctttccttcctccaccaaagaattcagctcaaaagtggttatcagcttgtcgctgatgaactctactggataactcatccttctccatcatcatagagctcttttatgagttgagaatctagcagggaagattatttttgtaaaaagaaagaaaagaaggccgggcgcggtggctcacgcctataatcccagcactttaggaggccgaggtgggtggatcacttgagaaccagcctgaccaacatggtgaaaccccatctctactaaaaatacaaaaattagctgctgtggcatcgggggcctgtagtcccagctacttgggaggatcgcttgaacccgggaagcggaggttgcagtgagctgagatcccgccactgtactgcagtctgggtgacagagcaagactctgtctcaaaaaagaaaaccaaaaaaaaggccgggcgcggtggctcacgcctgtaatcccagcactttgagagaccgaggcgggcggatcacgaggtcaggagatcgagacaatcctggccaacatggtgaaaccccgtctctactaaaaatacaaaaaattagccgggcgtggttgcaggctcctgtagtcccagctactcgggaggctgcgctaggagaacggcgtgaacccgggaagcggagcttgcagtgagccaagatcgcgccactgcactccagcctgggctacagagcgagacgactctgtctcaaaaaaaaaaaaaccaaaaaacaaacaaacaaacaaaaaaaacccaaaagaaaattattcatcacagtactcaattcctcttgcttacaccttagctatcagtgttcatttacctattgtttagcaagcattctaggactttttcccaacgtattttattatacctacttttttcttctttttttaagatagaaacgaggtctcactatgatgcccaggttggtcttgaactcctgagctcaagtgatcctccggccttagcctctcaatgtgctacaattacaggcgtgagccactatgcccagcctttttttttttttttttttgagacggagtttcgctcttgtcacccaggctagagtgcaatggcgtgatctcagctcactgcaacctctgcctccgggttcaagtgattctcctgcctcagcctcccaagtagctgggattacaggcacccatcaccatgccca

SEQ ID NO: 916187 - DNA, 4001 bp, Homo sapiens
gcggtggctcgcatctgtaatcccagcactttgggaggccgaggccggcggatcacgaggtcaggagttcgacaccagcctgaccagcatggtgaaaccctgtctctactaaaaatacaaaattagccgggcgtggtggcgcgtgactgtaatcccagctacccaggaggctgaggcaggagaatcgcttgaagaggcagaggttgcagtgtgccaagttcgggccactgcactccagcttggcaacagagcgagactccgtctcaaaaaagaaaaaaaaaaaagtccccttttccagccttctcaactcccctcagacggggcttctagagcaggaaggtgaagagggaagcaagtccttccttgagtcagggaggggccagaagacctaattaggcctggctttgtgggttttttggggtgtgtgtgtgtgttttcctctatctttctctgtgtgactccttttaagggaaaggacacctgcgctttgtattgggggtaggaagattggtttccatgatgatgaggaggagacaaacacttgctgcctaggctacaggtcccctagagccatttggccctctttctcctcccctttccagtccagggcctgggaagcttggctgtgtctgtctagtgtcaattttgattcctctctgctgccattctccccctagactggcacctctgctgggaggggccgggtaaccggcttcgcctctgcaagactagagagaaggcatccgcctcagcacaggagacgcggccgccgcagaaataagggtctctgccccaacggaacaagcgcagcccacagtccggaaaagggtgtggccggccgaggagtgcgggggagtgtgcgccgcgggcactgcagcagccgcaccacctcctcccgtagccctccctccgtccagcagccgcctctgccgcgctgcagtctggcggctggaggcttgaaggtggctgcccgagggtcgtccaggggccggggctgggtcctagcgggtacccggggataaaagcgagaaaagagagaaccgtatggctttaagtaggtaaaaagtctcgaggaggatgggaaagactagggaaacctttgagaggtaacgggaccaggatttccaggagcagcaaagccgcgagtggcaccaaaagcaagagggacgttcaagatggcttggctaggagggagagcttcggctgagacggggtccccagatgttattactgctgttgcccaagtagaggaagaagtcctgattctgtggaaggatccagtctgggcatgcgaaagggtgggtggggagagtgagcagtcggttccaagagtggcgcgtccagcaggcaggcggctagcggggagagaggggaaagtctggggcccactgtcccaaggcagggagctgactctaggcataaggaggaaaagccccagatggaaggggtggaagggggctatgctgcacagaggaccgagggtggtcgctcacccaggcaggtagctctcgatgactcatatagagagttttcgcagtgagctgctcctcgtcgtccagtagctgcctcgctgctcgaaggctccgttctttctcgtcgcggacccggcgccagcccaggtagagggcgaggccgaagagcacgaaacccacgctgagtcccactgccccggccaaatacacaggtatcagcaccagcaaccgcctcccgaatgaagtcagcaccgccagggcctcacccgccgcgccagggccagcaggttggcccccagaacctgggtctggctttgcgtgagcagcggggggctggtcagtggggtcggagggagcagagggctggtccatggggctggggctggggccctctcctggagatcgctccattgtgccacctctgggaggatccgcccgacccagggactggctggaggttgcctagtcttgcgatcagctcccccaggcaaaacgtgatccccgggatggaggaggggacttcaagccacgcccctcctttctggcgatttgggttggtccgcgctgcacagaccaaggtggagttaaaaggttgaaactccacccctcttccgcggggaacggaccgggtttcggataggtagggcctccctgattgggcccgaaggccaagatgggaggtctgagatggcgggaaaaggaagaaaggggctcaggggcggcattcgattggtaataaagaggaggaggcgtggcgcaccatttcaggagaggcgggaccaagagctcccccacgtgggattggagtgcctgtggtatgacgtcatgcagagctgcaccgccaatttcttggttttggagaaagcccaagttgcgaagttgaggggttgtggagcttcaggatttccctctactcattcggtttggcaggatttggtctgggatatatatatatgttcttttgccgactttctctagttttcatactctaagcacattccttatccttcaactttttcctgcctgcccttacaaaaggaaaggatacgatcgtatttggaatgaaagtgtttgaaaactaaccccgtctatcccgtccctaatcccctaccttctttgtgtggtgtaacgactgaccctggagaaaactggagagtcagagaattacagagttgagataatccagccttcagggaaagggggaaaaaaagcagagtgaatagaaagtgaggctttatttctttttggaaatttccaagagttagtaagtcatctctatcttagaggatggatgtaagactagttggctccaaaagggagggaggcagcgcaaattattacattttccaataattttctgaccctgaagaacttctaggacactaaaatgagggatcaagagtaagggaaagacaattccttttcacatttgcctgagttagaaggaaggtttgccatacagtcaggtgcagaactagtgcagtcccacagtgtacggtgtaggtttaggaaggaaaaagtgcagggtacaccgatgactattgttactagttaactggcgttagaggtggagtgttgtcctaggatctaggaactagactaattggaagttgatgagggaagtgttggtcataagatgattaccttttaatgcagtatatatggggcatattatgtaaatctgtcagatgcagcagaagaactggggttgatcactgggaagaaactagccatttcttagaggaagtgtcttacaggatgaggcctgcagctgataaattttatctggttctgcagggcatagatttcatcagcctgtgtttaccaaagctgcttaaaacctgtccctgctcagcctctatcacttaaattttttcacttccttttctctacttccctagggctagcagtatcttgactgcttcattcagtttgcagaactatttaagaaacaatattctgtctcctatatcctccatattcccagaggtaagcaggtagaaaagggaaacaaggaaattggaggaattatgagtgacctgctcaccaactgataaagcagaactacagaaggaacatggatgaaccttagagagaaacctctctataaactgaaatttgccaagcactggagtaggcaaggaggttcctgagaatgggggaatggagagggtgacctatggaggttcttttccaaacttctcccttcctcacctcatccagatcatcagaaattatataggggataaaacttcatcctcaggaagttcttgtcccagctggggcccaggagccacaggatcagcagctgcaatgcagttaccaacacaagtaaacagggtgggtccccgcccactgacaattctgctgcccaggtgccacctggtggtgataagcagtaagtggacaacaggaagggatgcccatttgttagaggaagtgtcttacaggatgaggcctacaggaggagagagagtaaacttcctggacttgcaatctgcatttatatgtaaaccataatcacctcca

SEQ ID NO: 916188 - DNA, 4001 bp, Homo sapiens
ctaaccccacagtagctattattactattctacagacaaatacatcaaaggaaattccagtcttcaaagctttaaactttaaagtcactgcttaaaagtaactgatctgccaacactagagtttaccaggaagtagcactttttaattaataatgttttatgtataagtgactgccagaaaacaaatcatcttaataaattttagagtcttatataataaaatacaaacaaattgataaactaaacaagtactgaatttcaatttggaagacacatttcctttaaaggaaatatattttttaaatgacataaaaatcactttggattcactatttcctatattctcggctaacaaatactcccttaaatttcaaaatttgttgtctaacaagtttcttctccaaaacatacgggtcctttaaaataatctgcttaaaaactcttctaggtaataagaactgaaactaacacatgaaaacccaagtgtcaggaactgttctgggccctaggcactgctcatgttttattcatctttgtgtgggtggctggctagtttagcgaagaatttagcaaataaatcaacaaatattggtgaataaattagtcatcaaaacgaggcagatgatttggctaattcaaatgaatgttcttacattattgctcagatttagaacaaatcccaaatatcccaatcttgaaaattactgtttttttttgtttgcaagggaaaaggagaaaaagagatctatttttgtatctagttcctgaaactaaagctaaaaacagattagtattcaaaaaaaatcacgtagtggaaatcataacttccaacttattagaaaactcctagagtctcagggatttttttcctcccaattttttctctatcaacacggtgtctcatgaaaaggaaacagtcacaagccactgctccttctagtatcaggtattaatttcagtaagacgactttaataattcagaaatatcgactcaaacaaaacaatgtgtgtggtgctgcctaagaaccgacctagcgatgcatggtcgtggtcattactttgggaattgagtacgctagggtttgggaagacaaaacgcagtgtgaggcatcaatgaaagcacatcgcagggggaggggagaggaaggaaagatcagagaggattaatgactgcattactggtgggaggggaggaggtagacgaggaccccgtgcaaggggagtggaaaggttcattttgcagtgaccgtggactggggagtgggaggaggggcaactatcagcaggaatctccccccgtggatgggtccgtcacttacgcagcggcttctagaaagagaaaatgtgcctcaggtcaatctcaaagagcaactgcgacgggaagggggagtgaccctcctaggtgtgaggggaaatacagggtcacttcccaatagacttaaggagatgttgccctaggtcctcctcggtcatcgtgggacagaggcgattgtggtgaggacccccagagccgcgtgaggggcataagagacccagagctgaggtgtgggcgttacctgcagggtcacctcctgggggtcccagtgaggccgcaggtgttgcaggaggctcagggccccctcccggcagcgatgctcctcctgatcctgaacggtgacgttcagcttgggcacctccggggagccgggagggacgtggatgtaattggccatggcccaggcgacggcggagactaccaccacgacgacggcgacggcgaccacgagaacggcgggcgccgacagactggtggatccttccgtcccggggcgccctcgcgggagggctgggggcgctgggacgggcgggcgagcggcaggagaacgtctggaggcggcactgttgccgatccgggtctggacagcagctgaactgagcccggcccgctctcggagaaaattcctgttgtcggagctggaccgcgggcggccgcagagcatgccggggctggcctgacgctggcgtcacgcgcggggcgggtcctgcgctgcgtcagggtgccgaggcggggtttctcgcctccggtcacaatgggacctctgtaccgcgctgggcttgttggcctgcgattagcacacacccatccctgggaactgctagtctggaaagcggggctgcttctccgggatgagcccgagccctgccaagcccctcaaggcattgaagctttagctcaccttatccgaatggtcattgggcatctggacttgagttaacgactgaatttttctgggaagcaagggacacgttctaaaataaccccaggatcactctccgaacttggcctgagtctaggcaagcagtgttactcggtcgccttgatcttggagctgctgtgtactggggacctcatactagttgggttaactatattcccattagcagtacgcgggatcgcagtactcgggacaagctgagttcaggtatttgggtaagacaactgcaacacttcagaggttatttgtggagtaagatgttcgaccatacagtgaataattcgaagctagggagaacagattagagtctggtatgaagaagaaagggaaggaaaggaatagttttgaagctcagcgctagaacgactcgatgtccatgccagggtaccccgagtgggccttgaaatcttgcgtctcagtgccttacagggaatggtagaaactggaaaatctacaagtaaagtattgggacctcctaattttccttttagatggaggaaaacgggctgggattccctgcagcacttagcacacggtgaatacgtttgttagtagtaaataaaacccttaactggactgagtttaattaacattcaaaatgtttaattacttcactagcattaagtttacatcctgattgttcagaaagaacctacttacctttgtaattaacaaaataattacttcaccgataacggtaaacttcctaaactaaaaagaggggtggaaatggagctttataatacagcaaagaagttgatttaacatttttcaaatttagtggtttttttgtttgttttttgtttctgtttttttttgttttgtttttgagacggagcctcactctgtcgcccaggctggagtgcaatggcgcgatcttggcccactgcaacctccgcctcccgggtttaagggattctcctgcttcagcctctcgagtagctgggattaccggcgcgtgccaccacgcccagcaaatttttgtatctttagtagagatgggtttcaccatgttggccaggctggtctcgaactcctgacctcaggtgatccacccacctcggcctcgcaaagtgctgggattacaggcgtgagccaccgcgccctgccagatttaggcataattttctacaagaaacattagagtgtgtgttccttccactttggggagaaatcataaatatactactactttcacatttcagatagtatctcttgtatttttgtataaattgtattttttattaagcagttgacattttaagaattttaaaactatgtaactgtaaaacaatttaattgaaaattatgttgcaaactgcactagtttgtaatggtaaataagagtccattaacaagtagaagaaaagaaaaaaaaactattaggtacctgagaacaaaagtaaccgaaaatgtacaggatccatggataaaattaatggagaaatgaaccatattcataaatgagaaaagattaatgtaaaggcctcaattttccctgaactaatcagtacatataatgcaattccagttaaaatctcaaaagggtttttttactgaacttgttaaaatgacattgaaattcatatcaaaacttaaggtccaagaaaagcgctgtaattggggagaggaggatagggacaggtaagatcagggaatatattgggaggaccaaccctaccaggatgtattatatattggtttaggtatgggcaaataaactactagaacataataaagtcccag

SEQ ID NO: 916189 - DNA, 4001 bp, Homo sapiens
ttgttttttgttgtttttgccctaaagttactgatctgtagttggcagattttcctgatgtcgggtttattgccactgagccaaatacaatttatttattgaatatcctactatttagttacctctatgttatgaagcgtcaaataaattagattatctataccgcaggattttcctgaactctgtgtagaatctaatttataccgcaaaagaaactggttttgaagtattaatatcaaagtaccctaagttctttagtgtggcacgccccatgcccacagacatacatactgctacctccagttatgtacaaacacaaaagcctaaaagttccattaggcatttttgtgaggcaaaaacaaagaagcccaaaccaccttttgatttcacattagcctatcctcaaacccatgaatatcttttctgataagaaacaccaaaatgtgattctaattataaaaaacctagtaagcacgtatgatgaactactgcgtttcccctacacagactctaattgaaaggcagtgttaaaccaggaagggtttttctaactccccacagacgaagaaaacaggttatttgttcattgttgctgtagtgtccattcagtgaacacacattaaataggccaaaccaaaaacaaacttcagcagcttcagcctctcacaagagcggaaggctttctacctgggtactggtggaacagcgaaatgaataaagtgtacaataaatgcagcgatgggaaaaataacacgggtagatggataaatcatcctgcctcccaatggtggcaaactttacaacaactttttagaagcaacaaaccgcagcaccacagtctttacagatatatagacatgcatacacacaactactgggtagcccagcagtgtgtttacaaacatctaccgccctgcatttacagagtgctgcttagatagcctctctgcactgtcaaacacagaaggtcattttgcctggttgcttagttcttcctctccctccatcacaggagttttctactttgggattgctcaactttcatatggatcggagtaaaataactattcagcaactttattcaccttggttttaaaaaaaaattcattgtgcaatgcctaggaaaagctgacaccaggactgtctctccgacagcgcttgcaattacaatcagacgagggggaaaaaaatcctgtctgatcagacccagagagtcctttaaaaaaataaaaagattctatcgcagtggaaactgaacaactttttttctaagacgaccacccctcgggaacaaaagttatatttcagtcacatgttgggtgtaggaatagggagcaggttttttttttttgttttttgttttttttttttttaagcgcactaattacgggggtgttttacggttctggagacaatccgggttgctctgaccaattgtgaccggcatttcattgtcaaaaagcaagggggtgggggccgaggagccggcaggggctcggcggtgggggggagtagcaaggttacgctaaagggtacagcagccaccgcgagctgcatctctttccctctcgccccaaataatttcctgcgaacagagcaactgcaacagcctgctctgaggagcccagcacgactgccctggccggtgcagctcagggtttccaccacgtagaaggaggggagaagatttttaccttaatgctacactgagcaggagtctcagacatgtctcacagcgagagagatcaggaagttctcaggttttttccactttcctttcctctccccaacccagaaaggctccacggccagccagacgcggtcatttaagaagtttcttccagcatctctcccggcagccgccccgggggtctggagcgcgcggggcggggcggggcggccggcggagttgggcgcgcggggcggcgggggcgtgggagacgggcccgagcgcggcggcggggtctgcaggtcgcggcgcggcgcggggacccgggacgcagcccggccggcctcccggtctctcctcccacccgcagccggcgcccccgccccccgccctcccgcggctctccctcgctctctcgaatgttttccttcctggaagagagaaactgaaaggcagaactgagaaagctctttgctcattgatcttgagagtttcagtgcagaaactgacgtgaattcccagcactgagctctgcctcttaaaggagccaccaggaaataaaagctcgggttacagcccggcatcggggaaataaaagctgcgcgggggaggggcggccgcgggggcgcgggcggaggaaacccgggtagcggggccgcgtggggccgcggctgcgagcggggcgagcggcgcagccccccaggccggcccccggtgcgggcgcccgccctccacgccgcgagacctcccgctggccgagccaatttccgggcttaaggaagacacctttaaaaaacgttacattgtggccccagacaccacaaaacaggttttattaaactcctcccacctcccctggctccgtctcttggatacatcgatgtgcacaagggttttgaaacgtttcactaagcgcagatgcaacgaaagtaattatctatgaagggccattccggttaggacgcggaatccgaaggaggaaataaaacaatagcctttgttctgcttctcgaccgctgcctctttaagagaatccaccaggaaatgggagatcgggttacagcctgcacacggggaaatgtggggagagcgggcgcccgagcgcgacgccggagacaaagccggggcggccgcgccgcagacgctgggggaccgtcgggcggggggattcccggggaaggtgggcgccccggaaagaggtggcgccacgcgcccgctcggggatgcggcggccgcgggcgcttcccgagccgagcacgcgctccgggaagggaaggctgcagggcagttatcaaaggcagctgagttccttttcctgacctccccctcctgtttcgaaatccactgcccttttaaagaaatagcggccgctaccaaccgaaataggtgactcgactacaaagttggcaggacgtgttcctgcagataatacccctccccaggaccgcttctctgaaaccgtcattggccggttgattggatggccctgggatcctgcagggggaggaatatttggttggaaaagcagttgaggggggttaaggccgttggggctgaagggtctagccctgagcacaagtgatctgatcactctattatttttattattatttacactctcttaaagtgtccaccacaaaaaactgagaacattatcattatacttaaattctaaccttgttagcacatattgggggtttaatatgtggatgtgtaatgtaaaaggaaatttgttataatttcttaatagagtaatatattaaatatggtataaatatgtatatacgcatatatacccatatatgttacctgcactggaccaggacacatttccccgagtctccccaccctacagatttttcctacccactttccttcacctcttcacattatcaaatgtgttgagacttgtacacacaatatttttgttcacacattgatcagatcattacgaacgaggctagggtgggaaagagtgctgttgctgggatgatgggaactggtggttgtgagcctccaggaacctgaacaggttttgtcaactggtagtcctgccctctctccaagagatctctgtcttgtccacaccgactcctctgcctttgaccacccccttctcccctttaacaattttctgtattcttttgcttttttttttttttttttaagacggagtctgctatgtcgcccaggctggagtgcagtggtacgatatcggctcactggaagctccgcctcccgggttcacgtcattctcctgcttcagcctcccgagtagctgggactacaggtgcccgccaccgcgcccggctaatcttttttgtatttttag

SEQ ID NO: 916190 - DNA, 4001 bp, Homo sapiens
gtctgttctggcctcatcctgtaggaatctcagcctctcccctaaaccagaacagactcacagagtgacccagtggaaggggcctcagaagacatccagttgagtctcttccgtcactgaacagatgaggaaactgaggctcaaagggaaacgtccccatggcaggttggaaatgcgagtccatttacactcagatgtgtcccctgccccccacccgtggacatgtttagctttggtgagaggatttgagctgggaaggcctgaatgaggcagccagagaaggaaagactggggtggagggggtggtgtgaaattgaaacagcaacaaaaagcccggctctcagaaaatgggatttaggtctggttcccagaagactgtgttagacctaaagggccactgaggaagactgcggacttccttctttgcagggagcatctggctgaggcagcctggagacaggcacgcaccagaagacttctggttccatccaggcccaaggaccactgaactggagcggtcttctccatcccccagcaagcctgtgcgtgagctggggacaaggggcagaggaggcagaggtccccctcacaccaggaagggaacagcgccactaaagggcctggtggaggcagggtggaggtggaaggagactcagcagaaggggtgagttctccatgtttacggaactgaacactccccaggcctcccactgcctcccactccccagcccccctcatcacccggatctgaaggatcatgtccacctaaatcgagttcagcctccaccctgccactccgccccccagagcctcctggaccctaatgcccaggcccccgacacacatacggcactcccaagtgaggtgtgaccaatggcgggaggtggtatcacccagtgacatcatttgaggcccaaagagcttgcatacagggagaggagggtctgagggtccagggaaggatgtcattggctctgaagctcctctcaaagagaagaagggggagtgtaggggaggtccttcccctgttttctctgcccaatccttagcaacccaaacagagggcccgagtaccctcccccttagccccaggccctagtggttgtataattccacaggctattgatgttacataagcctactaggccagccgagtctctgccccagcccctcccctacaattcaggcctaaaactggagaagagatgcttcatccggacccatccatgcctggccaaaaccaaaacaacaattagagcatcttgatgcagagttgtcatagcaagccccaagcacagggatggagccaagacgcccagatgtggaacaatggcagggagtagggtgggggttgtttccgtggagggtgggaaagatgagcataaagtggttgggtttgggactggagggttgggccagagggggttgcccgataggcactgcccctcagggctcaccctggcacacacatacccatgcacacacatacagtcacaccagacgcccgggctgactcctcacggggggcctgggtatctgtgaggagccttgtaatgctgtaatgccaaagcaggggtggcagggtgacaggggaggagaggcgcgcctgcgggcaggaagaggcctcggtccattccttgacaccggcctttcggtcctctgacttcagcaaggaccacggaggaccttcaaactagggccaggggaggatgctttcgtggtccagagggcttgctgaggatgacagggagccgggagccggaggatggaggatggtgcaggctggggagatgccggtacctttccctgggtcatggtgccgtctctcggggaaggggtccctgaggcccgggtggccgcttgggtaaccgcagcctgcctgcgtctcttccttcctccgcgtgggttctagcaacatccactgcagccgggccaggcgagccggcgcgtaccatcggcgcggggggaggagagggccgggcctgggaagatgctgcggaggacgctgcggattcgcgagcccggggtaaggcggcggcgcaccgccccctcccgccgcttcccccccaccccgccccccaccgccgcccttagccctcccccgggatgagagagagtcgcgctgcggagcaaccccagtggatgggtccgcgggggctgagcgggcggaggacgcgggaactccgtgacaccgaccagctgacgctgcccgcgtgaaaccagagccgggcatcagggcctcatctccactgtctctgcacctctctgcagctccagctgcgcctctgccttttcctcctccctctttggatgcggccctgatttctgtctccatctccacctcccctctcatcatctatttcatcatccctggtagaggggaaggtctggaagtctcgcctgtgctgcccgcttctaacagggcccctgggccctgcgctcctgtgggcctggggcaagccaatagccacctatccttgctcctttttctcgcctgtgaaatgcacacagtaggtccctccctgccttggttcacagagacatggggtgggaggacacctcttctgtttctttcagccctgctgggacatttcacggggtctttctggagacaccgctagttctgtctcaaagcctctacaacccctgccagagctctcttcctgcctccacgcttagcttccatcaccccgtctccatcttccccccttttccattcctcccatgccagagctcgttctccccgcttccccagacgtgtcactgggacccagccatcatcaggccccgttttctgtagctgctgcagtgtcactatggggtttgcaatctcaagagctgggatcaagtcccaatttagtcacccactggccgcgtggccttggcaaggcccttaacctctctgagctgcagctcctacgaaaaagaggcttagaacagagctctgtccatcctagattgactgtcagacgcacaggttatggccgtaaaagcacataaaagaccaagaagtgctggaagtatgtgaggtattattaactgaggagtctcctaccagaatgtcctgggctgccccagagcgagcacccacaaatctgcctaaaagaagtatctgaacctgctaggatgggacgagaaactaagacctgggacaggtgggggtggccacttaccttctgcttccctctcactgcccagggacccacctaaagtccctgagaaagcagggcccaggtaggcagacaaattatcaaagtctttttttttttttttttttttttttttacagagaaaatcttgttctgttgctcaggctggagtgcagtggcacaatcttggctcactgcaacctctgtcttccgggttcaagtgattctcctgcctcagcctcctgagtagctgggattacaggcgcgcaccaccacgcccggctaattttgtatttttagtagagacagggtttcaccatgttggccaggctggtctccaactcctgacctcaagtgatccaccctcctcagcctcccaaagtgctgggattacaggtgtgagccaccgtgcctggcctaattatcaaagtctttatcccacccctttttgccctttgtcccccactccataaccaccaattttgcacaaacacacttaagcctgggcctccgtgtccagaggctctctcaaccctacaaacccgagctcttcttccagcaagctgtgccctggtccccagcactgcacctggagctctgaccagctggtccaggttctggccttccctccttctctgcatctgcatcctggaagtgttttccttctcctgcttgacagcttgaatgccacctcctccaggaagcctccttccccccctagttggggttagatgctcctcttctgtagttccctagcaccctgatgtaacgcctgtcacgtggcgctgtgaagtttctttgactgactccctgttacactctaagctcctgtagcagttttggtgtgagctg

SEQ ID NO: 916191 - DNA, 4001 bp, Homo sapiens
taagtagaaagccaaactggaggctgctagggtggatgtgggggaaggctgtcagtgggtcccagtggaccgtgacatggaggcaggaggactgaggtcgtcatgcctgacaactgcaaggcttttctgtgacctgcagagagagccctgaaacaaggccatctgagcgcattggaggccgctcgccttccaaggaggcttacagacaaggaaggggtctccttgccatgtgcacgctcggctgcctgggtttgaaccctggccctaccatgtcccggctgtgtgatctgggcaattggcctgccctttctgtgcctcagtgtccccatccataaagcagggatgataataaaggtagtgaatgaagattaaatataagcatattaggggtatgcttccaggcacgccaggcacaagcctcagcatggtgccagggaaattttcgcaggctcagctgggccctgctctcatcaccacacctcatgcctctctgtgtgaaatcaccaagataatcaatacatttagacacacacacacttatgcatgcacataaacacatatgcacatacacacaagcacacatatgcacacacatatacatgtacacacataaacatgtatatacacataaacacaaatatacacacatacacacagatgcatacacaatacacatgtgtacacacaagcacacacataacacaaatacatatatacacatacacatgtatgcacatacacacatgtacctacatatacacaggtaaacacatatgcacacatatacacaaacacacaaatacacacatacacatatgcacacacatatgcaaatgcacatacatggacacacaaatatacacactaacacatgcacatacatacatatacacacatgtacccacacacgtatacacgcatgtctacacatctacacacatacacacacacatatgcatatacacttttgagaagaagaaaagacgagagaactgcggtgtcagcgaaatctttgtctttcctagggagagccccgggctcttgcctatttttagggaatgcagaagtaacactgaacatccctgagggtttgaaagtagccacagaagaagttgaagtggaggagttcaaaggggcggcgagaacagaggcaagaagagtggcttcttgatcacacgctccttacaggccctgtctgagctgtccagccgggcatgtggtcaaatgtttcagagtgaaggtcccggtgactgtacaaccgtgagacctgggactctgcatcctcagcaggccaggtcctagtgcctggcccagggatgcctccctgccccggggagtcgcatgttccccggtggcctgtctcacccgagggacttttccgcagtgcccttgctcagtccccagctgtaccacagatgtccacgcctggacagagctccagcagtgactcacctcttcatttttagcccgtgtcctctcggagcctgcagcccgcctttgctgggcagctgtctgggggtcagggcccatgccctgggtgtccactcataaaaccagctcttgaccacctgccctactaagacagggaagcggggacaaaatgaattcaaagtgcctttgacctgggcatacgttctgctgccatttgtatgtgcgtgtccaggacagcctccagattcccagtgctttcagtgagtaatgaaagctgttctaacggtctgccacccagcgtcctggcttggctttcccgcagcccctcccgttcccactccacagtggggctgctggactcacctcacagctccgggcaaagacgcctacggctgagaggcttcttcccggctggaaacttgccgcttcacaccttccggctgtaaggagcttttagctgaaaaggccttttctgccagcttctcccaagcttgagtaaacaaaaaacctatttatgtcttcagagcacttaattaagccagggcagggataaaatcagagactgagtgtagtgaaaacacactccgtaaagtcagaagaaggtcgctcccggccaggcttggccaagagccagctgtgtgttcttgggggaagctgggtccccctgaatttttgcaagaataatgtaatgaaaacccaagtaccatttgggtttgttgggtgttgacatatcggatctctctctctctctctctctctctctctctctctctctcgtatgtgtgtgtgtactgtttattttgttttgtgttttgctaaactatgtaaaaattggtggtaaacatcatgcccctttgccccaaaactcttcaacggcacctcctaagaagaaagatgatatggaaccacaataccgcgatcatactgagggaatttaacgttgatacaattatataacctatattccatatcaaaatgtccccaattttcccaacaatgtcctttaaagctgttttctttctcaacccagggctcaaacacacgttgcatttcacttgatcttagccaaaaggcagagaagcgatcacacacattgcatttcgttgtcactattaggagacaattcttcatgagtctcccgtgtttattcccatcttgcaaacagaggccttggccgcccttcattctgggctatcatttcaataacgtttgtagggagaacagttttgaaaggtagagatagcgtctctcttcaaatcaaaggataggcatgcttcctgtccactgtaataaaaataatggttccctctggagaaaagttcaggcaggcttattacccactgtgaaagattcgggttccctacactctggatttctcccctgtcgtgcaaacagctgcatgtgcaagggtcacctgggccccttctagtggccctgtggaaaccagagctggggaactggctcaagaacatgctgaccccctggcttctgtgattattgtgagtaataacatcctttgtctctgacccaggagtcttgtgtcttctgcttgagtctgtgagactgtggcacagccatgtcttccctggccagcagggtgaaatcccagttctgtgtagtaacatctctttaattcttcgaccctaacagaccccaagcctattttgcctttcctgacatggctagttttaacgagtttgggccagttgtagagcatcccatgatctggatttgtctgattgctgtctcaggattcgatgtaggataaacaattttgcaggaatttttcagggtccatgttgcgccatcaacttcaggaggcacatcccgtcagcttgtcccactgttggtcatgctagggatgatcactgggtggaggtggtatccacctcatttcttcgtgctcaaggtagctttccctttgtgatttatcaggaagctctggggagatattttgacatcttggggatatcctgctccctgacaaggcttaaactccacaaaccccagctgatgcattggtaaagagctttgtgctagacgatagccccagatactatgactattatgttttccttttgcaacagagaacgcatagtctgcagagactaaactatttgcaatcttgccttgtatagaaaaagttggccgacccctgcaatagtgggtagcgggtggtatagggtgagtagcgggtggtatagggtgagtctagagttaccttcaagaaatccccttcaatacacccacctttctacaccactttctttatcgtttttcagctttttaggggttcacaattctcttgctcccaagttgtagaatgcttaaagtgaaacacatatacctttctggataacacaatagtgcgtgacactcgtggaaatggcgcccgtgcacagcagatgaaaagtgtgagcactgccccctctgcatgcctctcactcggcgaatctgtgcaaagcaaatgttttgagatcttctaaatgtggcacaccatccagattgctttccagttattttgtctgactagaaactgtgatgtcacataaattggtgactgtgtctgc

SEQ ID NO: 916192 - DNA, 4001 bp, Homo sapiens
ttctgttcctcaaatacaccagacacatccccacctccaagacttggtcccggctgtctgcctgcaggtcttcacaaggccagctccccatcctttggtctcagcctagctgtcacctcctcagagaggtggtccctggccaccctatgcacaagaggccccccagtccctctcctgtgcctccacctgaaattaatacctgggtcatttctgcctgcaggggcgtttgtggtctgaattctagtgcctggcatgcagtaggtactcacacagctgtttgattcattctgcagtatcttctgaaacctttcaacagccccaagacaagggatctcaccccacattcacagatgtggaaatggacacagggagattcaataagttggctagaggcatacaactgtgcccagaatcacatgctccaggcaagccacccaaataaaggggctgatcttggggtctctccaccccatcaaggccaaaggaatagcaacttccctcctgctcagcaaccctcctcccccgactgcctagatagaggccaaactggttcaaggtcaccagcaggcacaggacccagctctgcccatgacccctgcctccaccagaactgggaagacaggaagctgcaggggcacaggcgccagccttgcctggagcgaaggcctggcccctgccttatctccccacactgttttccaagaagttcagagtccactgtgggcactgctgctgattcaacagcccatggccagacaggaagctggagggagcctggcccagctctgctcccaaggcaaagttcctgcctccgcaggtccaggctggaggaccttggacaagtcgtttcacctttccaagtctcagtgtcctcatctgttaaattgggctgtgtggcgagggttcatgagctaaaagaaggaaaacccactggcaaactatgggaaatggattgcaaatattagctgctgtgagtcggagttttttctcagcctcatctgcaaaatggtgacgttaacttccatccctctaagggctgagtgaattgactcctgaagagtcattttgcaaaatacttggtgggtagtgagctttcagggaaagagctgtcaaaaaggcaaataattcatccaagatctccaggggcacagctggccccggaacccaggtctcctgggagactgaagcatggcattttggcactcacatcaacgaaaagaagccagtaccgcaggtcctggggttgaatccagctgccctcagtgtcccccagcagcgggcgtggggaagagggtgtggcaggcacaggctgaaaaacatgtgtgccaagaacactaaagagcagcctggccgtcaccgccccagcagggaccccagagacacgccagcaccgccgtccagacacaggcagcccccttgtccacggcaggggctgctgctccaggtgtggccctgctcccggctgctctctgtccctttgtgtgttgtgcgtgggagctctcttaagttccttaaaggacagccagagccccagatgggtgatcagcggcagaatggggggcttatccgcagtccccaccagcggcagacgtccctatgggctgagagaggggagggtggtcattggccaagttcgcctcggcagctggagaagtcaccactggtgcggagtcccagcggggaagatccccgcaacgcgctctccaggtggccgggggaccccgaggcccagggcggcccgacccgggtcccatgtcctcgtgcatgtccccccgccaggcccgccttacctcgcagcgcaggcctagggcggcgacgggacgggaggcgcgaggttgcggggtggcccggccatggttcgggactggcccggtggcggcgacggcggcggcagcgctttgtctcctgggcggccgggccggcgcagccgcgggagagcgcggatccgacggaaggaggcgggagcaaccggacagtccgcgacccacgggcgcgcccctttaacccttcccagcctgctcgcgccgggcccgcccccgcgttcttcccacctcccgattggcaggccccgaaccggcacgcccccgtgagcccgccctcgaaatcactcttaaagggtccgctcctggctcgcgactccccagttccctagcccagaaaagcggattggagcccgggaagctcattgcgattccaaaggtaaggactggcccaggtcgtggattagcctgcaaaagcatttgggggtcctgggcgggccattcgctgaagtcctaggcttaagtccgaactccccccaggacgaggcaggaggattgcctgagcctagtagttcaagaccagcctgggcagcagagggagaccaccatctctacaaataataaaaatatttgctaaacctgggttgccaggtttagcaaatttaatgcccagttaaattagaaaaatagctctaattcctgaaaaatgtgtgagtggcagaaaaaacagctgaatccaggacatttgcgtacagcactgttccatacggacagggcgcctcgcaagcttcccctggctccaggtgaagagaggaagttctggaattaggcagacttgagttcgagtcgcactaggccactgaacactgtgtgagcttagagaaatcatttcacttctctaagcctccgtttcctcatccggaaaataaagaccatcatgatatgtaaagtgcacggcacaacagaaagctctcaagaaataggaattgctgttgtttttgccctgcccacctccttgaacccttccttcctgttcctgccgcctcttctccaccacccgccacctcccaatcactattaagtcctggcctgaaagcaggaagaacaggacagaccagggtcagctctccattgtacagcctctcactaagcgcctactgtgtgccaggcactgtacctgaaccaggtaagcaggtgcagccaggaatcaagacaacacaaatgagttctggaagtgattcatgctaggactgtacgctaaggcaatggggcagaaagcctgggagtgcagtttttttgtttttgttttttgttttttgtgtttttttgtcacccaggttggggtgcagtggcacaatcacagctcattgtaacctgaactcctgggttcaaccgagcctcccacctcagcctcccaagtagttgggactacaggtgtgtaccaccacacccggctaattttttttaattttttgtagagatcgggggggtcttgctatcttgcccaagctggaagtgcagcttttagacaaggtggtcagggaaggcctctctgaggacagacctggaggaatgagggagggagccatgtggttatctgggagaaggaggtcccaggcagagggaacagcaagtgcaaaagccctgaaatggggccatcctgggcatgtttgaagaacaacgaggagaccagtggagccaagtgagcaatgggaagaatagtaggaaaataggtcagctggctgggcgcagtggctcacgcctataatcccagcactttgggaggccgaggcaggtagatcacttgaggtcaggagttcgagaccagcctagccaacatggtgaaacccggtctctactaaaaatacaaaaaaaaaaaaaaaaaaaaattagccaggcatggtggtgtacacctgtaatcccagttacttgggaggctgagacaggagaatcacttgaacccaggaggcagaggttgcaatgagctgagattgcaccactgcactccagcctgggtgacagagcaagactctgtcaaacaaaaaaaaaacaaaaacaaaaaaaaaaacacaatagatcagagattattggcaaagccagaaagccaggtgacctaggggcttaaggaccagaggaaagattttgcttttactctaagaagaatgaggagccatgggagggttttgagcagaggagggacatggtctgtgttagatttaacatggtccctgactgctatgg

SEQ ID NO: 916193 - DNA, 4001 bp, Homo sapiens
tactatgttgcccagactggtcttgaactccaggactcaagcgatcctcctgtcttggcctccaaagtgctgggattacaggagtgagccactgtgcctggctaacactcttttttttttttttttttttttttttttagagatagagtccctctgtcaccagactggaatgtagtggcacaatctatagctcactgtaacctcaaattcctggtctcaagggaccttcccgagtagctgggactgcaagtgcataccaccacttcctggctaatttttaaattttttctagagacagggtcttgctttgttgcctgggatggtctcaaactcctgggctcaagtgagcctctcaccttgacctcctaaagtgctgggattacaggcatgagccactgtgaccagtttagctttccttaaacataggaaagaacccccccttaatcaatttcatcaaacatgactgatttttgtttgtttgtttgtttttgagacagggtctcgctatgtcacccatgctgagtggggtgcagtagtgcaagcatggtgctcactgcagtctcctgggttcaggggatcctctggcctcccaaggagctgggactacaggtttgagctaacatgcctggctaatttttttatttttagtagacaggaggtctccttatgttggccaagctggtctagaactcctgggctcaagagatcctcctgccttggcctcccaaagcattgggattacaggcatgaatcgctgtgcctggcctgattttgttgtactgcgagagaataaaatgcagtataaccttaattgtttgggggtctattagattcttatgtatttatttatttatttatttttctaaaaatatagatggggtctcactatgttgaccaggctggtctctaactcctggcctcaagggatcctcccatctcagcttcccaaagtgttgggattacaggcataagccaccgcacccggctgacattatgtaaacactctttctattctccttgaatttctcctaatttctccttgaagtgtacagggaaaataaaaggagctagaattcaaagccatctaaattctatctggctaatagctgtttgataaaacctccatagggaacaaatgaaaactttttttttttttgagatagagtttcgcttttgttgcccaggctggagtgcaatggtgcaatcttggctcaccacaacctccacctccctggttcaagcaattctcctacctcagcctcctgagtagctgggattacaggcaagtgcaatcatgcccagctaactttttgtatttttagtagaaacggtggtttctccatgttggtcaggctggtcttgaactcccgacctcagtgatccgcccgcctcggcctcccaaagtgctgggattacaggcgtgagccaccatgcccggcttgatttatttcttaaatggctttattaaacctgatataaagagattaatgtcaaattggagcttgttatatccacagtcggtgtcaggtgaaattgtcatttgaagtcaaagctaccctaaatacagtcaaatatcatgaaagtgatttctaaaataaacaaaaatgtacttggtcacagaaagtttaaaaagaaaattgcagtctgtaaacttcagattcactacctacctctctggctcgatggagctgtgcgcgctcaatcctagagatgatatcctttactgagaatgggatctcaaggttagggagcatcaaaggactaaggatattttggggctctcttctcatgatggtggaatccttgatgcatttttctgattcagggtcattgtctatctcatttttcattttgaagaacattttgaaaatgtgggtgatttcgttttatttcttctttttcacagaatctacaaaaatgctaataaagatatccagtaggaagctaggagaggtctttcctgatcctagaagttgtggcatactctgctactaattggtggctcccatgatattcccgtcctgttgatgtcacaatagacccattgtgacattatcattgatcaaacatgtaaagaatgcttactatgtgcagagaactggtcattctatatgctgccatggtagaagggtgaggggggaaggagggtaggaaataatagacaacaggaatgctaaaataaacagaagatatagccctgcttaaataagcttaaaatctagatgtgttggccgggtgcagtggctcatgcctgtaatcccagcactttgggaggccgaggcaggtggatcaccagaggtcggagttcgagaccagcctgaccaacatggagaaaccccgtctctactaaaaaaaaaaaaatacaaaattagccatgtgaggtggcacatgcgtgtagtcccagctacttgggaggctgaggcaggagaatcacttgaacccgggaggcggaggttgtggtgagccgagatcacgtcattgcactccagcctgggcaacaagagtgaaactgtctcaaaaaaaaaaaaaaaaaaatctaggtgtgtcaaatataactcctggttcttctctcttcctggggttttgcttaagtatttttaagcctgtaatggaataaaggttacaactacttcctcagctgccccttaacttttcctagacatgtagtaacttggatgatatcatttggatgaagtaacttggatgatatcatttggatgaggatcacactctttgcactgcttactcttttttcttttcttttcttttctttcccttttttttggagacagagtctcactttgttacccaggctggagtgcagtggtgtgatcttggttcatggcaacctctgcctcccaggttcaagagattcttgtgcctcagcctccctgagtagctggaattacaggtgcgcgccaccacgcctggctaatttttgtttaatatttgcttccaatttttttaataataaaaaagcattacagaaggttgaagtcctctttgatgtcccccacccctggttccttccttccccactgtcccattccagaggaaatgacaatcatgaattttacatatttgtgttatctatttttacatagttttactacaggtgtatgtattgttttttctttctttctttctttctccttccttccttccttccttccttccttccttccttccttccttccttcctttctttctttctttttttttttttgaggcagagtctcactctgttgtccaggctggagtgtagtagtgccatctcagcagactgtaacctctgcctcccaggttcaaacgattcttctacctcagcctcccgagtagctgggattacaggcatgcgccaccacacctggctaattttttttttttttttttttgagacggaatctcgcctgtggcccaggctggagtgcagtggcatgatctcggctcactgcaagctccgcctcccaggtttgctccattctcctgcctcagcctcccgagtagctgggactacaggcgcccgccaccacacccggctagttttttgtattttttagtagagacggggtttcaccatgttagccaggatggtctcgatctcctgacctcgtgatctgcatgccttggcctcccaaagtgctgagattacaggtgtgagccactgcactcggcctacacctggctaattttttatatttttggtagatatagggtttcactgtgttggccaggctggtctcaaactcctcaagtgattcactcacctcggcctcccaaagtttagttgtcaactaaactaaatttgcattattctttctctctcacttgcatcttttatgcagcatggaattcatcaatcagcaactagacatgaaggcttttctttgagacaaaatctcactctgtcacccaggctggagtgcagaggcacgatctaggctcactgcaagctccgcctcccaggttcacgccattctcctgcctcagcctcccaagta

SEQ ID NO: 916194 - DNA, 4001 bp, Homo sapiens
ggaggtatctgacttgttactgctctatgccgattgcctagtccaacatctggacaactgaattaattaagcagaatcaacagctctgtcagtcttgagggcagctgagggaccactgaactaagagcttccaagcatggggtagtatgcagggggcagggcacataccaataccatcttcttccaacactggagcatccagcacacagcacacaggtcctgtgatgggatgactctgagctgagtggggggtagcacttagctttagggtttaatgcagctggcccacacccaaatggctgcaccagttgctcacagctggcatcagggcccatgcagtaaaggtcattcagtgctttgaatatcacccaggggtgctctataaaatagctaatgtgggtttgaatttagtttctatcctgcacaaaaatgagatgtcataatggacccgtgacttaggcttcatcatatattcagctaatgtcatgatctgtgatgtttggacacttctgtgtctgcccctcaggagcatggaggtgatgtgctgtgacacgagtggtggaatgcttcactggagaaggggatgtgtcctgtgctgtccctgtgctcgccacccacactcccctcccagaggaggcacggtgcccagcctgcaaactcaccccagtcacccagccagcggagaatgtcatacaggtgcttctccttcatcatagcatctttggagaaggaggcaattttttccagcaagatgaatctcttcttgccctttggatctctctgctgagatttggcattttcttttaaatcatatcctaattcttcctggaagcggttgatgacacaattgacattgtccaaaatgtctgagagctgggtagaaatatcctatagagaagcagcagattgtagtgttagggctgtggacttgagccagaagccacatgctagcagcgtgaccttggacaagtcgcttagcctctttgggtctcagttttcttatatttaaagtgggaatcattatagtacctatgtcacagggtttctgtaaggattaaatgaattaaatattttaaagtgcttttaatagtacctggcacattacacaaaagtggtagcttttattatcattgtgattattaagaaggtcaagaaagtatagaacaccaaaaccccacagcaaacatttctttagaatttcagaggttgctgggggtttctggatgtctttcctcacaaggatccacaggcaacagaagcttggaaaagtgaggccccaagaaactctaggatcagaggctcaagtaaaaaatgtactagagcctcgtgtacagggtgatttgagcctttggacatttccccaacccctatgaacttcctgggctcagcttgggggattctggagggttgccaagaacagattctgggtcctttctcctgccctctaaaacccaccacaccaccacgatgtgcctcagggctatcctcgagcttcctgcccccttcccgggccccagccctgcctcaggcgggtggttgctttcagctcaccctgtatatgccaagtttaggagagagataatttatactaatctgtctgcagacccaggttgctgaatatcccagggcctctgaggacccagagctggaatctcactcaaacctgggatcagcccccagtctccgcatcagatcccaatgtaagagtgattccttcatctcaggggctacctcttgagcccgagttagctgggcagcctcaatcctcaggatgatggctttcactgatgtgggagtcaccaactgtggggggtcatccttctccattttggatcactctgtcagtcacaaaacatcctgtgtttctggtccacaggcctggacacacaatgttgcctgctttggaggttaagggcaccagggtgtctcctgggtaccctctgcccaggcacagctcctctggtaactgccaaacaccaggttccaactgatcctcttttccccagtgacatcatcagtttgattagaagaattaggagatgagactccccactatctagctttttgtccattacctaacatatatttacttgacttgttgccttttctttttttttttttttttttgagacggagtctccctctgtagcccaggctggagtgcagtggtgtgatctcggtcactgcaacctccacttcctgggttcaagtgattctcctggctcagcctcctgagtagctgggattacaggtgcgtgccaccacgcctggctaatttattttttgtatttttagtaaagacggggtttcactgtgttagcgaggatggtctcgatctcctgacctcgtgatccacccaccttagcctcccaaagtgctgggattacaggtgtgagccaccgtgcccggcctacttgttgctttttaaaaattactaaatgttatgctcccaaacaaaacattaatgtctacaaataagaaaaagcaattagcaaaagttattttcctgaataaaatattttaaatttgtaaaaattagagccaatcaataaccaaatggaagccaggctcagtggctcacgcctgtaatcccaacaatttgggaggctgaggtgggaggatcacttgagcccaggagtttgagaccagcctgggcaacatggtgagagcctagctctacaaaaaaatttaaaaaatagccaggcatggtggcgcatgcctgggatcccaactacttgagaggttgagatgggaggatcacttgagcccaggaggtcaaggctgcagtgagccatgttcacgccactacaccccagcctaggtgatagataccctgacacacacacacacacacacacacacacacacacacacacaaacatacagagggaggaacatcccataatgctaaagatgtcaattaataaggagaacataattctaaatgtgtatatacctaataacattgcttcaaaatacatgaagtaaaaagcttccagaactgaaaggaggaataggtaaatccaaaattatagttggagattccagcacttctcttgcaggagttgatagaagtagcaaaaaataaaaagtatagaggttttgaaaaatactatcaaccaacttgactccattgacagtcatagaacacttcacccaacaacaggacacatattattccctacgcatatggaacaatgatcatataaaccataatttgggccataaaacaagtatcaattaccctaagaagtctaaaataatacaaaatatgttctctgaccactatggtattaaactataaatcaataattgagagatctttggaaaattcccaaatattttacaaattaagcaacatacttccatataaccctgagtcaaaaaagaaatcacagggaaagttatgaaatactttgaaccgagcaaaaatagaaacatatcacaattttgaggatgctgccaaatcagtgcttagaggaaaaaactagaaaaggaagaacaaaaaaacccaaaataagcagaaggaaggaaataataagaataagaatagagaccaatagaaaacaaacaaaaatagaagaaaatcaatgcaactaaaatctgatgttttgaaaagattaatgcaattgataaaactctagccatatttaccaggaagaaaagagagaagacaagctaacaatatgaagaataagagactacagactctacagtgggaataatatgagagagcaatatgaaaaacctttatgccaataaagttggtaaattagatgaaatgggcaaattctttaacatacgtaacctatcgatgctcactaaagaaaaaaaaagctttgaatatccgtaaatctactaaagaaattggattcataatataaaaaacctttccctcaaagaaaactccagccccagatagtttaattggtgagttctgccaaacatttaagaaaaaaaagatacggttctataaaaactctttcaaaaaattgaatagt

SEQ ID NO: 916195 - DNA, 4001 bp, Homo sapiens
tggaatgcgacccccaactccttattaagagtccaaaatggttaccagccaggatgggtctgggtgaggaatcgaattacaacccacttcaatcctcgacctggtcgtttgctgttattaggagaaatggggcagagagggagggcaccgctcacggagcctcatttcgcatgctccgatcccctctcggcgtccctctactccgcccctaccctgaccgcccgcgagggagacgccggccgatggacccgcatctgccctcacctctcgccttccccgggcgatccctctacagtcccggacccccgagaaaggggaagggagacgtgtgcacacgggggcttccgggaccgcggtcctgcagttgccgctccggtccccagcgctggccggcgacccgaggcgcggctcgcacctacctgcagccccgcttcccggtggcggcaacacctagcgatgctcctgcagcttttgcgggccggcgccagccttatcgctctcgcatcgcttccaagatgccaatccgccgtcaccatccaggggcatagggaaccgaagtctggtgctgtgtgatcgtggagggcggcgtgtgagtgtggccctgagcgtgcgagtgtgcgcgcgcgtgtgtggatgtgtttcctcctccgatggcaaagacggttcaggaatctgacatccaagctggaatccccctgaagcgggtgaaggtgagcctgatccttctccccgcttctttattccacagtgtcaaagtaatcaaaagatttgtttactgaggaaaagccaaagtcccgcagcccttggcagcgcccgcggtcgcctcctgtcctcgccggatgcgcgcggtgcgctcagctccctggactgcaagaatcaaggcggtcttgctgcaattaccgctcttattccatctctgatttgtttgcttttaaggccgactaaagacttttcctctcgcctcacgtcgtctctccctctcacacacacacacactcacacatcctccgttccctctctcccgccctccctcttgttctctggggaaaggcaattggacagaatgattcaccttcaggaaagcagcctcggccacgcacttctcgagttccctggctctcgcaggtaccgggtctccaacgtggcggagttgctgggaagctcgggacaggaaggaggagaggctctgagctcagccgatgtcccccctccagacgcccgcgttcctccgtccaggtgcccctgttcccactgctcgcagataggtccccgctggtgccctcgcggagacttggcgccttccactcgaatccacttagcagcaactcctggccagcttcagcccctcaatcccgcctcgaagtgctgcgggcagagccccacgcagcccacccgctgcccttctaggcatcgtgggctggaaggaagggaaacccgccgatgtccccctggtagcagtgccctggcaccgtcaccaccgaggaggtgcgagttccaacatcgaacacaagcgagcaggtgtcgcctgtgtcactttgctaaaggcgggaggggagaaagaaaggagcggggggagggggccgaggaaacaaatccagatcaccggcggagaaagaagccgtttagcaagcaaagcctcctctccgcgtcccaccccagatgctatactgtcaaaagacactgatgctaatcttttagaaagtcgccataaagggcagagcccctgctccactctagaaccctattccacccagcctggctgtccagtgagtacagagtgacttggctcccccgtatagtgcagcgagaatgcaggagaataggtcctgacactccaggttgagttaagcagtaaaatggaatggcagggccgggcggcgttgcctcgcctctctctcccaacagccagttctgttagccccagcaactgccgttgagagcaaacaacggtcctgcagaaaaagaacgagacagtaaaagatgaggaggcaactggtataaaagctggactatgtctccctctagagggtcaaccggattagaacgctttactagatgtaacagaccagtttctctccataaagaaaaagaaaaaaatatctggtttcagataatttgcatttttacaaattacaacttctcaaggatttagacggaggattttcactgcagccctattaagcaaagcccttgctaaaggaacgtcgtgatattcatgacgctggaaggtcatgtccttacatgtttggtcaaattgggtgtcggtttaagcgctgtgcatatgagctcaaatgaagggtcttctgaggctcacttcgatcatgtttggagatgagcaaaaccttaatctagtgattagaagactattcaaaaatgaataattagtaagaatgaattcagaaaaagaaaatctgaaacaaagaaagggaatgctgacccaggaaattttacaagtcctttacaaggaaagataactcaagaatctggttttggagccagttttcatacctctttttcaactagaccaataatggtcaagatagctaaattccttccagctctaaaggtctgtgcttttatatagctgtgattcactgaaaccattgacaaattaggtatcacaagctctcttcaccagctataaaataaaagtaatactacataccatatttacaaagaaatatagaatatgtgcttcacttagctattttatcttaacatgcttagtaaatcaaccatattttgtatctaaaatgcatcaagtaatttaattatgttgaggtggtcatttttataaaaaatagctccaccgattttataaagttttgttacatcagtccaaatcaagctaggtcccatctgtaaccttaacatttagatttttgtgaacttactatttgagctgggggtttgctttcaaaatgtttctgtatgttcaaaaattgtaaaatgtgtattaaagttattattaaacacccttccattcactctgaatttctggagcagttctattttaacttgataatctaaattagcacagtcataaagaaagaaaagaatgtattttttaaatagctgagactagttgaaatcatttaaaacaaagcaccaaaactaaacaaggcaagttttaccgtaactaattgctctatggcatatttgactttgtctagtagtatacagcaatcatttgtttccaaggatctctcagatagtctctttcaaaagatttatgccatgtgattaaatatttcattccacttacatagtaacttatatccaggaaagcaacgtttacattttaaaacacctggcactgttgcactgcaaatcttacagtatttttttgtctgctgtgttcaatagtgtgatgaaattcaagcaggaatgacattggaaacttggactctgtactagaaagaagtcacttacaaaatcactttagaacattggctttcttttcacacacacacacacacacacacacatacaaaaaaacataaagcatacattataatctttctaccttctaattcattaactttttgtggttgtaatctatagttttgtcatcttgttaaaattttatttgtattgtttaagtgtgggacattttcagccttatttttctaactaaacccactgtgtttttacaatatatgaaaaagtaaagagaacagatatataaattaattacaaaatagaacaaaatttcttatccaatgtcatatgatgctgaaattctatcataacctctgtgctttttgtaaataattcccaataatttttagatcaagatattcctatttccagcatctcctagacaaaataaaatcttttgcattctcttcaaaggaaacaaagtagtaaagattctcctaatttaacagaaattttttgttgatacttcttaccttctacaggcatgcctcaaaaatgttgcaggtttggttccaaaccaccacaaatattgcaataaagtgagtcacacaatttttttg

SEQ ID NO: 916196 - DNA, 4001 bp, Homo sapiens
tgaagaacagaaaagaaacccaagactccatcccatctttaagaagtcttcagtagcaccagagacaaaaaggacggccatgcgggcggatcacgaggtcaggagatcgagaccatcctggctaacacggtgaagccccgtctctactaaaaatacaaaaaagtagccgggcgtggtggcaggcgcttgtaatcccagctactccagaggctgagggaggagaatggcgtgaacccgggaggcggagcttgcagtgagctgagatggcaccactgcactccagcctgggcaacagaacgagactctgtctcaaaaaaaaaaaaacaaaaaggatggccatgggtgcaacaggggccctgactgcgggttgtactgaacggcaaacatatcgcagttcttgcttttagggaataaagtagggagaggaagaggaggtagagtctccagcagtgacttcaacagctcgctgtcttcactatctaggaaataggtgtaaaaacctgctcaaaacgaaatagatttgtgaaaaaaggaacttcagtgtgaagaaaatgtcaagatcaaggcacctcggatattcagtcattggtctcattggcgattagaaatcctcgtttgaggtcgggcgcaatggttcaccccgtaatcccagcaatttgggaggccgaggcgggcggctcacttgaggtcaggggttcgacacaagcctagccaacatggtgaaaccacctctctactaaaaatacaaaaattagccgggcgtggtggcaggcgcctgtaatcccagctactcgggaggctgaggcaggagaatcacttgaacctgggaggctgaggttgcagtgagctgagatcgcaccaccgcattccagcctaggcaacagagcgagactgtctcgctctcaaaaaacaagaaagaaaagaaaaaaaaagaaaaagaaatccccgtttgacaggaaggtggctcatgtcactagagggaaggaactggtttatgggcctggatgcccccagttgaaccgggggacatcttcctcctctgtccctcccgcctcgcctttcggtggacacacagtcctgtgccagacagcaaacgtcccagcagggctcgcagcgccccctcggggcagagagatgcacgcgggcgactgtcgcagtcacctcgtggccactgcaccaaacgctcctccgaagcttccctcagagaccctccctcaaccgcgaggcagtcctcccctctgccctctgtccacaacaaaactgctccccgcctctcacttgagggcaccggggccagcccccgagacgagaggtcggccgcagccctcctccacggggctcacgacccgggggcctcacgacccgggggccccatgctgccacccttaccccggggcccccaacctcacccgccgccgccaccctcggtcccggccacagcgggcggctctgcagaagagctacgctccgtccagtcggaccccggaccctggccgggcatctccgcggcgccgagaccgcgagccgtgtgcgggagcagctgtcccagcatccctcccccgacagcacgcgtgcgtcaggctgctggtattccggagaggcggctcggatgctggcttctcgcccctccgaagccgttcggacactgcccgaacagcttcgggagagcggggcgggcagatccgcgaccccggagttacggtgggggaggggcaggagcgctgcggtcgctgagcgtttgcacgtttgcacctctctgtggaagcagtgcgtcacaggagggaaatatacatgctccccaaaacaagaggtgccttccacttcagtattccagatcctcagcacatttgcaaatcgcgagggtcaccatacaggtcaaacgtctgcacgcaaaccacggaccgaagcacgtggcgcaaggatgcggagctttatctgttgtccgttattactcaggtatccaagcttagacagcatcccaacggccgatttccatcaactacttttgcgcacgcgcaaatcctctccctcgcccctccccttttttctcaggacgcgtttctcacgggatttggcccgcgggctgccccgtagtaggaggtgtggtagaactggaggcgtagaaagaatgtggattgcgattggttcgcacttcactttcccggagctcagtgggcgtcgcgcgaaggctaagggagtgtggcgggcggctccgggagccaacatgcctcggtatgcgcagctggtcatgggccccgcgggcagcgggaaggtgaggatctgcggggacaaggagagaaaagtaggagttcgtggaaggcgggagattgggtcctgagggagtgagccggcgggtgtgtgtactgggaaccctgagaccccacgcaactcatttctgctgtctggcttcacgttcttttttgttgttgttttgaaagggaaataatggtagttgttaatatttattgtatacttaagccccaggcagcagatgaaacgcctcgcttatttctacaacaaccctgtgagagagatctcatttttctcattttacagaaaacgagatacagaaaggttaattaagttctttgccccgcaaaaaaatataaatccagttttgtctcaactccagaatccggccctgtctcgctcccaggagggtaaagtggggtctcattaattactgtttctcagaacttgggacatggacttttggtatttaaggtgcttttaggtggtaggtggtacatggaccccacattaaggagcatcagataatgtgttagggaaattgttcccttttcatttctctttcagttctcaacttcgcatttaggagaagttgtgctcggtgctagtgtgtatcttcagcacttctttaatccccaggtcttttcagagagcagttcttagtctcagagcttttaataggcacctgtatttagctaaaaatagaacatttaaagattttatataattttatgtctaatttcacgttatgtcaaatataagtggttttcagtttacagtagggataaaattttttcttgtaaacaaatattaagggaatgttaggaacattcaaatacagtgagaatggtgaagatatggatcaaataacatatgtgtgggaaacatagccaggcgtggtggctcacgtctgtaatcctatcactttgggagatggaggtggacggatcgcctgagcccaggagtttgggaccagccttggcaacacggcgaaactctgtctctacaaaaaaatgcaaaaattagccaggcctggtggcaggtacctctagtcccagcttctcgggaagctgaagtgggaggattacctgaacccaggaggttgaggctgtggtgagtggtgatcgtgccactgcactccagcctgggtgacagaggtactgtcgcaaaaaaaaaaaagaagaagtgtggaaacactagagtctgtggaggtgttgtgtggcctcagtctttaacaaacacattgttctaagctgttgacttattctgggtaaaaacatgtacatgtaactaagatacctatggcctttaacttacccagagtctgtagtcttttggggaagacaaatagatgacctgtcaattaagatacagtgtgatgtggccaggtgtggtggcttaagcctgtaatcctcgcactttgggaggctgaggccagcagatcacttgagcccaggagttcagggtcagcctgggcaccatggtgaagccctgtctctaccaaaaatacaaaaattagctgggcatggtggcgagagcctatagtcccacctactcggggggctaaggctggagaatcgcttgagcctgggtcaaagctgcagtgagctatgatggtgccactgcactccagcctgggtgacagtgagaccctttgcaaaaaaaaaaaagatacagtgtgtgatgtatggagagggcattccagacagagacaacagtatgtgtaaaggcactgagaggacagcatgatg

SEQ ID NO: 916197 - DNA, 4001 bp, Homo sapiens
cacactttctctgctcttaccccgccccacgctgctgaggcaatgacagttttcgaaccttttcctagaaatgtgatcacagcagtttcaccagcacccgacactggcaataattgctggaagggacctagacgaatcccagagccagcagcaggatgcttgctgggggttctctgggcctttgcagggaagcgtgccagtactggggtgtgtgttggttgggggtgccctgacagagacacagtttattcagaccttggcactgatgggcctcacttgcccgccattcacttaagcagcctcacaatatgctcgttgaaatcctcttaaacaccagaaggagcagggggcaatcaggagttccaggttggccaaggcccctgaccttggggtagaacagcatggggagcccctggactaggggtgcagcaggcagcagctcctctgcaccttccttggctgggggaggggcacccacattttccccagcagaagtagcctattggagggccggaggcccacatctctctggggaccctgggaacttcagcctgccagctgggtacatggtggggttcagggaggtctcttctatagcatctcttttcaaaacagaaagttgctctgtctgggaggcctgagccccgaggcacaggccaggctacatgggcaaagctctgaacacctgtccttgcggggaggagcatcaacagggacagctggcactgcctccctcccccaccttatggggcgctaaggatttaggtcagaggactgcaatggtaggggtggggggagtccgccttcacccctccactacccaaaggcatccagccccgccccttgttaccacgaccccgccccctccggccttgggtcaaggcaagtggtgttgccacggcaaccccagtgacatcagaggctaaggtttgacgtcatgtcgtgcccccactggggaacctaccgtccctgcgagttatttgtgggaacgtggtttgaacgagggctctaaggtctagccccatggggcacaattctcaaacgtggccacctgcgtttctggaaccccaaatccccctctgaggtgatttcccttgaagatctcagaggctgctcgggagaccctcaacgttttcccatcctgggtgccccccaccccccagcccttccaagacactggagttcccggggaattttcggatgacacagccaatacctttgttagctttacgggtggggtgacctttcctctctggcaaccaacccgcccagggtcccgcggaatccgaatgggccccccaacctccactcccatcggctggcccatctgaacaagttgtgtttggagggaggaaaggggcggacaagggttatctctgcttcaggacccccaacagcctaggaccccttctgtccaatcctggctgcccggacgccagggggtgcccccagctccagcgcagaaccccgccccgcacaactcaccggatcagccaggccgtcgaagggcaccaggtctcagctaccacgacgctccgctcgacgggtcgcagccatgcaggagtggcagaggctgcctgacgaagccctccttgggggtcgatgcctctctccgggtgggaaggggcgctgtcggtgagggctatcctggcgccggcctgcgccgtccgaagtcgggggggaggggaggtctccgttcagcaggggtcacgcccgccccggacgggggccgcgcgggcgctcaggcgacgcatcttcgccggggcccgtgatcgccacgtccggcgggcggcgctgcgcctcccctcggggccccgctcaaggctgcagctcggcccgcgccgctcccagggcgccctctccgcccgcgctgggagcccggcggccgcggcccctttcgccagccccagctgcagcctgtctttgttgcttcctctcgctcgcccgcccgcccgcggcttgcagcccccgggttcgccccgaggtggagggattgtctccttcgggggttgcacgcacccgcagcggccccggctcctcgccggacatacaccggcccctgcaggttgcaaagaacagcggcgagaatgcaccggcccctcctcctcctgctctgagccccgggtgtggggggaggggaagccggcgaacagcggcggcggcagcggcggcggcggcggcagcgggcgacgcaagctcggatgcagcctcgggggcctcggcgctgagaaacagccgatcccagtggcgcaggacggacacgaggacggcccgggggactgtgcaccgggtgtgcgagctcgcaagccgcagcaggggccgcgcgcgctgggctctcacgcgcccatggccccgggcggcgcgcgggggctcccggggccgcagcctcgcgccgtctggcgcgcgccggcgcctcgcctggtctcaggcccgggtgccgcgcgccgcgccccacaggcgccgggcccggctgtccgcctcccccggccggcgcgcgcagcctctccgcggagcagccggccaggcagtcctgcccgctgctccgctctggcccgactgacaggcgcgagcgccggcagcagcccccgcgtctcgtcccccgcccgccccccgcggcccagcccaatcagcggcggctgagaggcggttaccagggtgacgcggcaccgcgtcctgcgaggggcggagccgggggccgccacgcgcgcttttcgcggcaaaattcaaaggccggcagggcggctctccaacctcctcccccaagcagggacgaggcggaacttgcctcgcgaggactgcaactcccggcatgctgcgcgccggcgccgggtggaggggccccgactgggggcgcagggcgtgctggtttttgtagtcccactaggggtggcaaaaccagtgtcatttactgatcacatatttgggacaaggcactgtataagtgcattatcggcattatttcatttaatcttggcaaaaaccaacctcatgaggaatttgttaaaaataacaactatagctaacacttatgtagcaaagtattttatctaatcctcacaacaccgtgtgagtgggtattactatcacccccattttacagatgagaaaactgatacggtaggtactattattatacttccaacttacagaggaaactgaggtaaggagatgtgaagtgacatggtcctggatgtttttgtcctaaggcttatttttggcagcgatgtgtttttggcatcacagttgtgatctgtggagcgctaactatataacccagcacagcgctgagcaatttgcaagctacaccttctagacgtaccccacgcccacaggagacaggcactagcctactcccccacttaatagatagggaaactgaggcatagtttcacatcaacctggggttcaaatatgaatctatcaaactatactgtgctttcccttttacttttaaagaagcttcctgggttctcacagcccatgggcggcccgtctagcagtctcatttacagatggggaaattgagtcctgggtggggcagttccctcagttgctgtgtgtccatcacacagcactgtaggaagccagctttccgggataataacaaagatccccacagaaatgcagagcagcagtcagaccccccacccctcaggctatgcccgtgtgatacctggagtcccaccgaaactgggtgggattgcagccctgcccttgctggttgttggtcttggccatttaccttcacgggtctgcgcctcagtttcttgtctgtgaaatggggggcatcataattcctaccttacagcgtagatttgagggcaaaatgaattcttgcatgtaaaggactcaaaacacacattaagtgctcaataaatgccctctgtactcacccgggctggagggctttggagaccctggggagcgtatccagcggacgggctgattatagacgggccctagcctacttccaggagccaacccaccccgccgggagaggc

SEQ ID NO: 916198 - DNA, 4001 bp, Homo sapiens
gcctcccgcaggccgcgcctcccgcacgccgcgctgccggggcttgttcctcctcatggctttgccctgacgtaattcaaacatggcaacagttcgacttcaaaggcgaacccacagacctcccagacacaggctcccgggccacgagaaaccggccgagcagtccgggccaagctccccggaaccctcggccgtcgcaacccccgacgccagggctgaagcgccgggcactgccgcctccctcggtcgcccgcccgcacgcccggagcggggaagcacgccgcctccctacgcaccagcatggcacctcgcacaagtagcgccgccaaagtttccccacgagggggctgagggacaaaagcccctcccgaaactcgcccgaacttcgagggcctccgacctgcacggccctacgcccaggcggcggccccgagcgccgggggcccgcacgggcacatgcagccctttgttttctgtccagccgggcgctgcctacgtgcagcatcagggatgtcggagcgtttcgcaggggccggacactggacgatcaccctgggtaggggtccggaccccgcgccccgaagagtccggagcctggccccccgaccctcccctcgggagcaggcccatttaatcaaagttttgcagtgtccttgatgagaaacgcccggagtatccgccccgcacgggcggagagttggcgactttcactctgctttttaaactggcaagacgccatcatcagcaaaccacattgtcctgccggccggacctgcccgacggcggccgcatcccacggctcacgcggggctggacattcggacaaggaccagggtcgcagcccgaagcacgtggtctgtcacgtagagcacaaaaagcagtgccctgcggagttcactgactcccgcggcgtacacaacgccgccgcctccatctccagccaagttggcttccctggccatcttacagcgcggacggccgcccataaacgggaagccctcgcggtgtcgcccacacctacgctacaggtgaacgcaccgggagcaaaacttcgggctccgaaagcaccccggacaccagaggctcttgggcgcggtccgaagagggcaggcgagtggaagacgggctgtttttaagcgaccgcgtgttgctctcattgtcgcatccgcatccctccggagttgagcaaacaacgccacgccgcgtgcgctccggcagagcccagcactgacccccaaaggccgatttaaagaccctcggccgccagctcggaagcggatggcaacttagtttccgagcgaatggcgtttattgtccaccctagtccgagggctgcagtcaactaaaccacgaggtttcacaacggcgcccgaccctgcccgcgcctcgcgcccacgcggacgcaccgaccccggccgctgcgcggtggccaacgagtcgctttcctctcgggcctttcggccgccgggctcctttccgcgagagaacactgcggcggagaaaagtcattgtcaccttcaacgtggatccctcaactccggcgactcctcaattatgcccaggctccactcacttccccgccccgagactttcggtttgcctcaaataccctccccaattaataaatacacactaaacacgagcgtaccaaagaacctggggtctgaagatcacgaaaacagcgctcccaacaatgccacctccaagacaaaacttcctgtgtgtatgtggaaggacggggggaggtgggtggaggtgaaaagagaaaaaaaaaaacactgaaatcaaagcctcgtgagacagttttgcactagaagcatggtgagagtcactcaccttccaaaagcagccgttccacgcgcaataatgtccccgaggtgcggagtgcacgccaggccagtccccctcaagcgctccctcctcctcaactgccttgtctagaaagatagtctcctgcagttctgcagttgctaccgctggccgggaaggtgtagattccgctttccctctgcgcacgcgcggctcccggcacaaaattctcttgaatcgaacttatttgcatacgggcgcgcgcacgttgcgggctgggagggggagaagtcccggcgaccgcgcgcgctcccgaggcctctattgtccttttaaggggagaagctccgcggcgcgggaaacgcggcggccagagggaaacgggggcggggactgcttactacggcggacgtcacataaacaaacgcccccccccccggctgcaggccgcggcggagagggagaggcgaggtgggaaagggaaaggttagcaactgaggggagggctgcgctgcttggcgtgttttccgcccccgaagttgttaggggcaccattgagcgctgaaaaattgttctgaaagctgcttttgcaaaattctcacacctgtccccactgtcggtgacagaggaggtggtcttgtaagcacccagactgaatttatactaatcccacgtttcctaaattttgtttgaagttaggtttttgaagcttgtaaaaaaaaaatcctctggggccagcaaaggtttagtttttgtgcagttgtaatgagtcgtttaataaagtcccattttaacaccctagccattcgctaactcccgcttgcccttctcaaatagtaacccaacccataacaatccagttttttcctccacttcggccttaagatttcaagtctctccgaattgaatgattgttaatttccgtgggaacagtgccgctttctttaaaagactaggcattggaaagccaataacctagggacaggcatacctcctctagcagcttgtaaagggtgttccactcacccagaaataattccagtaactggtggtcttgggaatggaaaaaataacgagtgacgtacagacttttcaatgcagaatatgtaataattcaacaatctaagcgctttctagactccggaagaaaaaaactgaagtaactcttctcagattgataagaggaaaatgaaaaccgaatgattgattcgcctttgtcccaaggacacacttaacaccaacaggcagaaacccggggttaatgatagagggtggggagagaggaaggatgtttttcccagaaacttgatattggtcccaagttacaaaagtgtgaaaatcaaccataaaacttaatcatctgctgacacgtttcgctgctttcactgcagtgtcaacaatacagatttaaatagttacttctgaaatgttaatttaattcaacaggcaattcctagtacatacagtataaacccacttctgaactcctcaactaatacttctttatttttctttaggttctgtaacatactattcctgtaactgtatatgaaaactatattataaatacctgaaaagatagcctggcgtggtggtgggcacctgtaatcccagctattcgggagcctgaggcaggagaatcgcttgaacctgggaggcggaggttgcagtgagcagagattgcgccactgcaccccagcctgggcgacagagcaagactgtctcaaaacaaaaacaaaaacaaaaacaaaaaacagaaagaaaaaggacacctctcattaaaatatgagctccttaaagacaaggattttatgcctttcttacccatctttgtattccagtgcctgacacagtgcacatcagataatatatactgacatcttgcatgcattagttggctaggaaaatttttttttaatgtaataaacggctgggcacagcgcctcacacctgtaatcctagcactttgggaggccaaggcaggcagatcacatgaggtcaggagttcgagaccagcctggccaacatggtgaaaacctgcctctgctaaaaatataaaaattagccgggcatggtggctcacccctgtaatcccagcactttgggaagccaaggcaagtggatcacctgaggtcaggagttcaagaccagcctggccaacatagtgaaaccctgtctctactaaaaataca

SEQ ID NO: 916199 - DNA, 4001 bp, Homo sapiens
ggggcttgttcctcctcatggctttgccctgacgtaattcaaacatggcaacagttcgacttcaaaggcgaacccacagacctcccagacacaggctcccgggccacgagaaaccggccgagcagtccgggccaagctccccggaaccctcggccgtcgcaacccccgacgccagggctgaagcgccgggcactgccgcctccctcggtcgcccgcccgcacgcccggagcggggaagcacgccgcctccctacgcaccagcatggcacctcgcacaagtagcgccgccaaagtttccccacgagggggctgagggacaaaagcccctcccgaaactcgcccgaacttcgagggcctccgacctgcacggccctacgcccaggcggcggccccgagcgccgggggcccgcacgggcacatgcagccctttgttttctgtccagccgggcgctgcctacgtgcagcatcagggatgtcggagcgtttcgcaggggccggacactggacgatcaccctgggtaggggtccggaccccgcgccccgaagagtccggagcctggccccccgaccctcccctcgggagcaggcccatttaatcaaagttttgcagtgtccttgatgagaaacgcccggagtatccgccccgcacgggcggagagttggcgactttcactctgctttttaaactggcaagacgccatcatcagcaaaccacattgtcctgccggccggacctgcccgacggcggccgcatcccacggctcacgcggggctggacattcggacaaggaccagggtcgcagcccgaagcacgtggtctgtcacgtagagcacaaaaagcagtgccctgcggagttcactgactcccgcggcgtacacaacgccgccgcctccatctccagccaagttggcttccctggccatcttacagcgcggacggccgcccataaacgggaagccctcgcggtgtcgcccacacctacgctacaggtgaacgcaccgggagcaaaacttcgggctccgaaagcaccccggacaccagaggctcttgggcgcggtccgaagagggcaggcgagtggaagacgggctgtttttaagcgaccgcgtgttgctctcattgtcgcatccgcatccctccggagttgagcaaacaacgccacgccgcgtgcgctccggcagagcccagcactgacccccaaaggccgatttaaagaccctcggccgccagctcggaagcggatggcaacttagtttccgagcgaatggcgtttattgtccaccctagtccgagggctgcagtcaactaaaccacgaggtttcacaacggcgcccgaccctgcccgcgcctcgcgcccacgcggacgcaccgaccccggccgctgcgcggtggccaacgagtcgctttcctctcgggcctttcggccgccgggctcctttccgcgagagaacactgcggcggagaaaagtcattgtcaccttcaacgtggatccctcaactccggcgactcctcaattatgcccaggctccactcacttccccgccccgagactttcggtttgcctcaaataccctccccaattaataaatacacactaaacacgagcgtaccaaagaacctggggtctgaagatcacgaaaacagcgctcccaacaatgccacctccaagacaaaacttcctgtgtgtatgtggaaggacggggggaggtgggtggaggtgaaaagagaaaaaaaaaaacactgaaatcaaagcctcgtgagacagttttgcactagaagcatggtgagagtcactcaccttccaaaagcagccgttccacgcgcaataatgtccccgaggtgcggagtgcacgccaggccagtccccctcaagcgctccctcctcctcaactgccttgtctagaaagatagtctcctgcagttctgcagttgctaccgctggccgggaaggtgtagattccgctttccctctgcgcacgcgcggctcccggcacaaaattctcttgaatcgaacttatttgcatacgggcgcgcgcacgttgcgggctgggagggggagaagtcccggcgaccgcgcgcgctcccgaggcctctattgtccttttaaggggagaagctccgcggcgcgggaaacgcggcggccagagggaaacgggggcggggactgcttactacggcggacgtcacataaacaaacgcccccccccccggctgcaggccgcggcggagagggagaggcgaggtgggaaagggaaaggttagcaactgaggggagggctgcgctgcttggcgtgttttccgcccccgaagttgttaggggcaccattgagcgctgaaaaattgttctgaaagctgcttttgcaaaattctcacacctgtccccactgtcggtgacagaggaggtggtcttgtaagcacccagactgaatttatactaatcccacgtttcctaaattttgtttgaagttaggtttttgaagcttgtaaaaaaaaaatcctctggggccagcaaaggtttagtttttgtgcagttgtaatgagtcgtttaataaagtcccattttaacaccctagccattcgctaactcccgcttgcccttctcaaatagtaacccaacccataacaatccagttttttcctccacttcggccttaagatttcaagtctctccgaattgaatgattgttaatttccgtgggaacagtgccgctttctttaaaagactaggcattggaaagccaataacctagggacaggcatacctcctctagcagcttgtaaagggtgttccactcacccagaaataattccagtaactggtggtcttgggaatggaaaaaataacgagtgacgtacagacttttcaatgcagaatatgtaataattcaacaatctaagcgctttctagactccggaagaaaaaaactgaagtaactcttctcagattgataagaggaaaatgaaaaccgaatgattgattcgcctttgtcccaaggacacacttaacaccaacaggcagaaacccggggttaatgatagagggtggggagagaggaaggatgtttttcccagaaacttgatattggtcccaagttacaaaagtgtgaaaatcaaccataaaacttaatcatctgctgacacgtttcgctgctttcactgcagtgtcaacaatacagatttaaatagttacttctgaaatgttaatttaattcaacaggcaattcctagtacatacagtataaacccacttctgaactcctcaactaatacttctttatttttctttaggttctgtaacatactattcctgtaactgtatatgaaaactatattataaatacctgaaaagatagcctggcgtggtggtgggcacctgtaatcccagctattcgggagcctgaggcaggagaatcgcttgaacctgggaggcggaggttgcagtgagcagagattgcgccactgcaccccagcctgggcgacagagcaagactgtctcaaaacaaaaacaaaaacaaaaacaaaaaacagaaagaaaaaggacacctctcattaaaatatgagctccttaaagacaaggattttatgcctttcttacccatctttgtattccagtgcctgacacagtgcacatcagataatatatactgacatcttgcatgcattagttggctaggaaaatttttttttaatgtaataaacggctgggcacagcgcctcacacctgtaatcctagcactttgggaggccaaggcaggcagatcacatgaggtcaggagttcgagaccagcctggccaacatggtgaaaacctgcctctgctaaaaatataaaaattagccgggcatggtggctcacccctgtaatcccagcactttgggaagccaaggcaagtggatcacctgaggtcaggagttcaagaccagcctggccaacatagtgaaaccctgtctctactaaaaatacaaaaattagtggggcatggtggcactcacctgtaatccc

SEQ ID NO: 916200 - DNA, 4001 bp, Homo sapiens
tactgctctctagggagaggccagtagcacttactgatatgcttgaagtacccttttaggacaagaatgtgcatgcagcccttgctataacaagattaagacatggaagcacccactaatagccatgctggctatacttcctcctggacctctgaaggctgcttttgccagtgctgtgtttctctcctgagtctgcagacttggttgcagccacatccatggtacctgtggtggtgcttactgtcatcactactgctgttgctaccctgccccttcatcaggcactataggttttatgactgcaggggtgtgtgaactcttgaacgtagtatatgtgggaggtatgttggattcatatctctattgtataatcacaataggtggacccaaacatttcagcattcatgtgaagtctactgattctgaattgctccttctcttcacaaaacttcatggcatatccctagggagagaacaaataagcaaagacagtgagaccagcaagatctcctttctcttcctataggtaaacaacaaaaagaaattattgcacaagtacacaaacatgttgtgttgccaccaatgtatataagtggcaattgcagggagacacgtcctacaacatatcagcctgcctaggtcatagtatgtgtttcagaatagactggtcaggatgctttggacagcattacaacattgatataaaatgaacagctgtggatataaaatgaagagttgctgacagctaagaaatctctgaaattcaggcttggagaaccctggagaagcactaggaacctcctcaatgtaccatggcctccaaatggaagctcatttggccttcagaccttccaaatgcaatgcatttcccaggtgagctgcagcaccaaaggctttacaggacctgtacctgctctcccccaaagcatccaggccccatctagtctctgcatagactcaccactgggctcctctgcacttcctccaacacagatgagtccaatgtgttcccagctaggatagccctggtatcactgtaagcctccactggtggtctcaggatgtaaacaaggttttcccagtgaacaaaaaggtcttcacttgcatccgatggaggacacagctgaagataaaaagagcggcccgtggcaagcttcaggtggagctgtttttttacgctgttgtggatggttattttcacaaacatcaagggaagcagcctggttagttctaagatctctgcaggcggactttctcttttctgggtggcaggaccacacctggcattgtcacagacagcagctggtcgggccagcagcatgacatcaggtagtgtgaggcaggggctggtgcgaacgatgcccattgttaccattcgggcacggttgtgcacgtcaatcacttctcctcttttgctgatctggataaagtcgctctcaaacatgggtgcatacctgaatatagtatactcgcctttgtacagttgccgctgcagcttccccatggaggtgttaaacatgcccattgcggggctgctttgggccgtgtaatacggtagcatacagcagtcctccatgtcttcctttaaatcaagacagttcccagcagctgctccacaccttccttaacatgctttagcgggcatcctgtttccttggctactctggcaggtgggccagcagtcgtgttctgcaggctttcttttttgtccccaagtgactgagaacagggagggtggggtattgattaccaaccgctcaatgccagagacagtcagtcccctggatccagactgtgccctgcttagtgcatggagctgtcaggagcacaggtgttggggccctcgtggatgtccgggcacacaggtgtcagtgctcattcgggagggacctccatttgagcctgatattccacttcacaacagcctttgctctttgattccacaaccttaactggcaatcccactgctcttcttcccaacctgaaccatccactgctgctaaaccaccccgcaggaccacttttatcctcccctacccattgtgacctgccccatcacacacccctttgtctctgtcacccagtagtccctgcctcagagcaggggcaccgccctctccaccccaccctcagccccaccgccctccacagctcagcagaccactaccccgccaccaacctaccatctagggaccttaatgcattctggcaaattgctttcaaaagggttagaggtaaattttctgtgcaaggcaagagtttaatatacattctctgtatactcatttatccagctcctctagttgtagacatttattttaaagagagaattggataaattggtaaacagattggtacaggatgtttatcaatgtttgttgtagagtaaaaaattataaacagcattagtgtcttacaataggggattgcttaaataaattatggagcttctgtgacgggacagtctgcagccctaaaaatgattacgtagttttcctatttattgacatgaaaagatatccctgacctttttttttcttaaagaataagagaaaaactgatttcaaactcatagtataggtgagattcaatttatgtaagaccacgtgtatgtgtttgtggatatggaattatgttcagtgaaatgtttaaagtgcttaggtataattttcattttctttttaacttctatttttattaggaaatttatttctgttaccaggggaaataactattttattggcaatgtatttttttttttctgtttctatagccatgataaattttatgttttgactcaccctcaaactgttgatgcaatttttgagttttacctagacattcataccctggctatggaatgaaaagagccttaaacatcacatttatgctctattctttaccatcagattgtattgagaaaaaaaaaagctgtaaagaattttgctaggtattgcaaatattttcaattcaataagattataatatctttattgaaatgacagtacacatgataacccatgtgaacacaaacacacacacacacacagagccatagccatagttgagtctttttttttttttttttttttttttttgagatggagtctcactctgtcacccgggctggaatcagtggcgtgatcttggctcactgcaacctccgcctcctgggttcaagtgattctcctgcatcagctttcctagtagctgggactacaggcgtgtgccaccacgcccggctaatttgtatttttagtagagatggggtttcaccatattgctcaggctggtctcgaactcctgacctcgtgattcgcccgccttggccccccaagtgctgggattacaggtgtgagccaccgtgcccagcccacttgagtctttagttgcataagtcaatgcaaacataatttcttcctttcatattgaaatgtttgattattttggatacttggagtatttttattttatttattgagatgcctattcacatatcaatagcactttttactgcccttcctaaagtctttatatcttaacttccacttcaagtctatgttacttatcttgtaattggcaaaaccaagaaaccaaatacacatttagtaaaataacgttttaaaagtgtccaagtggttctgatgtttttcataagggataacaggattggtagtattggacacagcaaaatttaatttaagtgccttttttttttttttttactgattttcttaaaagtacttttttgctatacacatatatgacaagatatttgtcttagagttccattagagcgctggtctccaaggaagccagaaactacattacttatagagcctatagatgtttggattttccacaccagtcagtagactgacaacggtggaacctctttcatttggcttgataaccatcctatgtagcattctggcaaatacctatttttatgaatttgatggggtttgtctgaaattcctctagctgtttagaaaactacc

SEQ ID NO: 916201 - DNA, 4001 bp, Homo sapiens
cagtacatttcttttcgcattcccaccttggtcttatcccacacatggagacggaaatgctttctcgttttctgttccaagaattactagtaacgagagcacaccctaccgcatcagcaagccccagtgtgatcgctttctttcggcctcctttgtctcttttcccccccacccctcagggattgcgtgaaacaaacaactgttcagtgaaactaacctgaaattacacgtctactttctttccccggctggcgctgagatgggcaggtgctggagcagccccgctggaagcgatgcagcatccaggaagacggaggaaggggcagagagggacctctgctttccaggctgccttttatactgcctctggtcacctgacgtggaacgtaccctaacctaatcagttacatgtaggttaattacaattaacttaatccaattacatgactcggaaaggtctatctgcacagcccactctaagatcatgtccactgctgacagacattctaaaacctacgtgtacagctgcaagctttgaagaatagatgttccccgtcagatatgtaacactggtgcctgtacccctgtcttcttttccatcttttttgtttttgtgttttgttttgttttaaaaaatgtggtaaaatagacaccttttaattggaccatatttactctatctcgacgtaggcctccgtgtcatcatggagattctccttgacatgcagtcacggccatgatccatcttcagagcttctctttcttccccacggtaggtctgtcagcagagaaccctgaccacacactcatgtgttttctcctccagaatgcgcttggaaaccaccgtgaattggagcgcactgggaaacacagatgaagaaagtcaacaccgctttgtccttcagtgcctggctcccttttcagctggtcttgagactccaggcattggagtccagggaggggcacgccgcctttaccttgtgcttcccacgatcttgtctccttaatccccactgcagctctctgccatagggtcttatactgctttacatgtgggaaactgaagctcagagggtttcacagcagggcagggagcccagatgtgaatctgtacataccaagctttctaatttttcagtagtttccaagcatctttttttttttcttgtttcttcattgatgtctttttttttttttttttttttttttgagacacagtctctgtcgcccaggctggggtgcagtggtgtgatctcagctcactgcaacctccgcgtctcacagtcaagcaattctcatgcctcagcctcccgagtagctgggactacaggtgcccactacacccagcttattttggtatttttagtagaaacagggtttcaccatgttggccaggctggtcttgaactcctgacctcaggtgatccacctgccttggcctcccaatatgctggaattattgatatgagccattgtgcccggtcatgtcattgttgccttaaccaagcctcttttaatttttcaaacggaagagcccctgtccctcagttactgctgctgagccctttcaagatgactcagtgaggagggggaaaagcagaagcggtgtgggaagaggcggggtctgggccagctgctggtcctgctctcctccctcctttggcctctaggctcccaggagtggtttggaacctgcgccgtgtgctctgggggctgtggcagggcaggggcggcttggaacctgcgccatgtgatctgggggctgtgtcagggcagcgggagtcctcgtgtcccctgcgcacaacacagacagaaggctgggtccacccagtgggcggtcgggtgccaggccagtgcttaccccgccatgttttcaagcccgaggccagctggctgcaggtgcagggctatgcgtcaggggtcagggtgcacacatccctgcaggtctcggggctcctgggttgcttctggaagggcccggatggggcctgactggagctgccgaggggtggagcttctgggaaaaggatccctcctagggggagtgtcttgggcctggggccacgtggcacggagagagacgggtccatggcagtgtctgcttttctctgtgaaggcaaagggcctctgagggagtattacagccgcctcatccaccagaagcatttccagcacatccaggtctgcaccccctggctggagggccgaggactacccccgcttctaggtgagaggccagcaggaggctcagggaggacgcggggccttaagcagggggaacaggggtgggcaggatgtacttttttcagaaaaggtggctctggaggccacttggggacaggacctgggctctagctgaactcccgggaggaggctacttcctggtgtgccagcccctccctgccaggtggccccagaggccctttaccaaggggtttgaggaggccacgtcctttcagtctgccacgccctccattcagtcctcttccttcctgcaggagggctgggcctggggttggggccactgttgcccaggtgtgggagggcagtggctttgggaggtacagggacgatgtgtcaaacagcgtcgcctctcccagtgcgatggttctcctttgcctccgtctctttccgcgttgatttctccaagtggggagtcgtggcttggtcctgatgcgtctctagagccgcatcttccagcttcgagtgagcagagcagttggagtctgagggccttttcctggcaggattctccagctagtctttgttttagacagtcttgctccgttgcctaggctggagtgcacgatctcagttcatgcaacctccgcctcctgggttcaagcgattcacccacctcagcctcccaagtagattacaggattacaggagcccgccacaacacctggcttatttttgtatttttagcagagacagggtttcaccatgttggccaggctggtcttgaactcctgacctcaagtgatcctctcgccttggcctccctaagtgctgagattccaggcctgacccatcatgcctagccccagctagtctttagaaatgttaagctatttggctttattttcacactgacagctggtttgtggtgggtgtgatgtggtttattattattattattattattattattattttgagacggagtttcgctcttgttattattattattattattattattattattattattattattttgagacggagtttcgctcttgtagcccaggctggagtgcaatggcgcgatcttggctcactgcaacctctgccttcccgggttcaagcgattctcctgcctcagcctcctgagtagctgggattacaggcacctgccacgaattagcttcgctaattttgtatttttttttagtagagatggggtttcaccatgttggccgggctggtcttgaactcctgacctcaggtgatccacccgccttggcctcccaaaatgctgggattacaggcgggaggtgaacctgggaggtgaaggttgcagggagctgagattgtgccactgcactccagcctgggtgacagagtgacactctgtctcaaaacaaaacaaaacaacaacaacaaaaaacaaattgtggctatgtagaaaaagtgtcaacttacattttcagatgtcccacccaggccgtgtggctgcttggccaccttaagccacttgtgcttggggttgtcggggaccttatccaattttcactcccctcgggggaagttgtctcactgtgctgggaggatttgtgttcccagggcagagaccagcgctctgacccacccctcttgcctagcagggttagtggacctgggtgtctctctggacacatcctccagtggcctggacctgcccatgaaggtggtggacatgttcaggtgctgtttgcctgcgtgtgccgtgaacttcaagtggtaggagcagaaccccaatctttctggggatagcttcacagatccaccactgaggg

SEQ ID NO: 916202 - DNA, 4001 bp, Homo sapiens
ttttatttattttcaacctctccctcttcctctgtaactggatgtcacattttagcttcctttaaggaaagcatattttcatttactttaatttctctaatagctgtatgatttaccaactcatggtgatttacatctcttttatagataattatagcccaatgttagaaataggagtaagtgaggaatttgttaatacagcaggggcagaagcagccctcagaattaggaaaagagtactgtaaagacgtggatcctgagaaatactaccgatgaaatattgacacacgcgtcggcctggtaaaaacctcatgcccatctcctagaagtctcacacacaaatatcccttctgcggaaatgcctgctcttgcagtttaggtggctgccttaagtttttatttagtcccttgcccccctttctaaattttggactaactacacctgtcagtcaaatctccagctcttataaatgggaatatacagagatgggtaattgaaaccacggggtaattctcaaatttccatttgcccagtgtcaaatttctctcaacctagcaaacagaaaagcacgatctacctgaattccctggtcacttttctgaccctactctgtccttgctcatcacataatgggggcactttacgtgattcaacgagtggccaaactcttgcagatccagcgataaccttggttgctcacaccacataactcaaccgtggaagaaatggtgccaccgctggcaggtgagacgccttcctctggtttgtaggatacgattgggcatgaattgttttaatagactgagactgccccgcgggtaattctacttgctaggagtgttgagcagccttcctgcaagccatctactccagttgggagtctgctggcacctgctcccctgcacacccccaggatgcccaggccgcaggaagatgtctaaaacttcctacaggggcaaagcccgccctggcctcaccagtcgccccagcgcgcgtcagccacgaccccggcgaggcccaggtgggagggtagggacgtgcgcagcctggggtggggctgggggctggcgaggacctgctccggggaccaggactgggcgccctggcggtcccaggcaccgggaggggacctaggaccgctgccgtttcacacgtggccccggcattttcgcgctctctccaggaatagccccaagggcccaggaggcctgggtgggactcggccccgcgcctctcttcccgggtccccagtccccaaggcgcggccccccacattaaccttgctgggtccttcccggctttctgccctttgcaacccccgcgcgccccaccttggcgggctccgccgacgccaaccgcgcgtaaacggccggtgacgattggggtgcagccgggggcagcttcagggggcagagcctccgcaaatgcttctctcctcccacccggcctcacacccaccctcctcgaggtcccgccgggaaccgccccgccctgcgaacccagccgagccctccctcctgggccacccccagtccggtctctgcttttggagcgcgtgggctctgcgagcgccagggctggggaccctggaatacctgttcctccagcacgaggatggggtccaactagtggtcctctaaatcctgctccttccccgaggctacgggaagcgctccagccacaaggaaacggctccagtctttcggctcccaaacgtgacactctatatatccggctcggagactgggtgtggggcgggaggaaaccaccctccctccgaccttccccggctccgccgctgcctcggcactgggcgcgaaaccggcggcagcctcagcccggggcgggaggagggtgaggggccagcgaaggccctacaggtcgcgggggcgacagcatcgtgggcagggcggccgcgcgcgcaggcccgccccgcgcttccattcgttcagcaccagcggatccactggctatgactcccgcatttgtgtggtttgggggaggggagttggttttggtttcggtgggtttggtttgtttgtttgtttggggcttttgttttgttttgttttgggttttggggttggtttttttctccattttttaatcagtgggcgaggggacaaggaagctagaaaggcgcccctctctggtgtgggaaaggagaactcccacaccgtgaaaggtggcggggtaggggggtggagggagagaccgagacaggagagagattcaaaggttctagtctgaactgaacgcttgggggacatacctttccccacccaccctagcagaaaaggcagccaaaaatcccagtttactcagcttgactacactgcacatcccgtgggagggatgctcttgtatctgctaaagacattgcggaggcgccctgcagtgacccacgaacgcagtggctttttaaaacccaagggcgtgagggtggagggtgatgcgaggacttcaggtgaggcttcctcacactcggggtttgaagggcagaaatccggctctgcctgcctatggtggggtgggggtgggtaggagactagaaaggatcagagatgggggccgcagaaacagcagtgagccagctgtgctcagcagcacttctccggacttaaaagaaaaaaagatgtttcatttcttagcctggtagcttttttgggatttggtcattgttaaattttaaacggaaaaacaagctgccagggaagccttgtagagggatggacaggcacgtgagtggagcccttggcctcaaccaggaagtgctgaaaaacggccaacgcccatcctaattccctggacaatgtaggaggtaaatttccaaataaatatggtgtgttaagaaaaatagaaaagaaatattgtcctataagctgttctgattctcctcattataacaatccacatgcaattaaagaaataaaatttgacttttgaaagttagaattaaggagtgatttcatgaaattaaaataataacacccatcttgaattctctactactgggctctttaatgaaatgtgttaagctaagtgtagcctaaaggcactgactaatttcctctggtgaccgcctgaatgcaagagacagaaaaaaagttacaaccaaatttatagtatttttcgttacccctcccctcctcaagaataaatttgaatgtatcttcaaaatgtgtgtgacagcacttcaaatgataatgtcaaatgctggtgaaaacgtatagaaatcacttaacagatagcagatggaaggtaaattgtaatcacgcttttgttggaaagcaatttagcaacacattcccaaggtgttcagtaacgaaattttttcttgttctggacctagattcccatgtcttacaatgtattcaaaggagataatccataaaagagaaatgccgcatgtacatagttgcatatttattaccgagttgtttataaagtaggaaattaaaagcatactttcagtgggatgttcatagataaaatacaacattaattatagattacaaaaccacaatttgattatcaccatttaaaacgctattcatatatgtagaatgtattagtttgctaaggctgtcataaggatgcacataaactgggtggattaaactatagaaatgtattatttcataattctggaggctagaagaccaagatcaagatgtctgcagggttggttccttatgagggctttgagagagaattttccatgatgcttacctacttccagtggtttcttgttggcttgtagacacatgacccctgtctcctataatcttcatatggcattctccctatgttcatgtctgtgtcaaaatttatcctttataaagataccagtcatatatgatttagagctcaccttaatggcctcattttaactttactaattaaatttgcaacaaccctatttcccaataaggtcacattctagagtactgggagttaggacttcaatatgtgaaactggcaggggcggagaagaacg

SEQ ID NO: 916203 - DNA, 4001 bp, Homo sapiens
gatccttctttgaggtgtactctgactagaaatagtattacagagcttattccagagcaccttcatccaattttcccactggaaaaaaatatgcgaattttttagagcattatgtaattggtactgtcttgtaactgtaagctttgatcaacaacaacaacaataataatatagtaatagtaacaacaatagctaacactttttgtgccaggccttctgctaggggcttcacatgtattatcccatttaacctttacaataatcttaaaaggcagacctcattattacagataagacaactgaggctcaaagaagttaaacaaattgtctaaacgttctttatttacaaagttaactaactgcttttcatattatttatttatttattgagacagggtctcactctgccacccagattggagtacagtggcaccattacaggtcactggagcctcgacctcccaggctcaagtgatcctctcacctcagtctcccaagtagctaggactacgagagtgcaccaccacacctggctaattcttttactttttgcagagatggcatcttgctatgttgccaaggctggtctcaaacttgtggcctcaagtttggaggcctcaagtgggaggcacctgtcttggcctcccaaggtgttaggattacaggtctgagtcactacactcggctctaactacttgtgaattcatgttatttttatatgcctttgcctcaaggaaggatacaaggcaattaatattcacttgggaactcttcaactgttccatataatcatgcatatttcatattattgcagtaattccatttgcaatttaaatacactattatctttttaaaacattacatacgtctaataagtcactgctttggtatgtatagaatttgaacatgtcccatagagaagccagatgaagaaaaagaaacaagtaaaatgtttgtggaatgaaggccctgttccagttcgcccatacccagcagaatagaaccatcggccttctgagtactttgaagttgattatttaatgaaaagcaaaaggcaaaaatctatagtcagggacaagatggaatgtataatctctgctgtaagtacaaaaattaagttttgtgttttaattgattttcctaggcaaattcaataaaatgatcaaatgcaattaaagtatcatattcttccctggagctctcaagttccctgctactttaatctatgtttgaatcctatatgaaaagccttagactataaatatgcacgaggtatgccaaagtgacacttggtgatacagaaacttactgcagaattgaatttcagagactggaaacaactgtcttcctccatccatccttccaaccccctcaaccccaaaaagttcagcatttcatttcatgcagtcatagtgaacttggtcagtttttcttcactcaaatgcttcaacaacttgcaacaattatttggcttggacttcacagcacaaggtgaaccaagtacttatttttaaccaatgtagaccagatttcttgattctgcttcacagaaaattagtcatcgatttcttaggataaatgagttctgctgatctacagtgcagaccaaggaaaagtgtaaatgaggtaaaaagaccagtctctcaccctaagattcattcagtttgtcactcctgtgaataacgttagcaacagctgagactgcatttgttgcttggttttctcttacctttttgtctagtttctctggcttcaggttcctctatgaccagaatacgagctgagcagacaatgtagcagaaaaatttaaattacttctaaagagcaatgagaggggctctcacagtatcccaagaccagcagcttttcagaagaaccttcagaagaatggttcatcacactattatatccccatgcctgaagtgcagctcaccccaagctgaattgaaaggctctgtgggctgagcttaccagggacaactgcaatcatctttgtattgtgaaatccaagtaatgtgttctagtcctaaaatgttgtcactgcagccctcagcatgacagagtttgagaaacgtaatttggttatctctatggtgatcagaaatggagtatccagtccttttgttaattcattcgatcagccatttacccaacaacaaaaattattgatgacctgctaaatactgcactatgttttagagattaaaagtgctgaagatgaagaatatgacacagtatatggacttccacaaatgaatgtcatcccaattctcctacctacctcccagttttatgtgtttgctcagagaaaggaaggagaagagatttacagaagtaggaatgcactgtagtaaacacatcatctcaaaagttatagtgctaggttccaatcacaaacctgacatattataattgagtaacttcagacaagctttgaaactgctatgtgtctcagtttctctgtctgtaatcctgggatggggctagtaatagtacttccctacagactgttagtaatacctcccaatagactgttgggaggactaagagattaaaccatgcaaatgattcaggacagtacctggcaaatactaagcacaatataaatactacaaatattttcattaccctctgagtttaatcagatttcctagaattcatttggaccaaattgtcagtgtgtgtgcaattctgctagataattttgttcttatgaagacagctggcgtcagttacctataatgtcattatgagtaatgatggagcttattttccaggtctagaaaagaacttgtaaagtacatatagcattctaaattggtccttattagtgggtgaattcaaatttgaaagattaacaaagacaaagacttcctctttgacccaactttagtcaggctcctcttctgaactaagccttgacattgacctcctgaaccctgctttagcaaagaatcctattaagccagtttattgagaattctcctcactcttgatatctagagtgatatcaaggtgtcccatgaagaatccagatgaagaaaaagaaacaggtaaaatatcactctagatatcaagagtgaggagaattcctctcctcctacccccttccttgataccttaagcaagttcctcatagtaactgtccattttctctcctactctaaatccccacttgtccctatttgtatttggagttgaattcactctctctcccctagtgcaatagtcttgacccctattgcaatagtcttgaataaaatctttcttgacacttaaaaaatgtgtttgaataatttctctttaacaatcaaaacaatgaaatatcactatgattgaaacattagtaagtctctacacaaggcaatggggacaagttcaaatagattggaagagtatgtaatgctcagagaccgattttcttataacagtgagtgatgaatgtgaagagtggtcgatcataaaagaaaatttgggccaggcacagtggctcatgcctgtaatcctagcactttgggaggccgaggcgggcagatcactcgaggtcaggagtttgaaaccagcctgcccaacatggtgaaacccgtctctactaaaaatacaaaaaaattagctgggtgtggtagtgggcacctgtaatcccagctacttgggaggctgagacaggagaattgcttgaacctgggaggcggaggttgtagtgggccaagatcatgccactgtattccagtctgggtgacagagcgagactccgtctcaaaaaaaaaagcaagtttggaaaatttgaagcaattctctgagcagcatctgtaattgtatttcccattaaaaataaaaggtttaaagtcaactcaggatgaccctaaagcgagctcattttctaaaattggtggtaataataatgatatatcattcttacgtatatagcatcatgcctggctgcaggattaaattgggggagaaaactggctttgagatagaccatttagcaggaaataaag

SEQ ID NO: 916204 - DNA, 4001 bp, Homo sapiens
cctgagtacagttcatctcctcactcagattcctgacacacgcatctggggcactttctacacatcgagctcttcccggcaccagaccccataggagacacacaggacagcacagtgtctgctctctttcagcttacaagttcttgtgggagacgaaaatggagagcaaagacattctaaaacagctttgcagagtggggatgacaaaaagaaggtgggcaacgtcgacgggggtggggggcaccacttcagaggagtctgaggtgacgtttttgcaaagacacaatggcaccaaacataaagcagacagagaacggcagggtacaagggctgacccgctcggagcagtgaggaagccgcggttagggacccaggaggtgcaggtgggtggcgacagctctggaaagtgggcatcctcgtggtctcagctgcagtgcaggagccgagcgcagggcctggcttgcagtattgctcagtacacgtacagtctgtgtcattatcaccactgagagggcagaagacagccccagggccatcccgtcccagcacagagcaatggcgtgtgccagccctggagccatctaataatgtgcaggacagaggatggccagcctgtgtgatgagcctggccaccacccaccccgtcctgggcccacaggagccccagctctgtccgtgcacttgggacacgaagccccagctctgactgtgcactcgggacacgatgcggcacctgttctggggccacttccctggccaccggccctgacccaaggctctctacagtccccagagtttggatgagaacttgaagaggacttgctgcttcaggggcctgcagtaggcatctccccttttcccaaagctcagcttctgagactgggggatcccaggccatgggctcccaagcccctggaaaagtgagaggggttggaaatggggtgattctgggagtcaaagtccagcagatgagggtcccccaaagtaagtgctgcacggggcacacctcgctgggcgggtctcggccctggtgcagggcaacttgctagcattcctgcccatgccagtcctggggagacagcgcctgccccaactctcagacagcatttaatttccttctctgctcagctgagttcatgtaagaggagcagtatttgctcagcaaatactgtccgtcagccagacaagcaatatttttggccaatctattaaccatgcagcaggcagcagtcaccaagaggggtcttgagattaaccctccttctccccttctcagcagagccctcgaagggaggagggaacgggatggcccgcggagtatccattttatcaccacctccctaagatccagcactgctccctagcacgtcctgaaccaggcagagcgatatgctggccacagaaacacaactgataaaaggccgacggtgctgtcagacagcccccaatttcgaagcgtagatttttttgcctctgcaacttaaaacgtccccaaacccacccgacgctgctgggtcttccagatgcgacggtctgggcgagcggtgggcacccagggtccctggaacgggtaccaagtggccggggcttccctcagggctgcccacggcgcgggcggtcgcaagcccaggggtcccgggatcgcccgacgcgtcaactccgggccccgttctcgcctcaacgcctgcgaagccgcacccgtccacctacctccagggcctccagggtgctgaagctggcgatggcgaagccgtcgatgacctcctcctcctgcgagctggactcgcggcggcggcggcgcgggggacgcgcggtgcggggcgcgggggcggcgcctcgggggggcgcgccgcggaggcccgcgttctccttgccggggctgggctcgggctcgtcgcccgacgacggactctgggcgcgggcgtcgcgggcggcctcccggcgccggccacggtcccgctgcgcgcgcgagcgccggctcgggcggaccttggcctccatggccgcgcgtgcgccccgtcgggccggtgaccttgacgccccgcgcctggctcgcagcaggcgggctccctcggctacgcggcgccgccgggctgagtgtgcgccgcgcgggctcgggccctgggcggcggcgggcggcgggccgggccgggcatgccgggcgcggggggcggctcagccccgggcccggcgcggcctgggacccccggcgcgggcggctgggcgcatcggcgggggcgggcccggcgctcagcggccctcggccgcccccccgggggcgcgccccatgcgcgcggcgcggcgatcgggccgagcgggcggggccgggcgggcgcggcaggcggcaggcgggaggcggccgggctcctgggcaccgggctcgtgaggcggcggcggcgccccgaacagataacaactgacgcacttccgcccggctgcgctcgccagaggaagtgagggccgccgcgggcgcccgcgcgccccgccccgaccacgcccctgccccgccccgctcataaggctccgcccccaccccgcacacgcggcccgccccgctcacaaggctccggcccctccccgccccattcacgcaggccccgccccccgcaggctccgccccctccccgacccgctcacgcaggccccggccccgcccctcccgggcgctcccgctaattcaggccccgccccacccgcaggtgcccgcccttcgacctcgccccctagccgcgcccctccccggcgccccgacctccgctgcagccggcggtgatccgctcggctccttcctgggagggcgctgggatgccgcggcccctccgtgggcacctgcgggcggcgctctccaagcgggaggcgggggcagcgccgccctcctctgcgggactggggtccccggccgcgggcggcttccgaggaggacgaggggcctccggtctcgcggaaccgaagtcctgccctcggcgagcgtggaagggacggggaaggggcggggaggaccgggggagggtcctcggccaggcggtgccccctccccgcgtccccgcggaccctcccaggcctcctaggatgcgggaggggtctgtccgcgtccccgccccgcgccacgtgcccccaagtcccacaagaaggcggctcccgccaccgagacccccgggaacgcgcccagcgaggcgggggctgctgccagacacggagcgcagtgtggagggcggcgcgggcaggaagcgcacggaggcggctgcggttgcgaggcaggcgcggggcgaacttcctcctccacccccaggacaggccgagctcggaggggcccgcctggtggggttttctgagcccaggggccccttgcgcgtgggcactggagtcattgattcatgcagcgcgtatttgccagatgcctcctgtgtccaggctctgttggtgaccccgcagcggctgagatagactaccctcttagaagtgggagagagaccctgaacacagggccaaatagaatatcagccaaggataatctgaagaaaatcgaacggggaggtgtcacagagagtgggcattgggtggtccagagggcctccccgaggagtgacgactccgagccccagcagtcatgggcaccctgtttcaggtcggggctacacccctgcacaggccctcggagaagaatggtggtttgctggagggcggaggggagggtgcccaagacagtggtgggaccctgccctcggttgcccttagtgggaacgggtcctcgcccactctgcggggtccactttaccctgcctctgggagagcctactggcggcctcttgtgcagggcaggaagggtgtggtccaggcaccactggctgtttgctgggctgaggcagttgggaaagtagctcactggggtggggggacttcctgttcacccagcctcctccagtccacccagcccgctctctggttccctgtcaaagcctccccagggtgggggcagggtccccctccccctcttcccattc

SEQ ID NO: 916205 - DNA, 4001 bp, Homo sapiens
aacgaggtagccagacatatatatgtatatatatatatatataatttatatatatataatatatagaatatattcagcagaaaaaaggaccatgatttcaaattttttccaaaaaaaaatttttaaacaggaaagaagattaagaacatgaaatgagcatgaatagcagagtactgtaagaggaggagtgatgagaagagactgggattagttacaaagtggaagggtgaaaaggcctttgtagctgggtttgctttttatacatttcaaaataaaaaccagatcacagtattcaaatgaaagctgaagtgaaagcagacattttcctcaactccccagggttgaaaagaccagtcactccccacccccatttccagtcacagcagtggggatacagtagctgaatcagtcctccaccccctgcaggggagtgggtgggtaagcagcagagtccatctctccatccgcggggaaaaggagctgggagtagggtagggtaggaaccccagctgcaaagagaatgggctggaagccgggagggggctggaggagggaggaggaaacgagcctgaggcttctgtcatagccccatctcatccgctgcaatgatctgtgcgtaagtgtgcgtgtgagtgtgtgggggcggtggtaatgggaggatgaacagggcgggacaaggggagctggtgctgccgccctcacctgaccttctcactgtccgtcatctgccagagtcccaggttgagtaccttgaggcacggcagctgcgtgatgcgctccaggccgcgcttggtgattcgggtgcagccgtacaggtctatgccggtgagttggctcaggtgctcagcgatcagctccaggcccttgtccgtgatgcgcacacactgtccaatgttgagcgtgcgcagcccgtgcatctgccgcaccatgcggttgatgccatcatcactgatgtggcaggagcagagggagagagacttgaggccatccagcccctgggctatgtaagccagactctggtctcccaccttgtcacagaacgaaacatccagccccgagaggcgcaggctgcccatggccagatgcatgatgcccgtgtcactgatgttgtcacaggagcgcaggttgaggctgcgcaggctgcccatgtgcgacaggtgcaggaggccagcgtccgagattcccccacagaagctgaggttgaggagcctcaggcccgtcagccctcgggagatgtgctttagagaaagatctgtgagcttctggcagtcctgtagcgtgagctgctccaggcccaggcagccctccgccgcgctgcgcgtcatgccggccaggtgcccgatgcccacatccgaaaggtggcggcagctgcggaggttaaggctcttgaggcgctgcagaccccaggcgatgagcagaaggccagtgttggtgatgttgctgcaacctcccagctccagcacctccaggcccttgaggtactgggctatgcggcccaggctgctgtcagtgatctgcttgcagaggctcaggttgagagcgcgcagggagccgatctcctgcacaaacgcgtggcccagcccgttgtcggtgaggttgtagcagccgctgaggttgaggctctcgatgttggccatgccctggatcacgtagctgaggctgcggcggaggctcaggatctgcacccggcggatgccccgggcctgcaggctggggaacagcgacgggttggcccggcgcaggtgcagcttggcctccaccccccgccacaccgacttgtggtaggcggcgtcccgccaggcggtgcacacctgcgccgcgcgccccttgtcccggacgtccaggtagccgaagatcatggccagcagctccgggaacaggcatgagatgtgggtctccatcttcctcctcccccctccgcggcgctggggggaggaggcgcgggccccgccgctccggcctcgggcaggcgacgagagcgcttctccccagccgccgccgccgccgccgccgccgcctcgggcccaacggccggcccctccccgccttccggctccggccgccgccgccgctcctcctcctggtccgtccgtccttccttcctgccggctgcgcctccggcccggccctcccccgccccgggctccgcacggcgctcacatcccgggcggggaaggcgcctcgctctcgctcccggaggccggccgccgccgccgcctcggctctacccacgccgcgcccgggccgcgccgctccgcccgcgccgccgcgcccacgccccctgccgcatcctccgcctcctgccgccgccgctgctccgcgggccggcgggcggcgagggggccccgggggccgggcgcacgggctccgggcgcggaggaggcttcctgctgcctttgtctctcgcccgcttttcaaacctcccagccccgggccgcccgcactccgccgcccaggcggggggaccaggaggccaatcccggccggcggcgtgcgttccttctcccccgccgtccgcggccacttgggagctgccggcccccgcaccaaggacgccgcggccgtccggccggagcgcggctcggcgcagaccccgggcgagcaggcgggccgtgcgtttggtagcgcccgggccggccccggctccgccgccctgcagcgcgtcccctccgccgctcccgctcccccgcgcccgcgcaatggtacgggcctgcgctgccggaactgtggagccgttgccctggaaaccgagttcggcctggtcccgtggcccctgatttttaaccctgtgggcgccacgggggagcggcagctgtcagcagagcgcctccccacccggcttcttttcacccggtagcccgttattgagccgttccctctctgggccacgccccagccccgttccttctttttctttgctgttgaagtctgcgcagccccttcccacagtttacccctgcaattcgttacccttatttcacacccctctcccttgattatccctgcgagagccgcctcctatagcagtgctcaataatcgtcaccccaactctccttttcttactgtccctaatgccccttaacgcctcattatcacaccccctgctcccccggttggggctgtttactacgacgcctttctctccagtcttgtgtcttaaattggagagaaactcggctgtactcatcttaaacaatgaccccctccagtcggtgttctagaaatttctagaattatccatgactacttccttctagcatcttctgatggtttccagacacgctgtgtgtgtttccctcggtacttgatacatcaaaacttccctctacttctgaacgctgctgcgccaccaatgccctcagtccgctttgcttacaggggaacagccttcccctaagccttgttttaggagctttctccttgtcatcagccttagactatcagttgtatggctcagttgtactgatagtcaatatattcgtatatgctgaatccaatttactttttgattaaaatggaatgacagttgaacttggtttaagacaatccagtcgtgtctgttggtttatcaaccgttttatggaagcagggcacaattccattctaggatgtagcccctgggtcctaaatgtccgtactaaggatagaatttcagaagtttcattttaactacccccaaaccaagaatttttggatcagagaaaatgatcctctgtattttaatttatggatccacacaactagatacaagaccagcggatttatcagaaagggaaaatggtttcattgattctttgaggacctgaacaagatttggaaggggttccatattcagtgtaggagagtaacttttgcccaagcaaccactattagaccaaatacatacagattcagtaataggcataatacaccttttacacccctaccactcctctttcctaaatcaggaaatgcagaagcaaaaattctcgccagcttgttacctcacccacattacacg

SEQ ID NO: 916206 - DNA, 4001 bp, Homo sapiens
gattgcgccactgcactccagccggggagacaaagcaagactctgtctcaaaaaaagaaaaaagaaagaaacttccatgagacattttgaggaaagaaaaaaagaaaacaaaacaaaacaaaacaaaaaaaacccaccatgtatttctgcaatacttaaaaaaaaaaaaaaacccaaaaacttttcagggataatgaatgcaagacaattcatttcagggagtaataactctgatttataggtagcttttaatcctctgttaccttaacaaataatgcagttcactactgggtagaacctgcaaagccagagagaagaaccacattaatttcgtcaacccttctgggaaaacaaccgggagaaatttacagtgttcaatcattgatgattccccaaataacggaggggttgcaaaaaaaatccgttgaacccatttgagaaataatgctgatctggactccgtctacattgtgctgcgtgggtccctccctgctccctccacccccactctctctctggctttagaaaagtaaagctggcacagacaaatggcttcgtgttgttggataggaggaaaaggacacaatgactcttgcagccatctaagtgagtaagggattgtgagagcattgaaaagggagatacgaaaagagctggatgagctcatgcctgcagacccagacacatacaccagcaagccaaagcttagagccacatcaacagatccttacgtgctctgaaaagaacctctttgagaacgaggctacaatcttccgcgcttctaacccagctttttgccgaactttatactcttccaaccaattgacgtagtcggtggggctgtagtgtttcataagggaaggccacctacgaggagagaaacaccccctcagcttaacagaaactcaaaggcaggcggccacgaatccaaggcagccttggaaacagggacagcagtggcgtccagtggtaagagggaccccggcgagagacctagttcaaaaccccaccagcattcactcactcactcccggtgtgaccttggcgtagcggcatgaatgatgtctccattccccatctctaaaatggggacagttgtaacaacaacaacaataataataatgacaatgacagtgagcactgattgagcgcctcctaggagccggggccctgcgtgcgtgcctcccggacatcatctaatttaataaacacggtgaaaggtaggtctaatgatcaccaccactcaaagtctatgaacgaggctcaaaaaaagggaagtcgctccccccaaggtcacagagggagtgtgcagggccagatttcatcctggggccacgctgaaatctgtgccgtccacaaccagcccggggatgctgcgcccgcccgatcgatgcatcactgggtccatgtaaacatttcagcccgaagtcgggcacaaaagaagcgcgcaaaagggacgagccgcgccgccgccagcgtcacccttgacggaggacccggctgcgaggcgctcctagatgcgccatttggggacccgggggtccgcctggcgtggccccgcagggtccggggcctggaggcctttgtctgtctgtccgcgggaaggggtccggggtggggtccgcgcgcggggcggccgcggggagctagcggggcggctgcccggccccggggggcgcggggcggtgggcgcgcagccggggcgcggggccgctggctcacctcacccggaactgctccttccacaccttcccgctgctctggcacagctcgcgcagccgccggcaggtgctggagacacggccgatgtcggcggccgtcagcgagccgcagcacaggatgtactccagcacctcacccggcaggttgacgaggcagctgaggcccgctacctccggcgcggcctcctccgccagcgccggcaccacctccatcgcgctgtcgactgctgccgccgccatcttgtccgcgtacctggggccgccgcgcgcgcgcgtgcgagagtgcccgggcgccccgcctggccccgcctactggtcttgggggcgagtcctgagatcgctccgcccatccgcgggccacacctcccctgcatcggctgggggctgcgcgggtggcagcgccgcaaaagggaggacataattgggctctgtgcttggagccggcagcgcaagccgcctctagtccgggacaacaatagtagcactgattcttttaaacgtaattaatgtttaaaattaacaaataaaaatggtatctattctcacgcgtgctgagcgctttctgtgcgcattggacctttccgaattaccctgcgaactttctccccatattacagatggggaaacaggttcggagagtgagagggcttgctcaggatcccttgtcttggattttttttccccctttgggaaggagtcttgctctcacccaggctggagggcagtggcgctatctcggctcactgcaacctctgcctcctgggttcaagcgattctcctgcctcagcctcccgtgcggatgggattacaggcgcgcgccaccacccaggttggagtgcagtggccgtgatctcggctcactgcaacttccacctccctggttcaagcaattatcctgcgtcagcctcccgagtagctgggattacaggcgcccgccaccacagccagctaatttttgtatttttagtagagacagggtttcaccatgttggtcaggctggtctcgaactcctgacctcaaatgatccacccacctcggcctcccaaagtgctgggattacaggcgtgagccaccgcgcccagccccttgtcttggattctatttcagatccacttgacttttgcttgtcagtaatcttaaccatatgatgtaataataacaatattcttgagtgggtgctatgggaagccctctatgatggtgtaggggagtaataataatcctcaaatgtgtgccctgattttaggctaatagagggcaggcagagagctctcctgtactggtttcttaattgtttccagctcaacaatccttcatatttggggagcatagtctgacctcccacaataggtaccacagttatacctattctacagaaaaggcaaagttcttccaggtggcagtcactggttcaaagttacagagacaaaagtgctaaagcctggatttgagtcttcaaagcgggagttatcactcaggattgggagggtagtctcaggatctgcacattaaaaaaaaaaaatcagtttagttcagtgccaaagccctgtgttgtgtgccctggggatacaggggtgagaaaaatggagtctttgcttcaaaacctcaaagtgcaattacagttagaaggatctgttgtcagtacatggagggtccaatgaagtactcctggcaacttggaaatcaagatgccctgagagagctgaactagtaaagtgactctcaatggatggcgttgagccatctgtggctccctatttcccgtagaaatgaatgtgacatcccaaacattgttgcaaagcaacaaactccacctcttcttacctatctgaagtctttctctctcactagccatgcataccccagcaaggctggtcatctctttcctcccatttctggccctacatatactattcctgctgcctgcaaggcacttcatgcagtcctccccttccagtagctcctcctcttcctccagggctcagcttaacctttccaaatgctctcccttcccccgccccagcaccagcaccagatatggctcctgcccagcattttgcagtcttgtaattacttaacttacaactattcaacatgcatctttcccactaaatctgaagggagttcagtgctaggactgtgtctgagtcacctctagaagcctagttacttgacccatgccctgcacagagcagattctcaattatctattgattgcgatagtctaaccagctgtttgactagggaagttacttagcctttctgaggcccagtttttt

SEQ ID NO: 916207 - DNA, 4001 bp, Homo sapiens
ttcttcatttgtaaaaggagagttaaaatctacctcacaggattgttatattcgaattagggcagagcacaggactaaacacttggtaaaaactcaaatagtagctattaatgctatttgagtaaactacatattacataaaataataggccattatttcttgaaacagcttgccacttaaaagaattattctcggccgggcgcggtggctcacgcctgtaatcccagcacttagggaggccgaggcgggcggatcacgaggtcaggagatcgagaccatcctggctaacacagtgaaaccccatctctactaaaaatacaaaaagaaattagccgggcgtggtggtgggcgcctgttagtcccagctactggggaggctgaggcaggagaatggcgtgaacctaggaggcggaacttgcagtgagccgagatcgcgccactgcaactccagcctgggcgacagagcgagcgagactccgtctcaaaaaaaaaaaaaaaaaaaaagaatgattctcaattgggaggatcacttgggcccaggagtttgagaccagactgggcaatacagggagaccttgtctctaccaaaaaatttaaaaaattagctgagtgtggtggcgcatgcgtgtagtcccagctacgcgggatgctgagggaagaggatggcttgagccaggcagtttgaggctgcagtgggccgggagagcaacagtacactctagcctgggcaacagagcaagaccctgtctcagaaaagaaagaaagaaagaaaaaaaaaaaaaaacaggaaaaaaaaaagtgggttcccaattgtaaagctgtagggacttcctttgggcctaatttaaatcaaaccattagaacctggagccttgtcctcttaacctgggagccacggatgcatttcaggtgttcttgattttcccaactttctgaaggggattatttttaacggacacagggtccccagcttcctccagattctccaaggtatccacgccccacaaaaagataagaaactctatcctaatgaaagtgcccaggagattcttcctcctcttcttcctttttttctgagataatttttttgaatacgtgcacggttacaaaaattaaatagtgcaaacagtatacaaaggtaaaattacttcctatccatcatctgggtcctccttttcaaaggcaacctttgttcaaagtttaggtagccttcaagagcaggatttctcaaccccacacttactgatattttgtcctggataatttttttgtgcgtggtgtcctgtacactgtaggatgttcaggagcatctctggcctctacccactagatgcccagtaacatgcacacatacacaccccgatgaggcacccaaaaatgtctgcagacactgccacatctgggggaacaaaatcgccctggttgggaagtgctgcttccagaaagacccctatgcaagcacaaacattggtgtttgtgcgtctactcattttctcgggcaactagtggcacacagttactctccaaatcactgcaggggtttgtcctgggggcgggggccggcgcaggcatgggcgggggggaggcgacggccactcaccaggtcgcggatgagctggtccaccagctgctccccgcccccggcgccctcgcgggccagaggagaacgtgagcggctcgctacgtcctgcccctcggcccgagtcgcccgcgccgccgggggcctccccgcgccctccaggagacgctgggccagcgccgggtcccccgaggcctgttcgccgcgcccggagcccacctccggccgccgagcccgcctctcggcagcctcgggccgtcgccgcttcttcggcgcctgggcctgcgccagctcctcctgccagcgccgacggaactcatccaggctgtagtcgtccatattcgccgctcccggcgctccacgttctcctcggttccaccgggtgccacgagacagtcccgcccagggaagtgtccgccgcggccggaagccgctgccgccgccgctctagggttccgggtgggcgtccacgcccccgccacgcccccggcgctgcccctgtacgcacgtggtggtccggcttgtggcttgtggcgcccaaagcagaggtttacgcagctgcccctcagcccgtcagctctgctgcctatcacttttgctaagctctgactttgcgccaagcattgttccttcattcaacaaacattcattcagcaactactatatgccaggcaccaagaattcagcatttaaatctgtaaaacaaaacaaaaactctgacgtcttggagcatgcgtttaagtagggagactttaaacaaagaaatatgaacatttaaatcagtgataggtattaggaagaaaacaaaataaggtaaggtaaggggagtaaggattgatagtgaaagtctgtttaagatgttatttaaattaaaatctaaaagagaatcaacaggtggataaagaaactgatatatacatatggtggaatactactcagccataaaaaaggaatgaattcatggcattcgtagcaacctggatgggattggagactattattctaagtgaagtaactcaggaatggaaaaccaaacatcgtatgttctcacatataagtgggagctaagctacgaggatgcaaaagcataagaatgacttatgggactttggaacaggggagggggacgaggggagggtgggaaggtggggagggataaaagactataacttgggttcagtgtatactgctcgggtgatgcgtgcaccaaaatctcacaaatcaccactaaagaacttactcatgtaaccaaataccacctgttcccaataacctgtggaaataaaaatttttttttaaaaatctgaaagagaaaccagccaagggaaggtcagatcttaggagagagatttccagaaggaaatccaagggctttaagatgggaaagaaaatgacatacgatggcgttccacttaaaaatgttttctttgcacctgatattccctcagcagggaacttttccccccaccttgacttggttaactcctacacatctttcatatctcaactcacatttcacttaatcttccaacctccactcaagaaacatcaggtatccctgttactcattctcacagcatcctgtacttctcatcataatacataacacaatttgtaattttatttttatgtatatatatatatcccttcccttctagattggcaactcttagctttgagactggtgattaatacatgctcaataaatggttttttgtttgtttgtttgtttggtttgttttgtttttgagacggagtctcgctctgttgcccaggctggagtgcagtggcgcgatctcggctcgctggaagctccgcctcccgggttcacgccattctcctgcctcagcctcctgagtagctaggactacaggtgcccgccaccacacctggctaagtttttgtatttttagtagagatagggtttcaccatgttggccagactagtcttgaactcctgacctcaagtgatccacccacctcagcctcccaaagtgctggggttacaggtgtgagccaccactccaggctcaaagatgctcttgcaattaactgtcccttattccttgtctaactcttcttagtctctcaggcctcttctctagaatcacttctgtaaataaactagctgcctacaaacccagggctcaggcttgcttactgtgggaaaccaggcttggacaaccttcactgtagaaaattagagtatatggttgggcgtatattcacaccactacactccagcttgggcgacagtgcgagactctgtctcaaaaaaacaaaaaaaagaaagagcatctctgagttggtcctactgtggcaatttaggctcattccattagcaccttctaaggagccttagaacacagctcagaattgtcctcccaagagataagagccagaagaggaaagcatttgtcc

SEQ ID NO: 916208 - DNA, 4001 bp, Homo sapiens
tgccaatactcaaaatgctgggtctaacattaacatccaattaaaaacacaatcttaaaactttaactcaataacaaaaagaaaagagtaagtaaattcaccaacactaggaacttgagaagtgtacggatttatctagcctaccccaatgctctgggtaactacatcccaagtacacggatgccacacacttcagacccattcactcacagcctttttctggattctaagataatggtaattaaagcaacatgaacacataatcatacatgaggctttcaaattacctattttcctcccaaaccttatattgcttatgaaagactgacatttatgggtgaaaaaaattatcccaatactattacattggcttgaaaatttttagattatgctaaggaaattttcaggcagacatatatctactattattaaaagatgcttcttagagctagtatgtagctaaactaattttgtaccttaagaaaaaaacttttaaaaagtaataataatgatgtacaaacaccagtaagcacaaaagagggtaagattttaaagtcaactacaattaacaccaagaactcacaactgtctggcctaaaaacctgttcttgaagtaagaacatgagtccttgactaatatgaggttatctaattttacattatcattttaaaaagaaaatgaaacaattagggcctattagcaataaccttttctaactctctgggcagccactggcacaaatgtccaagatgacagcagcacagcacaatcagaaagactgaacctgcatgagccaaggctttccttgcaacctttcctctatcaagtaaaaatggcagacccagttagactcacagagcactggccctatggtttcaatgataaaaaaacaaaaaaaacttacacaaaagaagtatccagactatagacagcactctttttgttttttcacatttatattttagggcacagttttggggaaggggatacaatgctgccttacaaaggacatagaagtcccttgtttgagctaccaacctcttagccacacagaaaaatgtcagtcatccatttgttaggacccaaatctccttctactgctcacaatatgcaacacacattttaaggggctgttgaaatagaaaaacaaaggaagcccttgaaatagaagctgatcttccttgtcttgcccttcctttaccacggtgcctgcatgcatgccttaaagcactgccacattgtttccacatgctcaggcccttgaaacttgtgccaaagcattgcaaaataaaactgcataaacatcacatttcaaaacatcagctagtaatggtgggtcagtcatgtgggccagaataatcattaattaaatcataacctacaaacgtccctgacccgagttattttttcaaataataaggacaggcattgaacacgtttggggccatgggcgtatttcagaaagaataccagtgtaattcattctgaaaaaccattaaaaatgactgtccttttgccactttcaggagtcataaaacaatttcacaagcagaaaacagtttaaaagattaaattttttttcattttccaaaatcaacatgtaattgcataggcattattgaactgcataaaatcaatacaagagaagtgtatgacgctggaggtttctttaaaaagagcttagagctcactttccttggaccacatggagataatgcccccacacaaacgtactacaaactggatacatattactagggttacttaccttataaaagctgaatttattcctcttggccagaagtcacaaatggttgaagtaaaactcccttcatttgttcttccagcgagccaaagcaagcctcccattaacccggtccattgcagataatctcacccagcacaggctcccctgctttccccacttcccagcccagcaaggataatcacattccggtggggagtgaacagatggtggattccatggtaaccagccctcctaaggcgattggtagaagtgtgtgactactgcttattgggtaacaatcgctgtctttgtgctccagccttgcaaatcctaaaggaaggaacatatatagccactcacatgcgcagggcttgcctagcaggtgtttggctatttaaacaagccagtgcagcccaactaaaagctttccagcaaatttacccttggtggtacaaactcctgacatttcagatagctaactctgctcattcagggagaaaggtcacaagaggcttgacttgacaaacagaaaataaaacctcaaagttaacttgaaaactaaagataaagcattctagaaatctaagcttcatcagcaagttgttttatgatttgcaatccacatcagaactgaaactgcttttataaggattttttaaaacaaatataatactcaaatttggaaaaaatgttagtttgaaaataaagttttcaaaaatcaattgtgttataaaataataatttctgggcaaacatacattcatttttaccgtgttaattgaactttgtggggagaggcggtgctggatttaaaattttcatctagagtcttacccagttacaggattaaaatatcttaattttatactatgtactgagtttaatctgtttcaccatgtgaaggttaaatactgattctgcaggaacagttgcccacaccctggtcctcatgaaggaatcagaggttaagtccttggaagataaaattggctgaaaaccaaatataccacataaaaaccaactattagaggtaaactataaatctagaaaatataaactataggcactcaaaatgtccattattgacaccagcctgagcaacacagtgagaccctatctccacagaaaatttttttaaaaattagccaggtgtggtggtgcgcacctgtagtcccagctacacagaaggctgaagtgggaggattgcttgggcccaggaggccaaggctgtagtaagccatgactgcatcactgtatttcagcctgggctgacttccctgagctctctaggcagagtctgacatttttgttctctcctctacactttctcaataagttggacactgatggtgtttaccacagggcacagttatttgtacacatctctccttcagactgtgagcacctcaagaccagggacagtgccactgtgaaccctgtgtcaacagcaagccaaggtccttgaacatagtgtgaatttagtaaatctgatgaatgactaaagactgttttaaaattctagtgcaaatttagaagtacctaagaatccagaattagaagaatggtgatgcaaatattaatgtatacacaactgacacactatcatgcagttattaaaatatggtcatggccaggcacagtgggtcacgcctgtaatcccagcactttgggaggctgaggcaggtggatcacaaggtcaggatctcgaaaccatcctggctaacacggtgaaatcccgtctctactaaaaatacaaaaattagccgggcatggtggcgggcgcctgtagtcccagctactagggaggctgaggcaggagaatctcttgaacctgggaggcggaggttgcaatgagccaagattgcgccactgcactccagcctgggtaacagagtgagacttcgtctcaaaataaaataaaataaaataaaataaaataaaataaaataaaataaaataaaataaaaataaaataaaataaggtcagaaagactatgtggcaaaggggaaatgtttctattaacaagtactgtttactggtccctagtatgtgctagacactataataaacactttacaaatatttcatataaacctcacagggcctatgaagtaggtattattatcttcattttttaggtatagagctgagattcagaacttatgctctttgcccttggtctcaccgttggaacgagaacctcatttgtctgagaccaaagcttggatctaagtcattgcgctacaccacct

SEQ ID NO: 916209 - DNA, 4001 bp, Homo sapiens
agaaataaaaccccagttctcttccatattccccatctagacaccagaaagaattatgataaatccaacagatgggtgagcaaaaaagtagttgatgcttctcagccagcaatgctaaaaaccaaccaactcggctagacacaggaagtgtcccactttaaacaccacaaaaatttctgtggatttctttaattgtaaagttgataaaatacaaaaatagcttgcattattttaggataattcaaatgcaagaatcatgaacttccagtctgggccctagaaattgggtttacataaatgtgaaattacatgcttctgtgcctgttccttataaactgttaagactggaattgaaaactgatacatataagacacggttattttaaatacatttgacacctccaaaaaggaaagagctaaaactggctggaaggattttaaaatttccaaccacttttaatttaaatcaatttcttgaacgaaggtaaggcacagaaatgtaggatgaaaataatttaccttatgtaagtataaagcctccctttggcaaagaaaagagagtttataaagatatctcatataagtgcatataacatcaaaaaggaaagacccacacaacacccacttcttgctttcttttcctattggctaacttcttgtttcgtttgttgtaatctgatcacagggagcaatgcaacactacaatatatctaggctttagaaataatacaaatcagaacatttgagtgctgttggacagtttcaagttgcaagaattttaaacaaatgccaagaaaagcaatgaaaatttaatctgatacttaagtgctgattctggaagtaaccttgagaagaagctttaaactatttcactataaaatttctaatgaaagtttcaacgtggacaaaaacgtaaaataacccataacactctacttaatacataagttctggtttaaaaattaacctatgtacttacgaagtgaacgtaacaccactttggtaattattttgtaaaacagaaattgttccttaagaatgttcagaaacacaacgtctagaattgctgaaaatccacacaaagatagaggctttgtcatttggatgaaggggaaagaactatgggaggcagacagaaaataaagctttgtttaccctaatcaggtagaaacaaacaaaataattgtaattgggtgcagacaagcaaaaaaaaaaaaaaaaaaaaaacctcaacaatctcaactcctctgcttctcaggtaacagaggtaaaaccaccaggacatgacaatgtctacgcctctttaaaatgggtaaaaggtttaccagcagatacaaggttgaaagcgactcacttagtggccaaattgaacacgctgagaacactgcctttacctataataactgatctattaacttgggaatctacactattttcacatgcaaaggcgaagtcctcgcactgctggagagatgagcgaacgcccttcacacatcgcatttcacctggtgcagagcccccagcacagtcccccttggaagggagatcccgagaaatcccgggtttccaaacagcccctctgggcaggaaaagacgagaaagccggcagcgaatcccattagctccgcgcttgccgaggtgctcggcaaaggtacggggcacacaactcgcccaccccggcgaagaaagttgctcgcgagcccaagcctagcagcgctcgccacaaactttcccgcggcagcgcgagcgccgtcacttaccggctgcagaagtcatgattccccggtgcagctcgcttccccgctcggcccctcaatccatcttcccctttcagtccattgttcccacagttcgggtaggagagaaaagcccccgcagcgcccacattccgtcccgccgccccgcggcgcagcctgagcgccacacaaaggacgcggccgactctagcgaccctgcggcgctcccgggcgcgagccgccggggtcgggcgggcgagcactagcaccgccccgcagagcggcaggctgacagccaggcgcgggcacgagcagtgctctcttcggctccgctggcgcgtgcccttctcgggctccaaaaatcagcagtgctccgggcgccccctgctagtcgcggccgtaaaaggcagacaaaagccctagcctcctccaatcggagggctcgagcttcagctcgctcccgcctctctcgcttacacgctcactctcttctccaataagcgggctcgaaaagggggcgtgagcggcgaggcatattgggaattgtagttttctggacccacgggacgggcaggagctggagctccgtgccgcctgtactcccgccttcatttcccatcgtgctgaggcgggtggcatggcggagaaggatgacaccggagtttgacgaagaggtggtttttgaggtaagaggaaaatggcggtgggtgtggattgcctttgtttgagaaggacgagacggaaatcgaggaagcaaggcgttcccggggcgagggatcgggtgacgcgctccagctggcctcgaccaccgaaccccagcgatttcagggcctagagtccgtcgtcgcctgacaggtgtagccagaggcgccctggccgtggccggcctctatctcgggcccgcccagaattcccagacggtgcccggttgccaggctctgggctggagcggtgtctcttccttcctgggaatggatgtgcggcgggggggactgcgcccggctggggcggggccgaatcgtgccttttagatagtcacaacttagcctcctccttttccatccgcgatttttttgggtcagtatccagagtgcttcaggtcactgttcaccgtcaaggcgtggccctcggaatgaaggcagcaggtgcccgttttctaacacggtttaaagtctatttgtgggacctactgtgggtagttagggccagggcatctcagcatctagattcgattcttttgtcctttgctgttgcgctaggtgtagccagttcttctgactcggggctctagatgtgagtgcttttgtgtgggactattttaagacgttctctgccatcttgaatgaaaaaaatcgggcgagtgtttttgatgccatttttttccatcagacacaggtcaaaactcgcacccctgtacgtatgtgtattgcatgtatacgctttactttcatttatccaactagattttaagaaaatttaaaaatgaagtggcccatgccatacagcgagagagcgaggcacagacaggacagaatgctaaatgttgaaatatgtacaaactgtcattgaaggattaatttctgttcttgcggcctcccagaggctacacccagtacgcgatatccgaggtgaatctttaactatgaattggattagaaaaaccggcaggagaaaatgtattacagggaaagagaactgattatgccaagcttgggaagtgtgaaagtacctggtgtgcatttttagggggcggggtgtggagggtggctatgtaaagtggcttgatgtggctgcaatgaagaagcagtggaaaatgtggccattttaccgaagtgaagagtctagatatgaggcgttcattagggaagacaagggcctgagatgaaatgagagacgtaatggaataatggcttggacagacacttgtaagttaaaatcgaggcaatgtttatagattgaatgtggtagctgaaggagagagaaatattttctagagtaagggtaactgatgggtgtattttttttacccattatttttgatttctgaatataatagtaatatatgctcaaggaacattttattgtagaaaataagcccccaagttaaaatcatccattatcccaccacccaaagatggtaactattaacagtacggtatgtgttcttatagactttatttctatgtaaatgtgtgtttatgtgtgtgtaattttttagcctctatattaagacacaatgtgtgtgtgatattttttaaaacaaaa

SEQ ID NO: 916210 - DNA, 4001 bp, Homo sapiens
ccacatatagtcttgaattagagtaagggtgtcccctccatgagacatgcaaaattgcatttcctgaaagtctggtagtgagctggctgacaaggtaggacgacagaccatgaggtccttgaagggttgtgtcttagttttcagccacagcgcttggtagaatgccaggcacatggtagatcctattaaatatccattgaataaaatgaacaacacttcgggtgcatcaagtgtatccagatttaattgaaatttttgccatgagactcaaacttggtttccaagatgttgactcctgagtcttactatattctctggagttctggaacctgtttggtattcggagagaactttcctctctccttttatctcctgtcaatatgcatttagtacttgaagaggttaaactgtcaatttcgcatgttatatatcttgcaacttaattttgcatgttgtatatcttgcaaccaggtttaaggacctttggagcctagaagaataaatgcctcacacacagcaaggtcacagcaaaaataattaatttatttattacaacaataaagggcaaatcataattcctatgttttctttagttagagattgtctaactaatttttctttcctttaatttgagctatattggatcagtttgcatttttctgtatgctttgaggtgttttctcacgttttcttaaaatagaagatccagtctttttcaatatctatccctgctttcaccacattaccccttatataggtgcacacaaagggaccctcatttgaatcattgctaatggattgattattgtggattgtgatccaattctccacaaacctgatctttaaaaacattccagttgtctcatgttgccaataagtttctaactagcttgacttgctactgactggacacctttcagttccacagagaagaatcaccaactcatactgggtacctgggtacctgggtgtctgaaacacccattaaacctgttggatggatggatggatggatggatggatggatggatggatggatggatggatgcatggacaaatgaatgggtggatgggttgtatacttggccattctcaccaagacaacatacatggacagtctgtctttaatacatttttccaagaatttttataaggccagagttggaaagagcccccagatttatctataacaatctgggtatgacccaggaatctttacaacctccctagttaacccagtccaaagtccatgagctgaaacttagtgtctgttgatctgcctggcttctttttctcttagactccttgcctttctttctgtacattttttcaatcttttgacggggcaaagggaacatggctcctactgtgggaagggttttagttgaaataaaaattattcatattgagaaaaaccagcaaatgctaattaggagagtgacagaatcttcccctaagttttaaatacacacgcacacacacacacacacaaacacacacacacacaaagacaataagtggttcctgggcagaaagctaggagggttggattagccctccagtctagtccccaacctccccaagcctcctgtagatggacaacaagggtgctccccttcttcccagcctgaagccctactcactgtagatggtctgatggggtgcgccatccacatggccattcttgtggatctgcaggtggtagctgttcctggctgtggctgtgtacaggtggatcaggccaccccagctggagccgagcagtggggaggcattgggataggctctgaggacgctcatgctgcagacgctgcacaaggcacagacccagagcctgaggcgggcccccaacatcgtgccctgctctgagtggctggtgctgagattgaaacctgacactcctgtcgggactctcctggcccaggccttactggccttttccttctcccttgcaagtagctggtgtgaggatcctagactggattccctcctttttgccgtcagacttttaaagggtagcagtgtgacatcaaacaggaaaaactccactgtccacatcctctgtgttgtaatcagcccattgaaagaaagtgcaaagaccccggaggcgcacggaaggcacgtcggttccagacacacacacccctcaatttcaagccaacgctccaaaaaatgaatgacgtgtgggcaaaagttatctgccactctgggctgtctgttgacctgtcccacttccatcaggaaatgtgaaggcagccagcggttcccaaaaaaaatccagcttcagtcaagcagtcaaccgactcctaggcaattaatctcctgtcgagtttacttattttggttttctttaaattccaatcagcaagtatgtatccagtgcttaatctgtgagcaggatttggtgggtagcttgcaggatatagagatacatgacaccatcaggcagatggcatcctctaagaacacccacttcatgaaagatgggagctaggagcaggggcacaaaagccaaagttgccattttgggaagattttgaaatggaagaaaaagaagtaaggccttgaggtcagtgaacatgccaaggttcagtttctcagcttccttagtctggacttcactgaatatgccaaggttcaatttctcaatttccctagtttggactatcgagggcaactaaactagtagtctctccagtagtaaggagactcattcagagacctcatggggattggaacagctgctggctgagcactggggatccgagcctcaggacagggtgtccccacatttagtgtctgtacatgagtgctcagcttggtgttggatgcctgcctgcagatgctgttcacagtgagccctctgggaagctacacctgatgtcgggtggaatagtcctggcacatacagtctaaaggggagcaagctactggaacacacacccgaaaaaacacacaaggagtttgctattcttccagtttccctgtactgagtatatgccatgtacaggcatcaagctagactcatgtacaggttgatataggagacagcaagatgtgattcctatcttgaggagctcaaatctaatgcaggaggcagataaaaataagtaactataatacaaaatgagtgcaagcttacaggtatagacagaaagagatggcatttgttaccctacatttgtacagtttttttttatagtttacaaagcattttcacatctattagcttatttgaacctcactgccactctgtgagataggcactccatgcattatcaagattttaatactttacatgaagaaatggaaatcttagtgtttccatgtccaaaggcacaaagcaaataaatggtagagccaggacaaggtcttctccttccctaggctgcttctccaaagaatcacagcaagaactaacgctcatggagagcttactgttccacttactgctctaagtgctttacttgtagtaacccatttcatcttcagaataactctttgaggagatgctgttattttctttatatagatcaggaaactgatctatgcacacagtttaagtaacttgcctagagatagaaaggtaacatgtggaagaggttggatttgaatccaggtctggccccaagacctcctaagcacttttcaaggtgtccaaacccatacaacatgttagagctaaagccatgagagccaggagcttggtaaaaaagtgcaggtggcaaagcagtcctctgttattctctaaaaacccaggcttttacccaggatgaatctctaggacacatggtgcttgtctccccagggttgagtggaagaagtatgacatgaaatgtttatatgtaaaacagtcttctttactaatagccacagaatggattataaatataatgctacgtcttagctaattgaagaaatagctagctttcagaattgagatgcaaatcacttaggaacatttgccctgcatttcttattctggttgtgaaaggtaaaga

SEQ ID NO: 916211 - DNA, 4001 bp, Homo sapiens
agcgtacgtgatcggagaccagaggattgaaaaccctagtgcagaatctcagcacactgatgaggatgaaaatagcctcccattccactcctcctgctgcgcacgaggctggggcatcttgcagggcgcgtgtcatggagcagcgcacccaggcagagagacagacttgctctcggggcctcgccagtgcagggaatcacacctgctcacaagcctggatgccagaatgtgggtttccctctggcccacgggctccctgagctgtggtttccgtttaagcacacgggctccggccggcaggtgggaacagaagaagcacgggccagggcagaggacaatcacccgtgaggctgaagaagcacaagctgcaaggcccctccctttcacaggctcctctcacagcctttcctttcccatttagatagtcacttctctactcaggacttcatattattttcttcaactgtgtaagcatcaagccttgtaaacctggcacttccccggcctggtgaactcaccgttgcgtacaatcttcctttactgttcatggcaacgaagagggcacttctcactccaaagagactcaccacgcctcgctccacagtggaaatttccagcaggcctgacaaggaaaggggggccacattacctaaggcttgtgcaaatcagagtgggaacttgagccgacaagggcatctcagtccatcccccttctcctagaaagccagactctccattgccccatccatgatccctctaactctaggagaccctggctgctggactcatcgagtgctgccattgtgctgttagaaatccagttctgcaagggaaggttctgatagcagagttaggggctgcagtgaccacttagctatctgtttaagatgagctttgaatctgggctttcagtgacataattacttgaggtccttgacttgagtaaaaaaataaattctgattcttcttcttcttcttaatgtgtactctacatgtttcaacaaatctcaacccacttaatcttgaaaacacagcagccacaccatagctgatggctttcttggatcctgcagcccccatcctttcttggataggagactaaccatacagcaagctggcagcttgcaggcagcttgcaggataagaacctggggacagagggagccgctgaaataaaaagaaggatgtgcttcagttggacattttgcaattgaatttcccttccttctccaagaaagaagctgaataaaaatgagcttgtgtcaaatttgatccaagtatactaactgattctccctacccaggccttgggggcttcccagactaatggttcctaatggtcttacaaggcatcagatgggccagtaatgctgaaatagttagtgccactgaggatctaaccaaggcgatggcaaagaacaccaggatgcttggaccgcagtatattgagcttgcacccaggcagggtcacgtggaatcatctaagtggtgagcagcatttctgccccctttatcgtgcatcctgtccgctagagcagggccccttcaccttttagccctgcatgagcccaaacccccaagcgtcccgactggctgcagctggcactcactgtaggggttctcctcgtgggtcccgctgatccggccgtcggggagcacctggaggtgaaagccgatgcccacgttgcagtagagcctccgctgccgcttgatccccaccaaatagccactttcccagttcaccccggcaatctctccagctagcccggcgcgagacctggacagcagggtgccccagcccctcgagtccagcagcgtgttgttggcacgggtgcctgcaggcgagggcaccaccatgcccactaggatgcctaggaagacgagagcccacagcgtgccctgcagacgtcctgctccccgggacatagtgatgaacagtttctgtcccagggccatccaccttgcctctcaggcacgtggtcagaattaatggccctaaaaataccgcccttcttgtttttctccctccggcatggcggcaggggcttatttttggaaggcagatgaaggctgctgacatgaaaccaaagcctccatcgggcactcgggttgagagcagagggacccaggctgagccgcggccggtagagaccatggctcggggacgctctctagctcgcccgcttgctccgtccctagttgatgatatttgatttgacctatctttatagttgcttcagcagcccggccctcccctccacccatcatcgccctgacgtcaacccgcccagctcacttatccagggctgtaacattaacctgctcttgggcctggctgcctccccagacccccatcaccctccacactccccaggggttctgggagccactgtcattccaactatgaggcaggaatgaagtgagcagggagcatctctgggggaggggggagctggctgggggcccagggaaagagagaggcgagaggccacccaggacccatattgggcagaagttctttgcctggcagcgctggcttccttatttagagggcaataggtagaggcagggatgggaaaaggcttgtggtagtgatgaccgtagcctcaagtcacccttgagatcttttcatggaaacagctcatggtggaggggaacactgaaaggccaaaccctttcagcaggagggcacagacattctcagggggtggggatgggggttgttcaaggagctttaagattgtggagggaaggagggcaagggcaaggtttgcctgctcactgtcctggtcccgacattcacctggggtggaagttgtgtctggcctttgacacagccccctggccattctccctggatttatccctggcatgtgactgatattattcccatttcacagatgaggaagttgaggcttagagaggataaatgacctgcccgagttaccatagctaataagtagcaaagccagaacttctaaggtgtgcctgagtctaaagcctgtgcatgtctaatgcttgcagtagaagttggctggcccatagagtctgtttagctccttaaatgccaatagcacatcacagagttatttcagtagcataaaatgatttatttcttaaaaaaaacttgagtgtctttgatgtacatgagaacttctatatttgcagataacttttgctgggctgatattacactcagaaactagtaaaaatatttctgccaggaagttattcctacactgatttatcttattcccatattacttttaaatagattacatgtctaactgaagtgagaaaaaaaatgtaaagctaccagaaaactcactgcacaaatttctatacaatataagacagaactattaatacgtctctgagggtgaataagttaacaagggtcgctggggaattgaattaacttgagttaaaaatcctgtttcttgtacttcaatccaggccttaatctgttggtgagacattagcactgattttgccgggattggagagagtatgtgtggggtgatgacagtggcatacagatggatttgagtgtcctgagcagtagagctggtcccagcaggcagctcccttagccacactctacacccacattgcaggctgcaggcagcctggaaaagctcctggggtgagttccatggcccaaggactctactgaggcaccaccgccttccctctgattctaaaccttctgctgtgccctgggtcccagcctctggtctgtggcttctacctgccttctctctgcccttctgcctcgttcactgggttcgatgctttggttcaaatttctgtcaagccatgtgtttagtgttgccctagacatgccttctgaaatcctgtgaagcccagatgtctgtctttaccctcagctggtaaactgaatggggagggacataggcaccacttgttcctactgtcaccacggccccctgacttccccattggcttcctctcccttccactgccgttgtcccataccc

SEQ ID NO: 916212 - DNA, 4001 bp, Homo sapiens
gtataaagacactttctgaagaaaattaatttttaaacttggaagaaagattttggaagtaatgacactggaggatttttttaaaattacacgttcccttagaattgtggctgaatataagtttcacatacatatgttcaaagagttgtgacagttcaagaaggaactaacctaatctaaaccagttatttctaacctacaggctaaggagtcagtagaagagttgcctgaatgcacatactccaagcactgtctgtagtctaaaacatttctgctccatttctcaaatataaatagatactgtaaaaataaaatacaaaatcatttaaaagcatagtagttttctgtcattatacataatttcaaccaacaattactaaaagtccaattgcatgtgtattagaagtacagggtttctcataatcaaaataggtcgggacctttaagctaatgtacagagttccttctggcccaaaattctatgattttaaaggatgaagaactcttacggtgaattccttagaactattccatttcaataaacatacatatgtatatataaataatgcttgctatgtgccaagtactggactttttctcagagatgagtaagacatgattccagacagacccaggttcaaattggcaggagagacagaaacaaataatacaacctaataaatactgcagaagaaaagtttcaaatgcgttgggagcacagcggtatcaatgtcacctgggggagtctgagaagacaatgatttatgaattgggttttgacaggtggtaaaatagaggaacagtaaacatcctagacatccgcacgtacaaaagtacagagctgtcaaagcgcatggcatgtttggggaaatagccagtatagtcttgtatggtaggatattaaagcaggactaaaaggtaaaatggattggggcagactgtaaaagatcctgaatgatgatgtgcttaacaattaggatttgatgctgtcagcaatacggttactaaaaagtttaaggaaaggacagagataaatatgtatttcagaataactctatggaaggattatagtagggaaaccagtggagggcggggggcagagggggcaaccgcactaattctggcgaaaaaaaaaataatacagtgcagtgttaagtggaaatgaagaaccaatgatgattcctggttttctagttcggatagcaggacagatactggaaccattatcagagatgggatagagaagaaaggcaggaagagaaccagaaaagagtaataccccttggagagcagtttcaagaaacaagttatcttcattaaacgctgcaaacaggtgactgaaagggtcccccgtccggtggtgaactcgcaggtgggtaaggcaggatgaaagcagatacggaaggtgtgtccacagggttagagccaaggcttttcattgaactttccgcaccgcatctccattaagaggagctcggagtcggggggcgcggagaggaagtccggctcccaggagcagggagcccgcggcgggaagcggacagggccgggcgccggtggttcaagaggcgcaaggcaccggccccggcgaaggactgccccggcaaaggacgcctccgactcgcccacccctgctcccgtccctggatttagtccacttactctgctcttagtccctcgcagccttcagctgtggcgatgcggactcaaaccctctaccaaccgggacctatgcactcaagggaagagactccgcgcccccctaatccgcctcctcagcaagcagacgcagaatcggacggaggcagcggacggaaggccgggaagccagtggcgttcaacgccatcaccggcggggtagacacctccgccgaccgcctccgaccggcgctcccggagaactccagcctcgcgagatttctttcctcgcgttactgtggggcagaaccgaccactctccgctttgccccagaaggcagggcggggcccttctatgtccctccctattcctcccttcccaggctttcgctcggcctctcgcaaagtctcgcgagtttttccaggggaaaccggcctgggtggagagacagagaaggggagaccgggtgggtgggtcgtacgcttagggggccgtggttggtacttcgctgttggggaggctttcaggtcgcccagatcctgcttcccaatgggtgactgggaaaattagcgggtggaaaatctcgaggggtggaggctttttttttcctccttggccccgccctcttcctgttcggcgactgggacgcctggccctacgagggggaagggaggcttggccgggctatcggagagcgctgtgcgcacgcgcgagcccgagtgcgtgtgtgtgtgtgcacgcgcacgcgcgctcctgctcttaggaagcctgggaaggaccggtgtgctaggagatgatcggggaaagcatagtcccctgtctgtggcaccagacactcccgactgtgcgctgactctccccgcccagccagcagccttttccagagaggctgtggtccatagcctctgttcgttttcactgcaggaccaggcacgaaagtaagcgaacctcgatcctgaggtcttccctatccactcaccttgtattttccaccccccaccctccagcaaagtgggtctagaaggtttctcaaagagagttttgcatgaaggggagatgcgtcttgaaagcaagaggtgaaaatagctggatcgtaagaaatcagttcgttttgatttaacactttggctttgcttgccatgtgcttttcgaatgtggattgtctattcagtataagattttgttagcgaagcaggggagtaccgtatgctctgttttaataagaaaaagttttaaaagttttaaatttccttctacacaccagtgtgatggtaacaactaagtttttctgctctacctggtaaattactgtgatgtttcaaaagctaaggggagagtgtgaagttggggtccttatcctaaggcgaagacctgatgtgcggttatcttaggagatgtttatctttgttttggccttttcttttgctgtcactcctctttcctgttaattccgcacccctacccgccagtcccccttcaaacgtttttcttggagggaagtgcaaaaatgctggcttggggtttatatgtgactaatgtcaattagcaaggatcataaagttgtatttcaagagtctttgtcacttatgtttcgtatatgtaagggaatcaaatacaattaaatgtcaaaatgtttccctctgacaattttaagttcattttaaaagcaaaaccaaaaatgcatgcactggtatttttgtctgggcctggtagagtgacagcctaatatggtgtattgatacccttgctttctggtcatgacctcattaaactgtcctttgtcggacagatttctttgaacatattattcatgttccctaccaagtcttcttgagggaaagacaatcttcttgagaaaattagaaaaaatgtaagatgttatgtacaaatatttggctaatatgtttttccccttacaggttaaaacaaaatgaagattttttctgaatctcataaaacagtgtttgttgtggatcactgcccttatatggcagaatcttgcaggcagcatgtcgagtttgatatgctggtgaagaatagaacccaaggaatcattcctttggcccccatatctaaatcattgtggacttgctcagtagaatcttccatggaatattgtagaataatgtatgatatatttcctttcaaaaagctggtgagtgtgaagtacaaacaaaatcatgattttggggatgtacttaactgcataaatgaatttttatatgaatttgctatagataatgactgtgtgtttattacttaaaaatgtggtacataacgctgccctttgggattaatatataatggatatttaattggggccagtaataataacagctaacaattattgagcactttacat

SEQ ID NO: 916213 - DNA, 4001 bp, Homo sapiens
cctggagaggccttggtcttggccaccagcagcgtcgcgcccctggaggtgatgctgagctccgtggacgggctggtgcacttggtggcggcatgctgcgccctgtccggtttgctcctgagcaggtagaggcctttgagcacagccaagcactgctcctccacagcccccagcggcagcagcagggccagcagggaccccagcaccatgctcagcagcgtcacccagaggaagcggctccagaccgagacccatttcggttcagtcaccgccatcactgaagccattggtatgagcatcatctggactcaggagagggccctttgcgcatgtccacaggcggctgagagagagcaggatctgcaaggagccaagagtcgcaggagaaacagacacgttcaggacatagtgtgacttcagctgggaagatgggtttggagacttctgctcttttagctcactagagagatggggtgggggcaagtcaaggactggatctcactagaggaggggccagcctagaaggactggtgccacctcctgggcagtatgaatgtgaaaacactgctgtggtccaacaattaatgagcacttgccataatccaggccgtgtgctaagcaccaaatgcctcacatgggtcacctcctgcaatcttcaacgacttgagctgatgttttcacccttctccaggtgagggaactgaggttcagagaggtgaagtcccttgccgaaagtctcgccgggagcaagtgacagccttaggacttgaactcaggaaccccacggctctaaagtgtccccccttcccatatatccctgtggcttctgaccacaaacactggatttgtggacatatgtcaaacatttgggacataaatgactgacagacacccaggcagatcagccacagcagttctgacgcccaatctttgataagcacaattgttgggtggcctcatttattgccctcaccctgatattcagccacagctcccacagtgcccttcccctctctggccttccatttctggcctgtccagaagggaccccatcaagaagatgagcagttcgagcatctcgaaaggaactcaggctgtgggccacagtgcttggcctcagtgacaacatggcttgtatgtgcttggggctggcagtgggagtggaggtggggccaggcatgcaaacactatgctaacaataagcacttattaagcaactatggtgtcctaggtgctgagcagtgtactggccacgcattgcctcgtttcaccctcatgccaccctatgaaggaagagctaccgctagctccattttacagacaagggaaaccaagacacagagagcataagttaaattccagaaggcccacaggaggtaaacagaggcatccggaaggaaaccccagggcctctgaacccggtccccaggtctcgatttctaccttattactaagcagggcctgtgcacctgctctgggctggtcctgacccgggaatgactgatggatcacggggttctgagtctcatggggatcctggcccattgccacagaacatgtgaaatggcttggggtgcgctttaataggggtgcgcctggagtgctgcgcgggtccaggggtctgggcgggcttcccgaggggacaggctcctgggcggggcggtacaggaaagggggcagttcgccggtgccaggggtgtgtgcagggaaggagtgcgttctgggaggcgcgaatctctcccccacacttccctagaaagggagaactgaggcccggagaggggaggggaccggtctgagtcccctccaagactgcagagcctcccttcccgaaccccgcccagggctcgcggccccgtcgcacccttcccggcttcatcctctcgagcccctagggcttttccccttctcaccgcgcgcagctgtcagaaccccaaccgccttccccgcgctcccagctccgggccgccggctcccgggtcctccttctccgccggcctctggccccgcccccggcgacttgccattgaaccgcccgcagccctcgtcgcggcggattggctttccccacttgtccttccctcgcatttccgggttcccgcgtccgcgtcggcttccccgggaaagacgcgccgtgggccactcccattggttgttgcttgcgtttgtctcgttcacgtagcagccaataagcagcgggaggggcggggcctaggccacaggcaggaggagcaggtgctggaaacccgatgggcgtgcggatttggggcacactaggtggcgggcccggaaactggaagttccacggcggtcttttcctcgggtctcttcgtcccggagccgctgtcgtgtgcctcatttttcccggttgtgaaatgaagatgctgatgcttttcaccccttcacccggttagcctgcttgactgcgcagcccctgttcttagcctccaccccatgctgctgagtttgccgccttcttcttctttactcttttcctctctgtgtcttttcctccctgacttaaacaacttttttttttcttataaaatacagggtctcgttgtgtcgcccaggctggagtgcggtggagcaattgcagctcactgcagcctccacctcctgggctcaagcaatcctcccatctcagcctcccgagtagctgggactacaggtgcatgccaccatgcccggcgaattttcttttcttttcttttctttctttctttctttttttttctctctctctgtcttgctttctttctttttttttgagacggaatcgcactctgttgcccaggctggagggaagtggcacgatcttggcccactgcaacctccgcctcccaggttgaagcgattctcctgcctcagcctcccgagtagctgggattacaggcgcgcatcaccacgcccgcctaatttgtgtatttttagtagagatggggtttcaccacgttggccaggctggtctcgaactcctgacctcagaagattcgcctgcctcggcctcccaaagtgctgggattacaggcgtgagccatcgcgcccgacctatttctgattttttattttctttagagaccgggtctcactatgtcgcccgggctggtctcgaactcttgaccttaagctctccctccatctcggcttcccaaagcgctaagattacaggcgcaagccaccccctcggttctccctgactttttaatttgtatcctctccagaaggacctggctagttcttttggcttcccagagagaaattttttccttgaagcagagaatggaaacctccatcttaatccacaaatactgaaattaaacatctagggaggtgccccagaaacgctaagcatttagaagttagcagttcagattctggggagtcaaagagacctgagctcaaattcagactttgccatttactctccgtgtcaccttgggcacgttactcctagcctcactttccccacttgtaaaatggggacaaacagcctaccttgcttttggcatccagttcaggatttgcagaaggcttgatgcttcaagatctgacctcctctgtgacgtgtattgctcttggaggcagggctaggtggtggttgtggggtgtcactgttgggagtcacacagacctgggttcaaatcccagttctgccccttgcaaactgaatcacattcagcaagtgacttgatcttgttgatcatctgtctaggcttttctgtaaactgtgcacagtgtgatgatattaccacttcacaaggttttatgtgagggtgaaatgagattctatacatctggcacagagcaaactatctatctatctatctatctatctatctatctatctatctatcacctatctatcttttttgaaataggatctcactctgttgcccaggctggagtgcagtggcatgatcttggctcactgcaacctccatgtcctgggtttaagtgatcctcccatctcagcttccctagtagctgggactacaggc

SEQ ID NO: 916214 - DNA, 4001 bp, Homo sapiens
caggaggagtaagttcaagagatctattgttaaatatggtgactagagttaataaaagtgcattgtatacttgaagattactgagagtaggcctggtgtggtggctcatgcctgtaatcctggcactttggaagggtgagggaggcggatcacctgaggtcgggagttcgagaccagcctggccaacatggtgaaactccatctctactaaaaatacaaaaattagccgggtgtagtggcgggtgcctgtaatcccagctacttgagaggttgaggcaggagaatcgcttgaacctggaaggcggaggttgcagtgagctgagatcgcgccactgcactccagcctgggcaacagagccagtctccatctcaaaaaaaaaaagaagaagaagaaaattactgagagtagattttaggtgttcttaccacaaataagtatgtgagggaatgcatatgttaattagctcaatttagccattccacaatgggtacatatttcgaaacaccattttgtataccataaatatacccatttttatttaaaaaaagaaattttaaaatcaaaatattgagttgttttttttttttttttgagatggagtctcacactgtcgcatgggctggagtgcagtggtgcgatctcggctcactgcaacctccccctcctgagttcaagtgattctcttgcctcagcctcctgagtagctgggattacaggcgcccaccactacacccagctaattttctgtatttttagtagagatggggtttcaccatgttggccaggctggtctcaaactcctgacctcatgattcgcccgccttggcctcctaaagtgctggattacaggcatgagccaccacacccggcctacgctctttttttcttgagacagagtctcactctattgcccaggctggagtgcagtggcgagatcaccacagcctcaacttcccaggttcaagcgatccccccacctcagcctccttagcagttgggaccacaggtgccaggtacatgccaccgagcttggctaatgtttgtgtttgtttgtttgtttgtttttgtacagacagagtttcaccaggttgttcaggttggcctcaaactccggggctcaggcagcccaccccctcagcctcccaaagtgctgggattacaggcgtgagcacaaaacccagcctgtattacccttaaaacagagacaactgttgattttttgtgcaaatgaagaattacaggaataaatacagttgatagattaaaaaaataaggtcatatagctaaaaaagaaaaaaagaggaaaagaaagaatgctggaggttcagagacagcggaggtactttcgctagggagtcaggaattcattttgcagcagtcatggggagcactggggcatggaggggacagcaggtcccagctcggaggctccaggagaaaacaaggaaagtgcagagctgagcagggagtgctggcacccactccccacagcaccccagttaagcaggtattatttgcagataaaacagtgccagacagatgtggctggccccaggtcacgcaatcctctggaggccaagtggggacctgaaagcagatctcctcccacttccacaggctgtggaaaggcaaggatacaaggcagggagcacacccctgagcggggcatgagagccaaatgctttccttccctgtccctaagctcactccttggcgggagaggggatagaacaaaggatgaaccgaggatgggtgagctgtctgaagtctccctcttgtgcactgatcccaccctctttcaagaaagacactgttccctcggttcccccttctcctacctgatccatttccctctctgctgggtcactctcatcagctcgcaaatatgctgttgtagttcccgttttaggaaaaaaagcccaaaatatatatacatttttgagacaaggtcttgctctgttgcccaggctacagtgcagtagtgtccccatagctcactgcagcctccacctcccaggctcaagcattcctccaccccagtctcttgagcagctgggactacaggcacatgccaccacacctagctaatttttaatttaatttaatttatttattttgagacagagttttgctctgatgcccaggcggaatgcagtgtcacgatcttgcctcgctgcaacctctgcctcctggatttaagcaattctcctgcctcagcctcctaagtagctgggattacaagtgcccaccaccacgcccagctaattttggcatttttagtagagacagggtttctctatgttggccaggctggtcttgaactcctgaccttaggtggtccacctgccttagcctcccaaagtgctgtgattacaggcgtgtgccactgtgcccggccccaaaataatttctgaatcccccttcagctacattctatctctctctctttgcttgtttttaccttttctatgctactgtttcttattcctgtccttccattcctcttgaaccccttccaagcaggcatttacccccaacactccactacctttgcctcataaccacacagctgaatctgatgctctgccctcctcttgcaaaaccagggacctgcgctctcctggcccctgctgccgtcccctccacagcctctttgctgccctcccatcacccactcccttctaaaccctgcagacctcgggctcagtcctgcagccttcttttccctctccatggtaattccgtgcatgatcccatcccatctcctagctttgaccatcacctgtgtattgatgtttcccaaacatagttctccagctgagatttctcccctgcactccgcactttattcaaccttcttgctgacatccccactggaatatttaattggcataattaacatgcccaaaagtgaaactccgggctcccacatccgcaacctagccctccctcagccttccccactgcaggaaatggcagctgcatcctttctagttgctcaagccagaaaccttgcggtcatccttaacttctctttcactcttcagaacagcaaattagattcttcaatcacttctcaccacctcagggatgctatcacctggacgacagctgcagcctctctctcttttttttgttttgttttttgagacagggtctcactttgctgaccagactggagtgcagcggcgtgatcacggctcactgcagcctggacctcccaggctcaagcagtcctcctacctcagcctcccaagtagttgggaccataggtgtggtgggccaccacacccagctaatttttaaaatttttttgtagagatgggggtctcactgtgttgtccaggctggtcttgagctcctgggctcaagctagcctccttccttggcctccaaagggctgggattccaggcatgggccactgtgcctggcctcacttccatctcacctccccctttctacatcgtcctctcttttcttaacacagttgccagtgtaactcttgaaagcatgttccataagtcattcttccaccaaaagcttccagtggctcccatctcactcagaataaaagccaaagtcctctcattggcatacagggtcctcatggtcggcttccattacctctcggcctcacctgctgccactgcccctcctccctcccttccacaccctggcctcctcacagctcctcccgccacgctgctttccacctcagtgcccctgcctctgccctgcctggaacacaccttccctgggcttgcaccctgcctagcatcaagtctctgcttagccgttgcctcggcagacactgtccccttcaacctgatgttccctgtaacactcatccatcagattatggaacaacaggttgaaggggacagtcctatttgttgctttattgtctgtgtacccactagaaagttcatgagagcagggactttgttttgttcactgttatatcccaagcacctaggacagtgcccggcacagattaag

SEQ ID NO: 916215 - DNA, 4001 bp, Homo sapiens
ctcatgcctgtaatccccgcactttgggaagccaaggcaggcggatcacctgaggttgggagtttgagaccagcctggccaacatggagaagccccatctctactaaaagtataaaattagccggtcgtggtggcgcatgcctgtaatcccagctactcgggaggctgagacaggagaattgcttgaacccgggtggcggaggttgtggtgagtgaagattgcactattgcactccagcctgggcaacaagagtgaaactccatctcaaaaaaaaaaaaagaattacgagcccaatactctgtggagtacaacacattttagctaatagaacatttgttagaactgaaagcaaaagatatgcatcttgggaaatctgtccatctcaacccttcaaaaatagacatcggcagtgaccaatgatggcttttaaagttatggggcagacttggctttaacagttgctttttgttttgttttgaatcacttgactgtgattatttttactgtctcttccctgatggaggctgaaaggaaggggtggggggtggctgtacagctgacacagcgtagagttgtagaaaagggcaggaaagaagtccagtgttctgggaaaggtggtggcacaggcagcagacccatgtggcccaagcaggtctcttccctaacaagttactggctgctggaggtcatgccaggtggcctcatcaggttgtctttagtccctgttggtgatatgaggaggaaaaaggtggccctgtagatggaggccccagccactcctatctgtctaaacaaacttggtctggatcttctcaagcatcaaacaaagtatatagctccttatagctcttagggactgggtattttgatggcctgagagagagtcctagtcagattacctgggacagatggtggaaatccccgttttccataggccaagtgagaaggaatgattgcccttcgcttctctctgagggaaggaatgtcagtcacagccagaggcaggagaggtaggccagcagcctcagtccagctgaagctccttcagcaaaaccccctgaatcttcacacccaaaacacgaatttttccacctgaacaccaaacaggctggccagcaaaggtgtccatctccccatgtgcctcaactcccccgacaaaagcaacagcgcaagaggcacagaggctttgaatgccctcagaggtcccactgacctggacctgtccagtgggaagcagggtcctttattccacattctcctgcttaaggagtgaggatggccgagaaagcctctacccatgcaaagggggtacccaggcccacccctgccgagatactcaccccacacacatgtcgagaagactctgctccagaccttgaagaagaagacacaactgaactggaagctatccaccttccccaaatcccatgacatgaagatcaaagtcttcctcctccatcctcaattgacctttccctcacttcttaaatctctggcttccaataggatatgggacaagtggagtactagaagtgaggtttgaacctcaggaggtaactcgtagagccctagggtcttactcatttcaggggggatttccagggcagctttggagccgaagaggctaagaaagggcttaggttgggaagaggtggaatgggaggcacaggtcacatacctggaatcacctgcttttggccaagttctataaccagagggtctctggtcagggaggtgtcaataatacgtccatctaccaagcttccctggggggagagagcatcaagagcatacatctagcaccctctccctcccagcaggcgcgcaacacacacctggaccgctgggcggcggcagcccccttagtgcggcagcctagcgttccccttaccgctgtaaggaacaggaagccccagaaggctggcgcttctcggagatctctccaccctgcacttctccgtgccaggtaggaactggcagaaaagcaaggagggaaaagaggcacggaagagcaacgtctctcccctcgccacgtgctcgacgaccccagagccccgagtttcttctcccgaaccgcttgccacgtgtccaagccaaagctgacgtgtttcagcagggcgccgccccctcccaggccccgccccggccccccagacccctcaccgtgtagtgtatgtgaagcgtgtctccaaaagcagcgggctcggcacatggttctgggggctccacctacgatcggactacaggggtcacggatgctcttccaaagatcccgttctcgcccctagacccggcaccacccccaactcagttcccgcacttcctctcctcccggctcccaggttcgctgagaccccagtattaccacccaacaaggctcggcccacgggggctgagggtcgggactatctcctcaccagggtctccacttggagggtccggacgggactttcggtttcgagcccagcctcagcccggcacaccgccgcactgagcagcagcagcagcagcagatggagcgggaggagtgaggggcgcagggtcatgactgggcgcggggcagggagccggggcaccaggacaggctgttcgggtggcggcagccaggacagcgttcccgcggcgcccaggccagactggacgggacggggcgggtcgcgatgctagagctcctcctcctgcagcccttcctccaccttgtccccacctccgaaagggaggaggccgaggggcgccctctgtaccctccaagatccggagggcgcaggttctgacgcatccgttagacgttctgtcctataacgtgggtcgggccaaacaatagcacccatttacgattacctactgtgtgtcaggagctagtctctaatcctcaaaaccaccctgaaaggtcggcatgattgtttccattttacagataaggcacagggtgctcaggatgtgcccaaggtcatcaggctaggtggtgacagagacaggattcaaacccaggactgcctgagtccaacgtggttgctgtctgttcttccaagtcgtctccttgtggctatcctggcagtgtctggctggcagaccccacccaggcagttctcattcctctccgacctccagctacttcagcttgaatttctggaggttatagatccaagtatccgaaataaggcagggggctgtcctatccctgtcctttgaaaagctagctgaaaagagcaaggagctgttatcctgtaagaacagggtaaatccctgatcttttcctctggtgctactatttcctttctcctttcatcaacaaacttctcaaagggcagcacacgtaatccatttatgtaaagacttcacttttttttttttttttttttttgagatggagtctcgctctgtggcccaggctggagtgcagtggtgccatctccactcactgcaacctccgcctcccaggttcaagcgattctcctgcctcagcctcccaagtagctgggattacacccgccaccacgcccggctaatttttgtatttttagtagataaggggtttcaccatgttggccaggctggtctcaaactcctgatgtcaggtgatccgcctgcctcggtctctcaaagtgctaggattacaggcgtgagccaccagatttctttttttttttttttttttgagggggaggagttttgctcctgttgcccaggctggagtgcaatggcgcgatcttggctcaccgcaacctctgctcccgagtagctgggactacaggcatgcgccaccatgcccagctgattttgaatttttagtaaagacagggtttctccatgtctgtcaggctggtctcgaattcccaacctcaagtgatccacccacctcggccttccaaagtgctgggattacaggtatgagccaccacgcccagcccactttttaaaagtttttgttgttgttgtttgttgagacggagtttcactcttgtcgcccaggctggagtgcaatggcacgatcttggct

SEQ ID NO: 916216 - DNA, 4001 bp, Homo sapiens
caagttactggctgctggaggtcatgccaggtggcctcatcaggttgtctttagtccctgttggtgatatgaggaggaaaaaggtggccctgtagatggaggccccagccactcctatctgtctaaacaaacttggtctggatcttctcaagcatcaaacaaagtatatagctccttatagctcttagggactgggtattttgatggcctgagagagagtcctagtcagattacctgggacagatggtggaaatccccgttttccataggccaagtgagaaggaatgattgcccttcgcttctctctgagggaaggaatgtcagtcacagccagaggcaggagaggtaggccagcagcctcagtccagctgaagctccttcagcaaaaccccctgaatcttcacacccaaaacacgaatttttccacctgaacaccaaacaggctggccagcaaaggtgtccatctccccatgtgcctcaactcccccgacaaaagcaacagcgcaagaggcacagaggctttgaatgccctcagaggtcccactgacctggacctgtccagtgggaagcagggtcctttattccacattctcctgcttaaggagtgaggatggccgagaaagcctctacccatgcaaagggggtacccaggcccacccctgccgagatactcaccccacacacatgtcgagaagactctgctccagaccttgaagaagaagacacaactgaactggaagctatccaccttccccaaatcccatgacatgaagatcaaagtcttcctcctccatcctcaattgacctttccctcacttcttaaatctctggcttccaataggatatgggacaagtggagtactagaagtgaggtttgaacctcaggaggtaactcgtagagccctagggtcttactcatttcaggggggatttccagggcagctttggagccgaagaggctaagaaagggcttaggttgggaagaggtggaatgggaggcacaggtcacatacctggaatcacctgcttttggccaagttctataaccagagggtctctggtcagggaggtgtcaataatacgtccatctaccaagcttccctggggggagagagcatcaagagcatacatctagcaccctctccctcccagcaggcgcgcaacacacacctggaccgctgggcggcggcagcccccttagtgcggcagcctagcgttccccttaccgctgtaaggaacaggaagccccagaaggctggcgcttctcggagatctctccaccctgcacttctccgtgccaggtaggaactggcagaaaagcaaggagggaaaagaggcacggaagagcaacgtctctcccctcgccacgtgctcgacgaccccagagccccgagtttcttctcccgaaccgcttgccacgtgtccaagccaaagctgacgtgtttcagcagggcgccgccccctcccaggccccgccccggccccccagacccctcaccgtgtagtgtatgtgaagcgtgtctccaaaagcagcgggctcggcacatggttctgggggctccacctacgatcggactacaggggtcacggatgctcttccaaagatcccgttctcgcccctagacccggcaccacccccaactcagttcccgcacttcctctcctcccggctcccaggttcgctgagaccccagtattaccacccaacaaggctcggcccacgggggctgagggtcgggactatctcctcaccagggtctccacttggagggtccggacgggactttcggtttcgagcccagcctcagcccggcacaccgccgcactgagcagcagcagcagcagcagatggagcgggaggagtgaggggcgcagggtcatgactgggcgcggggcagggagccggggcaccaggacaggctgttcgggtggcggcagccaggacagcgttcccgcggcgcccaggccagactggacgggacggggcgggtcgcgatgctagagctcctcctcctgcagcccttcctccaccttgtccccacctccgaaagggaggaggccgaggggcgccctctgtaccctccaagatccggagggcgcaggttctgacgcatccgttagacgttctgtcctataacgtgggtcgggccaaacaatagcacccatttacgattacctactgtgtgtcaggagctagtctctaatcctcaaaaccaccctgaaaggtcggcatgattgtttccattttacagataaggcacagggtgctcaggatgtgcccaaggtcatcaggctaggtggtgacagagacaggattcaaacccaggactgcctgagtccaacgtggttgctgtctgttcttccaagtcgtctccttgtggctatcctggcagtgtctggctggcagaccccacccaggcagttctcattcctctccgacctccagctacttcagcttgaatttctggaggttatagatccaagtatccgaaataaggcagggggctgtcctatccctgtcctttgaaaagctagctgaaaagagcaaggagctgttatcctgtaagaacagggtaaatccctgatcttttcctctggtgctactatttcctttctcctttcatcaacaaacttctcaaagggcagcacacgtaatccatttatgtaaagacttcacttttttttttttttttttttttgagatggagtctcgctctgtggcccaggctggagtgcagtggtgccatctccactcactgcaacctccgcctcccaggttcaagcgattctcctgcctcagcctcccaagtagctgggattacacccgccaccacgcccggctaatttttgtatttttagtagataaggggtttcaccatgttggccaggctggtctcaaactcctgatgtcaggtgatccgcctgcctcggtctctcaaagtgctaggattacaggcgtgagccaccagatttctttttttttttttttttttgagggggaggagttttgctcctgttgcccaggctggagtgcaatggcgcgatcttggctcaccgcaacctctgctcccgagtagctgggactacaggcatgcgccaccatgcccagctgattttgaatttttagtaaagacagggtttctccatgtctgtcaggctggtctcgaattcccaacctcaagtgatccacccacctcggccttccaaagtgctgggattacaggtatgagccaccacgcccagcccactttttaaaagtttttgttgttgttgtttgttgagacggagtttcactcttgtcgcccaggctggagtgcaatggcacgatcttggctcactgcaacctccacctcccgggttcaagcgattcttttctctcagcctcccgagtagctgggattataggcacccaccaccacgcctggctaatttttgtatttttagtagagatggggtttcgccatgttggccagactgctctcaaactgctgacctcgtgatccgccagcctcagcatcccgaagtgctgggattacaggcgtgagccaatgcgcccagccaacagtcttaactgtactcattcttccaatccacctgcaacaacctagacttcctccctatctcctgtttctgttagtggctctgctaccagcattcgttcttctctcatctcccacatccaacgggtctactctggattctccttccaaagtctctccagctcttcccttccattcccatagctacaaccctcccacctcaggataagaagccttcattatctctcatttgtattgtttaaaaaaaaaaagtcccctcagcaggagggaatttctaggggtgatgaaatgctctatattttcagaaggatgtgggttacatgggtgtatgcatttgtcagaacttatcaaactgtatacttacaatctgtgcatttcactgtttgcgaattacgtatcaagatattttttaagttaaacaaaaaaaccacaaaactccaa

SEQ ID NO: 916217 - DNA, 4001 bp, Homo sapiens
agcaagacttggtttgaaaaaggagacaaaaggctgagagatctgagttcaagtttccgctgtatggtaagtttttaaaattctccacactttatttgtaaagcagtgatgataatccctatctcctacagttgttggaagattagaccagtaaaaggttgaataatagattattattataatcggcaaagggggaagtatttatgccacacttcctccttcttccttcatgccagtggtcgtcagactaaggtctggtttggagacaggagagcgagaggagtatgagtgaagagaatagaaacagttcaaaacaggtaaggaagaaaccaggttataggtgaacccggaggctctccatgggaccttaaactctgacttgggagctgagtattcctctggtagttagtccagggctggagtatttcccagaaacgtaaaggcttctttagcgccacctggtaggtgtgtggttaccctccaagggaaagcttccacgaagaatagacaggggctttgaggagtagaaaggtaaaagggaaggaatgatggatcaaaggggaaatgagctttcctggaataacaatctcgtagaaaacggcaggacgctggagcgagaaggggaagtcacatgccacaggagagccgctggagcagacgcttgaggtccccaataatctggtgcaaagacagatgcacttctggaccaggtaaaggccccctgaggtgggtgccgcacacgcggagctcagcggtgggaagccaggatgaggacgcagcagcggatggggagaaggcataagacgcaggctgggaattcaccatctctgattctccctggaacctgctccgacccaaggcaggttgtcctggcccaggtcaagatgccctccccgcagctccccaggctatttgtagtcgagcggtcactcggcggcaggctccacagcagagcgcctcctccccgccccacaccccgcagccctggctccgggaggcggcggaggggggaggggactacagctcccggcatgccccgcgcccggcctccccggggccgagggagggggcgccgcgcggcgagtggggacctcgctgggtcccggcgtcggcaggggaccccgggagggcgccggaaccctgtcgcgcctgcgtcgcacaaaggccgaagggccaggaaagcactgtggggagtcgctccccgtcctggcccgtgttccaccgcccgggtgggcgagccctggcaccgccaccaacgaggcggcccgcggctggcagctccgctggggccgcgaggtcgggggcggcgtggcgtgggaggcccggcctggccccgggctgcggctcgggtgcccgcggcggtcgcctcgccccgcccctctccgccgccccgcgcgcgccggggtgggcactgcaatcccgaccccctgcccgggcccgggcgctgccggctggggagcctggggcctcggcccgcgcacctaggccgcccccctgccgagcgcatggccggcctcggtgccttaaacgacgcagcccggtccgggacggcgatgccaccggcccccggcgggacggccgcgaggctgcaaaggcggccgcctcgacccgtgcccggccgcgggctccgggcgcggcggaagggcggcccgcggggccccgggttccgacgcctccgcaggccccgccgcccctcaccttcagcacgccttcgtcctgtttggggctgatgtccactccctccatgggcagcggcgccgactgcgccccgctctcggtcgccttcatctcctcggctgtcatctccgcgcggcgcgccgtttatccgggagctggtgccggcgcgagcgcactctgggccgcgggcgggggcgctacctgcggggcgtgcgggaggccgggcgcggcggcactgactgcggaccgcgaggaggcttgagcacctctgcacgcggcgcgagagctggggtaggtgggtcaggagcggctcggggagcgattggtcccgccccgccgcgagggaggggctgggaggagcgggagcgcagacagagggggcggggtgcagaactttctagagacggcgggactgagccggttcgggctcagtgctgcgggcgcttcggaatttttttttctttttttttttttggttcttgcctccttctggctgcctgccccctcccccttctcctgggaccctcggactcgggatctccccggcggcctcccttggcccttcctccctccctcccatccccgcccgcttccctgtctaaccggattcttccagattcttctcgatcgatctcccgacatcactccaccagtccgctgcgcctgcggcggggtgtggggagcgcaggctgcgggatggcagtggcggcgccccctccccgggaccggccgtcaccacgggcggcgtggcctctctgctatgacccgcgtagacccttccctacttgggggaaagagggcaagggcgtgcgcggggagcggggagtgagtggacagcgctgccccgctgcagagagccggggaaagcgacctcgatttccccagatccgagaagccccggccaggcagcgatgcctcgctcagcgcctgcagatgctgcgagcagcggggttggcaaggcatggcccgcccagctcggaactcagatggggcacacactcaggggacccttcccggcggtaataaaactgccgtttccgcgaatgcttacaaagatgggttcccctcacgaaaaaagtcactcggttttcctaaaggcccacagaaggagtattttcttctcaatgtttgcttcccgagtgtttttcgacaggctgtggagcgcgcaggtgccggtgtcacctaagctatggtcgtgggacctagagagccatctagagaggggcctggttttgctcagcacctaaccccagtttagcatagtgcctggtgagtgatgtcccaatagttactggctgcatgaattttccttttttaaatttctttttccaagtcttggctgatttttttttcttttttttttttttttgagacagggtcttgctctgtcgcccaggctgcagtgcggtggtgcgatcttggctctctgtagccgggactacaggcgtccgccaccacgccgactaatttttgtatttttagtagagacggggtttcgccatgttgcccaggctggtctcgaacatctggtctcaaatgatccgcccgcctcggcctcccaaagttctcggattacaggcgtgagccactgcgcccagcctgaatttttattccaataataactgtatttttggacttcccgttatgtgcccggcactgtgcgattggacgccattagtctcatcaaactaaattgaaagctttttagagatgaactttcagcgtcataatgtgatgatttattgtagtccctgccgacggaacttgaaagggatgcagaagaaaaagcccttcgcttcagcaatttacagcccaaatgagttgagccataatgaagacgtctctttaggtggctggagacagcttcagaggatacggggcgctgcctctgtaggggttaaatccactacttttatgcagaagtaacagtgccaggggtcacccaaactccgggagaccaggatggtgggtgctggcttccggggtggcagtttaccgcaaactgtccttggcttgcacctactgattctccacgtgtggcggtttcttttctgcgtctttttcttcatcggaagcggacagtgtgggaccccccctttaattctgttcggcacgtacatagtggagcccttcagattgcctgccgttacattaacacatagcctaataccctagtggaatgagcatgtgctttggagtaagggacgttgggcggcccatgtgttatgttagctgtttaaattggggcaggttagttaatcttcatgtctcgatttcttgtctgtaaaatagagatagtaacatttgtaaaagagggtgattta

SEQ ID NO: 916218 - DNA, 4001 bp, Homo sapiens
attctggttctgagctctcacaaaaaatggcctggcagctcccacctaaggcagcctcccacccaatccacctcaccccatccctttctccccagtttctatagctaacttgtgtcagcttgctggggattttcacacccccaccagagtgcagatcccctcccactcttttccccaacagttgggctcttgttctcaaggccactaagtcccagtctctcctcctcagcctgtgagatggtcacagcacattggtaatcactgactcacccgatcccccgaggaggctgggggaaatgcagagggccacaggatgtatggcccacatccctttggcccttcgcagagctggcgggcagagaggtgccagcgacaccacttccccttggaacactgtggaccctctttgagccagctctggtgccagtgggctgatgtcagattctctaccatcggagaggccaagatctctagacagctccactgttgccaacagatctaatctccttattccaaggcagatgaaatccaataaggctgctaagtccacaacttatccctcctgatgggcagaggcaaaggcagagtcggccataccaacaataacgccagaattattactgcttcttagaaaactctttggggaagtgagaactatttccccaaatttctcaaagattaaccccggtttaccaatgttttcgctctgcaaaacttcattttcagcgcaaacatattttctggctccttcccggtgataccagctcagaacctctcgcttcatagagccactgacatcaatgtccaattcccacaccaaagaagaatcccaaagtcagctctaaaaacccatttatacagaccgtttgaaacccacagaaagactaaaaagcacaggctaaacaacacaaaccagtcactatggcttaacgtgaaaagggggggaggaggcgggatggtttgtgtattgtttcacttggagaaataccccagtgaaatggtttatccacatgttcagcctttcaggcaaatccactctaacttagcaggatgcctgcaggccgttctgaaaataagcagaatggcatactctttattccacccccttcaggagctgccagccgcctccccatccccctctccccccaaacatctggtctgggctgggagtgggacccactccctgggaagcctccatgttcgcaggagaggcggtgtccccactcagggaagcctgctgaggagcgagccggccgcgcttctgaattccccccacccgcgagaggctccgggctgagaatgctagggacggggagcctggcgaagaagcggggaaacgggaaaagggcagcagaagggggaggaagaaggagggagaagcctggttcctaggacggtcccgaactggggacttctcctaagggtccagcggtggaggcgtcggtcccgagatccccgacggggctgtccgggccggccagcggctgctcagaggttcctgggaagacactggaggccgggatccgttcgggaccccgactgaaagggtgggcgggacgggggcccagcacaaagtcccagcccgggcgtcgggacctgaggggcggtacgcgggggaaggggctgggctcagctctcaccagcaccagggcgaacctttcctccagctcacagggctcaggcatcggcatcttgccgggcggcagcaacaacgggacagaggggggctctcccgggaccccctcggcgctctccaggttgcccatcgcggcggggccccctcaggggcctcggccccccacctccacgctccggagctttcggctccgcggctccgaccaggctcctccctcagcgccggctccccgagtcccgactcctcggccccgtcgagggcgccgggggttccctggagtcccgctggcgggggcgcgcggcgagggcggaggcagcgtagcggacagccgcaccgaagcaaggcggacggaggcggccggctcttgctcacacccgccgcctcgccgcgctcggcgcgccgcccgggcgctgcccctccccgccccccgcgctctttcccttcccccgccaacctcgcttcctcccacccacacccggccgagactcgggcttcccccgcgagcgccgactgcagcccgcgcgacgcgcgccccattcatgcaggccccgcctcccgcccagaggcctcacaggcggcccggcccgccccacctgcgcccgattgacggccgcgtctgccaatcacagcgcctcccgcccttgacggcctcgtgccgggcgccgagcgctccctggcggcctcagccggcatcgaatcaccgcggttcccagagggcgtgaggggctggcgtggacacaccgggaatggaccgtaccctttttcaaaaggaactcatgatgtatacaagtaagtaaaatattatacaaggcatggcgtacaaaactaactacaagagaagtagaaacaagcaggatactcagaagagggagagagatagtacctgttaagagtcggggtgagggagatcatagttggaccaggcattgagggatgaggaagcccttacccgacagaggcaggggaaaaaacgtttgggaggagagaagcttaaccatctggctgcgtgtgaaaatggagaggcgggagaagaacgctgttctgggctcagtcggcggctgggtcgttgacatttgcggtggaaatttgttgtctagccgccatcttcttccagtgagagcacccccttttcttttaggaaaccacctctcccctcttctcagtctaaatggagctgaattttatccccagttccaaaggaccgcatgacccaggcccagtcagtcacaacattttcctcctctacccatggacactgttttagggattgtcacttgacccaagcccagacaatatgatatatccaaggctttctctgaaacaatcaggaaagaggcactcactctctctccatttaggctgcaaaattattagaatgtaaacctgcagccgctggtggccgtcttatcatcacctgtaacacatcaagcctgcttgagaatgaagccagcgcagaggagagaaaagctatgagacaggacaaaattctaatgacatgccaagaacctggatctaaccatgcctgaagttatcacctagatttttaattcatttattcaacaaatatttattttagaaagtttattctatgccagatactattctgggcattgaaggtacatctgcgaacaaacaggatatacattgtgtcctcttggaattcacaatctgtgtagaaggaaaggtagacaataaactagacgagtaaaatgtatagatgttagtgatcagtgttaataaaaataaaactgaaaggtgatagagatggaagaggcattaagattttaaatagagttgcttacttgggaggctgaggcaggaggatcaattgaaactaggaggttgaggctgtagtgagccatgttcatggcactccactctagcctgggtgacagggtgaggctctgtctcaataaataaataaacacagctgttgcttgtcacaggcatgatggcttcaaggttaattttcagagctggagcgctagccgcataggcctgagggcttacagtcccaatggggtggttgcagtgtgcttcatggcatctggaggtggcgttcctactgatgacaagcagatgactgggctggagagggagttcatgacagccatgtatgagattggacccatacaatatattacccccaaaggcagcttcaggcaccagggaagaccctaacagctccctccatcaccaagataatagtgagctgcatcggtgaagaggacaacagtgctgtcaactggttctggctgcacaaaggcgagacccagtgatgctctaactatgaacccattacaagctgatgtcccacaagttggcccagtgagccctggcactaattgctcaaaatgtgctgtaa

SEQ ID NO: 916219 - DNA, 4001 bp, Homo sapiens
aggaagggagaggatgagactattaggtacttttctggaaggaaactttatatactcctcagaagtgaaatctctccagtggtcaacttgtttaactggaagtctggacagaagcggagcagcagccctcctcccttcgtatccaggatctaatttttcctgaagaattgtgagcaaaaaacaggagtcgagaaggggactggggcagtggttcagggccagcatcaaggaagcactttaacccgggagttggcattcccctgcacactttcttctcgcctcagaacatgtgggattcccattttccctttggattttatgggcagaggcatacatccagctaggaatggaaatgtcaggagaggaggcctcttggtatctgagataggatgagcaggaacagattgcttttcttgtcaagggagctataattgcagtaagctggagggaacacctctggtgaacactaagctgacctcggcatgccctgggcaaggccaggaccccagatgccaccgtgattttcatgacagcccactctccaggggaaaaggcccaagggtgaagggtggtatgggaatcttaccactggttgggttgtgtaaatcactgctacacagtatgcatgttctcaaaatgcagctgttttccgataacccttttcctcagcatgaaaacatccacttccctaagggacctaaaatgaatcccatccctttagtccccaaacactaagaaacccatttctcagagcttctgcagcaagatgtgggttcaaatccaggagctcccttggatcacatttcccattggattttctgagtcatcactctgtcttccccggcagtgaaacccacgatccaccagctcaaccccctacacccactagtgccagacaatgacagagagaagatgaaagaaagcactaacctgtctccaaggttcctccggcaaagggagggaaccacctggtactggagtttggggttggagggattcccctcttcagaggcaggtgacggctctcatcctcagtggctcttcctggacgaggctgagcctcccaagttggtgaggggaactgggtcccctgaggatgaggagtcaaggttggaggagggggagggggaggagaaggaggtcctacttggggaaggtggcacaccccccacaccctgcttgttacccgggggaggaggggaggagcctctcccaaccaggagttgtctcctcccccttgggggagttcccctcccccccaaactggatctttctgaggtggagggctctttctgtctgctggagataggagcggaggggctccaccccgttccactgtctaggcacgaggaagttgagggggaggtcttcccctctccagaaggctgaaagccgattcctcttctttccctggagtggcttctgaacgtaaggactcctgtctcctgtgaatagtggtgggccgagggtgcctactccacaggcacagccccgtctctctttgcctccaaagtcctgaactgttgagagtgtgtgtttggaggggcgggggcgcgctagggtggtctcactctgcttccctacggaaagctcccttctttccacttctgggggtctcctccccggccagtacaggggtcttcctcgcctctaggcaggagagaggcgtcccctccaggggtctcttctttccctcacccgagtggtaagggtcttttctctccaacagggggagaggttgctcgcgtccccgctcccgcctccgctcccggggtgccccagagggtggggctttcgtactcccggctgtccctgagctggcctgggcagcacggtccgggaggccgcggctcgagactccggtccctgctactgtggcggcagcacctcctctagggccgtcctgtcgggtccgctcccttcggcgcgtggggctccccgcgctgccaccgctcgggctccgaccagtctgggctcccggggagccagaaggcgggcagacagtgtcagggctcggcgcgggctcgggctcggctcggctccgctgcaggccccggctcctccccggcctccgcgccgcgctccgcgcccctccccctcccccgcccgccggccgctgccgccaccgcctcccggcgcgggttaaggaggagccgggagacgccgagccgcgggcagcgccgagccgcgagcctcgctacccggtgtgcgctccgcctggagagccacggccgctctcacgccggcgagggatctcgccgccctcgcccacctgcggccgcgtggctccgggagttcgccgtctacccgggatgacaactcactgctccccgtcgggagagtccctagtgcgcaccgtataccgtcaattccagctgacaccccaactccggcgtttcattctgttaaactccgtatacagatgaacagccccagctttctcaggactgtctttgatgggcttctctttccctcgagataatttataaaggatcatgagcattgaggtgaagattggggtgaagtttatatgttacccttatatcatcctggaattcagtaaatgctccttgaatgagtggatacatgataaatgagcgtgtaacggtgaaataaacatcagaagatctgggtcctgttccttgtttcagcttcctaaacttgtgcatggcccttgttctccgcaatcttgctcagcgaagaagggaccttgatacttggcctgcttaccctttacagctgtcacatcctgaagtcatattattctgctgcaaattctcatatatttcatactctggctttttttttttttttttttttttttttgaggtgttgtttcacttattgcccaggctggagtgcaatggcacgatctgggcccactgcaacctacgcctcccgggttcaagcgattcttctgtctcagcctccccagcagctgggatgcctcagcctccggagcagctgggattacaggcgcgcgccaccacgcccggctaatttttgtatttttagtagagatggggtttcaccaagttggccaggctggtctcgaactcctgacctcgtgatccaccttcctcggcctcccaaagtgctgggattacaggtgtgagccaccgcgcccggcccatactcaggctttttaaacttttatcaaactaccctactttctttcctttctttctttatctttttcttctttttaaatagaggcagggtctcagtatgctgccgaggctggtctttaattcctgggtttaaactattctccctttttatgcctccaaagtgctgggattacaggcaggaaacacggcccggcctactctctactttatagcacataagataataggaggccaggcgcagtggctcacgcccgtaatcccaaagctttgggaggccgaggcggggggatcacttgaagtcaggaattggagaccagcctggccaacgtggtgaaacccctgtctctactaaaaatacaaaaattagcccggcgcggtggcggacgcctgtagtgccggctaaggcaggagaatcgcttgaacccggaaagcggtggttgcagtgagccgagaccgcgccactccactccagcctgggcgacagagccaggttccgtctaaaaaaaaaaaaaaaaaaaaagaattagccaggcgtggtagtgcgtgcctgtaatcccagctacctgggaggctgaggcaggagaatcacttgaaactgggagacggaggttgcagtaagcccagatcgtgccgctgcactccagcctgggagacagtgagacaccgtctcaaaaaaaaaaaaaaaaaaagataatacgaatacaaaaatattgcttgcaaaatatttgaattgcccccaaaagactgcatacttaagttgtatgtatatattatatgaataattatatttacaatatgccaggcattgcactgagcattctgcatgtgttgtcacattgatgattctagcgattccctaagacactatta

SEQ ID NO: 916220 - DNA, 4001 bp, Homo sapiens
ctagtttttgtatttttagtagagacagggtttcaccatgttgctcaggctggtctcaaactcctgacctcaggtcatctgcccgcctcggcctcccaaagtgctgggattacaggcgtgagccaccgcgtctggccaagccttttgatttttatattactttgtaaataggaccagtgcacacagaatcagggaagaaaggcagattgtactattgccacactactggaaaaatcatctcccagtttacaaaacctcacataaaatggaaacctctactgaaggcccatgtaaagttgtgcagcttgtgcactgaacaactctagagggtgacatttatttcacaggctattatacttgctctaatttaaaaagcatgttttcttttacaatttgtattgtatttatacagtggcattttagtacttgcatgtggttatatatattttaactaagcatgccactttattaatttcttttccagaaataagactataacccctgtcttcttagtaccacaatgagctatcatcattacactaaggtggttctgaaatgctaacagtgtagtcttttttttttaagtcttttgttgattttttttaattttttttttttttttgagacggagcttcgctcttgtcacccaggctggagtgcaatggcgcaatctcagctcactgcaacctcggcctcccgggttcaagcgattctcctgcctcagcctcccgagtagctgcaattacaggcatgcaccaccatgcccagctaattttttttttttttttttagtagaaacagggtttcaccatgtttgccaggctggtcttgaactcctcaggtgatccacccgcctcggcctcccaaagtgctgggattacaggcgtgagccactgcgcccggccttttgttgattttaatagatacatggaatattctaccattaagcaaaattgtgtaattctatttcacggaactttggaagacagaggaattggctgtctcttttttaggacacttattctctccctgaaaagcaactgcacttttttgacatttgtcatctgcatagagttcacaggccctccacacctctaccttcaaatctcagttttactttcacctccgatctttccaggcttccctctctccccgcatcaatcagtagatattattcctctttttccacaggatatctaagtcttaattttctcttctacttcctgaccagcccgttattattattgccaacactttcttgcccgggaaacttccagagtggctcctccgacccatccccatcctgagcggggaaatcttgctacattctcaagaaccaggaaaagggccctgcaaaagggtaagtaagatggaggcggtgttgcctagtggtgagacagcctgggagcaggggagtgtgtatgcaggttggtctttgactcaatgtagtacaatctcagtcttcatctcagccacagtcggcctaagaaggtaggccaccccagccctcccgaggccgcgggcagggtgcggaggtcagacttccagggaaggccaaggggcgctttaagcagtgagaaggccacggccaggaggtggacgcagaaaaaacttgcaccctggctcagattcttcccgtgtgacccaaatctccactcgtggcccgtgccctgctgctagacgccctgacctccgcgcccggaggccttgctccccgcctgtgcccaggccaggcctgggactccattgctgcatcccgctcacctccagactgcagtcgccgccgccgttaggccgtagctccgaaggcgggctccgggctcctccaacctgggggccgagccagggccccggacgggggctcgcgccggaccggccgggtccccggcggtgcgggcggggtgggaaccccgggggatcccgggaggggagggggtcccgggccggggccgggggtggggtctggcaccggagctttcagtttgttccgctgtttgaaattggcgccggcggagcgttaaggtcacgtgacggaacgtcgccaatcggcgccggccttgtctcggcattccgggctcgaaggctgtgcggtctgccaggagctgcggccccgtccggcccgggctggtaaggcggaccgcaggccggcttgtgggggaagaagtggccgtggggccggggaggggccggaggggtccccgccgcgtgggtgggcgagccgagggagagtttggggacgcgcggaagcggcgtgacaggcccgggtccctgggcccgcttttcctgccgcgctggtcacgccaggcgacacgcccccgcttcccctcaggctcctctgctccccttttcaaagctcggctttagttgatttcctcactgggggaaatcgtaccccattttcccacagtgaacgatcgtctgctccccccgattagactaagttcctttgagggctgcgtattatctccgctttcttccatcttgaaaaaaaatgtcggcaccatgaaccctacctcagcgcgaaacctgtcttttgcccctcccgaagccaagccttcggatataatagaccgtagtgctttatttattgacttagtcaaccagtctagttgagcaactgctgtgcgccaggcaccgctaggccctgaagatacaatggcagacaaggttctttccttcccctgggctcacagcccaatcctggaagaggggcacagacattttaatcaaataaacaaatgtgggctgggcatagtggctcacgcctgtaatcccagcactttaggaggccgaggcgggtggatcacttgaggtcacgagttcgagaccagcctggcaacatagcgaaaccgcttctctactaaaaattagccgggcgtggtggtgcgtgcctgtagtcccagctactctggaggctgaggtggaaggatcacctgaggccgagaggtggaggctatggtaagccatgatcacaccactgcactccagcctgggcgacagagggagacaccgtctccaaaacaaacaaatgttgaattattgctgtaaattgaaacattagaggttaatgatactttgagtatttacaataacgagatcttgagaggtaggacaggaaaggcttttgtaatgagagcttggtgtgagatctgatgccttttacaaagaaaggagggaactcctctaagcagagggaatcaggcgtgcaaaggctggatggcaggaggaagcacagtgagtacaaaggctgagaaatatctgaggggtttgagctaatcgacctgaatggagtgtggtgtgagttgaagctggagccggaggaagcagagccttagccataccgagaagttttgtgcttatccaagaattaaaggaaaccagtcataagctttaagcagaagtgaatccaggtcagatttgcattttaaaaggtccctctatagcggggattgctagagtggattagggcagaacagttggatgttgcaatactccaggcaagaactgctggagcttgaaaaagggtggcagggagagagagagaggaagagaaagaaggagacagagagagtaaaaaaggggcattaagaaaacatgtttaagaggtaaagttgacagggcttgatggtgggttggatgggaggtagaagtgtcaagattttcagctgcataactgaaggaataatgacactattccctgaccaagggccctggaagataatcactttggccaagggacgggcggggggttgtcaggggaatgatcgtgaattcagtttttgtttttttactacaaagcaatgctcagaatgagttttttttttaattatatatttatttttatttatctttttattttttagagacagggtcttgctctgtcccccaggctgaagtccagtggcatgaccttggctcactacaacctcaacctcctgggctcaggtgatcctcccacctcagcctcctgaatggctgggaccccctacaggcacatgcca

SEQ ID NO: 916221 - DNA, 4001 bp, Homo sapiens
tgcagtgaccccgggggggccagacaaaccctgggtaaacagggctgataggaggtgacagcctgctcttcccaggccagccctggtcctgtccccattccgtaatctggactgtgccccctcagcctacagacatgttgcttgctctgtcgggggagccctggaaacgaggtcagggctccctggcctcaaggggaaagaggccgggaggggactccaggtccttccttttcctccttttccctcctggagaccttggacaagccctttcccctttcttggcctcagtttccccaactgtaaaaaaaatagggggtgcgcagactggttgacctcctaaaggcctttttggctatgatgtttgaagacaaaaaaagacagaagggctctgaaggcttccatgcatcctctcagttgtaccttgcttcaccctgtttcaaggcctcagtttccatctaatttactcttcaaacacatgaggcctagaagaaaccttaagatcatctacttcaacaagatcaattaaatgatgaggaagtgaggcccagggcaaaggacttgctgaatgtcacacagcctggctgagaacttagcatatctgactactttcttaacatctgtggaggatagaacccaattcctcccagaaggtttttttttggcagggggtgggggagcatttcccacagcccccattaaggccactggaggggaagcagtagctgctattgtcatcttaacattcaccaggatgcccaaacagtatcaaatgcagaaacggacctcttttggaggggacaagagacagcaggcatttcgtggtcccactgggccaggttgtggcccagacacccttagcaagaccaacattgaaatcaagactttccagctctcccgcaaaaatcacagaattgaacataacaatagttcttgggcagtttcagaaaccataaacagcatacaaacactttgagcaattaaaaaatatatagtttgttattgttggagccctcacctgtattcctgtggagaggggtggtgattttgccctgagtttcgaataattcctgacattatggatgaggtgtcactttctatcatctccttgggaaaagacaagcagaaaacaaagctcccatcagcgacgatatggacagggcagaaacccacagttttcccgcaattcagaaagatggagcacaatcaactcacagaacactttttttttctttaaagaaaaaagttctagaggattcctgggcatctcaggtcactttcccagggcaattctacagcgttttagaaacaaatgaagagaatgaaatgaaattcccggttctttcgaattaatgggggaagagcaagggaagctctagaatccaaatgtcaaacctggaaaatgtggactcacaaaataggaatcagaaaaacgatttccttccaagccttatattttcaacctcagtttggttatgatcactttcaaaataaggggcagctggatgtgacatgtgtatttctctgggggaacaaattcccacttgcaaagggaataatccccgcaagctcctgccctgaaatgccttcagaaatgccacaagcccttactggaaaaccaatccaaccacccacgtccccgcaacacacaaacactgccttaaaaaaataataaaaatatttgagttccctaagtttctcaaactccaagcctgaaccaacataaaagcccaccaaagcctcagttccgcccccaaagccatcgaaggattcccaggaaggaggaaaagggagcagagggaggcggccccgcagcccctgcgcccgggtctctaccctggaaatgcaatgcccggcattgcccgggaggagggagcaaagccgaccctgcaaggcggtacctggagccgatcctcgcggggccgccgctgccggcgctccgggggtgggcaggggttccggaggggggctccctcgcgctcgcccctcgcgttccgcaatttggccgccgtcgcagctcgaaccgtttttaaatttccctctctggagctgtccagctcagagcatgcgcagtagccgtgcggggggcttttccccaagggtcagttacagggcagggtcaaggggattgcagcgggcgtttcccagcagccgcgagccttgcacgccccggggttctggggggggggtgtgtgtgaggggggcggggcggaggagtgcaggggtagggacccctcttcaaactttgccaacagtgacaacaactgcatgcccgagagcatgcgttgaggagcagtgggagggtgatttcggccaagggaattaagttgcaaaaggaggctgggtgcattaaaacttgcaatcccgcctggggcaaaggacgtgggcgggcggagagatctgttgcaaccccctctctcccccaaagtggaggacgggccgggaggcagagacggggccccaggtggacgcggattcggtccacctgtccctttaagaaagttgcgcccgcgcgggctggcgcgcagcgggagggggctgcggagcggggcgcggggcgcctccacctgctggggccgcgagggggggcccgggcccagcgcggcggcgaggcgaggagggctccccgggactgcgcgctgcgcccccctgtcccgcgaggagggtgagcccgcccggagcgagtgcggcggggctcggcggccccggcagccgcgacgacggcgacggcggtggcggtggcggtggcggcggcggcggaggcggaggctgcggcgttcggggtacggcgccgcgagcccagcgcagccgttgggggcagtggcccgcgtgtgcaaccgcgctccctcccttccccgccgcccggcccgcgccgccgctgccccgccccgcctggagccagccgcgggaaaggtggcgcggaccgcggacggcggcggggcccagagcgggcagaggtctccacaggccccttaggaggcttggatgagtttggtcccctggaaagtttgcgtttctggcgccctaactctcaagcctccgttgcagtaattgccacggcagcaacgatattaggcacggctacccccattctttcgttacttattgacgcctgcttctgggttcttcttcgcatcagcccttgatgacatagcatggtcctccttttgcatggggggaacccaaagccccgagcggcagtgagtgggtcggcggcgcacgggcagagcgcgggctcccgcacctccccagctcgcgtactgcacgtggacctctgcgccgcccccaccgagtgaggctcaggcacccgaagcgtctggagttgttttgaggctgtcctcgcgttatctacttcgcagcaggcaggggaccagtgtccccgcacctgtgactgtttttttttttttaaacccagtgtttaagttcaggaagaactcagggctcccctggactgggtgtgcctggatttcaagttctattcaggtgggctgtgaccttggcactggtccatgtcctcacaaatggttttctggtagcacctggacgtccttcctcctttcttctctgccaggagtaaatagatcagctttcattctctagggaggaaaaagatgtagtttacagatgttagttgaggtcacagtcatgaaactttctcagttttcatctcccgcgaccagcatgtatttaaaatgtgtgttttgaccggttaggaaagtggtttacatagtttatgttgctttgaatgtccctgaatgacatataattaattcaccagtaaagttgtaagcattcaaagcatttgggtttatttctgttaatccttcttggagttgtaaggaaacgtgggtgacttgacaacctccttgtgaggtcacagtcattttcattaaggtgtaattttatatcttcagaatggtttggaaagaaattgtctcttctgaaagctgatggattcagtaaagtttttaaaataaaaggcatccagtctgtgagttctgtag

SEQ ID NO: 916222 - DNA, 4001 bp, Homo sapiens
aggccgagatgggaggatcacttgagcccaggagttcaagaccagcctgggcaacatagtgaaacctcggctctacaaaaaaaaaaaaaaaaaaaattagccaggtgtggtggttggtgcctatagtcctagccactcaggagtctgagacagaaggactgcttgagtccaggagttggaggctgcagtgagctatgatggggccactgtgctgcagcctgggcagcagaatgaggctgtctcgaaaagaaagaaaaaagaaaagaaaggaagaggaaaaagaaaagttgtgcagctaatctctccacaattttttccaaggactttaaaaatcatctaccctttgcctgttcaaaatcaacaaccttgaaataaattttcctttgcataggaaaagctcactgaacttgtcacttcagtctatttttcctgattcatgataccacctcccctttcaggggtgggaggaaagagaatgacataagtacccaaaaaactacagaataaaccctaatctacacacaagatgagagttgcagatagcgtcactggtttcaagaaggtgatttgtgaatactttacgctgcaaaaacagtggccatctgctaatagcaataatctgcagtaactgcattcccttataaaaagtttttaaatcaccatttattgtggaaaacccatatttcctacaaacctttcagcagtaaagtttactacctaaaatctgttcactaaacctacctacatcactttctcccctaggaaatcctcagtttatccgaagtaaacacttcatggaataagtttaaacaaaacatctctgcccacctgtgtgaaactctgcattgcagcaacaattttaacagtgtaaggaatctctcaagaaaatccaagaacaatttttccttaagaaaaatgacagttccaaatatgaaggtaaacaaactttgggagaaaggatataactgtccaactctttaaaatcaattcgtacagcctctgaatgaactcatcatacaactgtgacatcagatagccaaaagaattaagagtgtagattagagaaaagcatctttttttttttagtatgtctgcaaaaaaaggcgggggagggggtgtctaaactactgattttccttaagcaagttttttctttaagtttacttcaacaacagcttcagcaagctttcaagtgagtaaagatgatacagagcatgctggtgccacagcgacctacgtatccaggaccggttccgagcccagtccaaatcgatcccggacaaccctgaagcaaatctggatgaaaagccctgcaaaagatccctggcatgtacaggcagcgccccaccctggagggaaaagacgacacccctgggacccgggttaattactgaccccaggacagacccagaggaggcgaaaagtcgggaactggagcccaagattgagtctggtgtccagctactaccccaggccggacacagaataccaaactagggagcggcgaggtttggggcagcacacatgaggggggtcggacggacgaacagaggcccagcccatccccactctcgagtcccaacagcaacaacagctctgggaaccccctccctggctccgccccgcccaccccatggacccacagccagctcttcccgtcccgctggcccggagaagtccgcggcggtcgacaatccccttccccggacgccggcagccgagccctcagcccggatcccgaagcgggcagcgggggcacgagaacgccagctccgacgcgggcccgcggccgtcccagtccgtttccctagccactcaccgtccgcccaggtgctgagagggagcagggcgcgggtcggcgggcgcgaacccccagactccgacccgcgctggagcccctacttggagcagatcgagtctcagccgctgtgcctacaaggcctctctccggcccgaatcttggaaaagcacttccgggggagcgggggagggaagggttttggcaccggaactgctctcagcccggagctgccagggcctccagggcggggcggggcctctctcgccgggcgcccacagatcagcctctgggctcctaactaaccctttccgccccgcgcctcctcgattccccggctactgctgcaccctttgctttaactgctgtttgagttgttttactccagccagctaattttacaaataaggaaaccgaggctcggagaattaggtgcaagaatccagtgcctacacccggcctcccgactcccttcagtgtactctacgctccaatctgcctcctttaaaaaataatgataatagttaacatttattgaacgcttactacgtggtaggcactgtattaagtcccttcgggtgcattaacttatttaatcatccccaaactccttggggttggtgctattatctacgtcttgcaggggagaaaaacggtcaaagataccaaacccaatctcacaaatgttggttgattttaattcacgtgtgtataaatctcatctacctataccaagattttgaaattatttaaaaacagggctcaaactatattcctatattctgtcatcactggtgacttcaacagaggcgagagctggggttggggggttgggggggttggggtggggatctggaatctttttgcttgtctccttttatttacttttattttttcaccctggcaagttataaaatcatctctgcattgtaggaatccaaaatgataatgcatgataaacatttcagaatgtctggcattggataaaagttaacgattcttatacctcatcagcaataggcaatagaaaagattagttaaggaaataagaaagagtaggggttggccgggcgcggtggctcacgcctgtaatcccagcactttgggaggccgaggcgggtggatcatgaggtcaggagatcgagaccatcctggctaacaaggtgaaaccccgtctctactaaaaatacaaaaaattagccgggcgcggtggcgggcgcctgtagtcccagctactcgggaggctgaggcaggagaatggcgtgaacccgggaagcggagcttgcagtgagccgagattgcgccactgcagtccgcagtccggcctgggcgacagagcgagactccgtctcaaaaaaaaaaaaaaaaaaaaaaagaaagagtaggggtttttacaactggaaaaatacaggtgcttgtgaagctccatgcagtgataatatgaggacccacagagttacataccagacagggaaaagggatggaaaggaggagggcgtgggattcctcagccacaaaatcagaaaggcaccagatatctgaggcagattctgtatctgggatgcagggaaagaaaaaaaagcctcttagcaatgcatactatctgcaaaacaaatgtactaacatctcttgaaactggggggggggggggtggcggggaagatttttaaatgtttctactatgaaaggcaggggaaaggaaaaaagttgaaaacccattattacaaatttaagatgcaaacaatgccactgctcttggctttatttacagggctttcttactttatttttgtgatcgcagaagtgttggcaaatacttccgtaatactcaaattcaagcagccttttgtgcctcagagtgtgaagaagtaaaaaacagcgtgggttggcaggactcaccgacatctctttttactcaaggcctaaagggatagtgagaggaatcctgaatcacagatattatcaggctctgtgtgggatgcagaggtgctagaggttagtcatttaatctggtcatctaactggtaaatggagccgcctgggtttgaatttgcagaccatattctcagatgcttttcaccactatcccagtggttctcaaatttgagagtgcatcagaaccacctaaagggcttgttaaaacagattgctgggccccacccctagaagtccctggactaagcctctcaacatcatctgtgaa

SEQ ID NO: 916223 - DNA, 4001 bp, Homo sapiens
accatgaagatctccacggcggggatggaggcggccatcaggcagtccagcgttttagtctggttgttcattttgcacttgtgctgcgccgccaggatcttccagtaatccatgttgaggcgttcgtaaaagtagcaggcgatcacacaggtggccggcacggtgtacagcacagagaagagcccgatacgcaccatgagcttctccagcttgtccgtgttctcgccgcccgtcttcatcaccctccggatgtggaacagggccacgaagcccgagaggatgaaggacgtgccgatgaccaggtagcaggccaggggaatgagcacgaagccggtgagcgcgttgacgtccatgctgcccacgtagcagaccccggtgagctcgtcccccgccaccctgcgcatgaccaggatcaggatggtcttcaccgccgggatggcccaggctgccaggtggaagtagctgctgttggcttcgatggcctcgtggccccacttcttgccggcggccaggaaccaggtgagcgtgaggaccacccaccacagcgagctggccatgccgaagtagtagaggaccaggaagaccagcgtgcagccggtgctctccagtccctcctggatgacatagagctggccgctgtcccggtcgcaggcgatgctctcggcgccggcgaagaggcggatgaggtagcccacggagtagacgcagtagcacatggagaggaagatgatggggcgctcggggtagcggaagcgggccgggtcgatgaggaaggtgagcacggtgaaggcgctggagaagaagcacagcaccgcccagatggccagccagaccactgcgaagcgcttgtcctcgcggctccagtacacgtccacgccgggcgtgcagagcggcgcgcacgacgcgctcttctccacgtggtggaacttgcccgggttgtcgcagccgccgcgcccggggcccccgtccttcagcgggtgctcctgcgcgctgtggggccgctgcggccggaacagcggcgggaacaggcccgagccccgggtgggctcgtccgagccgttgttgggcgcctccatgcacaggtagttggggtcgttcttgttggggagtttccggcagtccagggagtcgggccacttgaagttgaactgctccataatcggggagcacttgagccgggcctgctcgcacatgacccggcaggcggggatgggggtagagacctgctcggtgcacatcggcgcgtacagcgagcacaggaagaagcggaggtggccgtggcagccgtactccaccagcggcgcgaactcgtgcaactggatggctgcctcgcgctggttctcgtggcccatcaggttgggcatacgagtcatgttgtagccgatgtccttgcacatcgggatctcgatgggctggcatttgccgtcgcccgggcgctccatgtccatggagctgatggcggcgcacgagcccatcacctgcaggaccagccacaggcgggggcccgggcgctgcatgctggcgttggacgtgtcctcgcggggagctccgcgcccctcagcgccgccgctcccgggcacgggctgctgctggccccggctctccacccctgctcgggcccccgcccatgcccgcccggcctggcccgagcgctgcgcacagcgcccccggctcggctctccgcgcccggcgtccgccgagttgggggccgcggcggagagcagcaaagtttgcaaacaataccgggaagcgagggaagcccccggagctcccggcgcagcggcccggcgcgagctccaactcacggccgcggcaaacttcggcctcttcttggagcgcccaggtggcgcgtctggagcgggctggcggcgcgggcacaccgaggccggcccagctcgcggcgcccccacagcccgggcggctcctccctccctgcgccggcctcggccgggaccagccggcagctgtttcgaggtttgcgtcccgggatgagaagactcgcaaaaaggcaaaggggggcagaaaagccgagcgctgacaggccccgcccccgggccgcgcgccccgccccgccgctgctttgcatgagaaagcgcagcggcccggggcagcctcctccccgccgccccgccgcgggctcccgggccccgcgggggccgatcccccccggcctgcagcccagcctgcggggggcgcagcgcctagtcccgcccgcgtcgcccgccagccccgggacagcccgcctggcgcgcggggctctgcgcgctgcgaccctccccggcagtcccgcccgcctctcctcgccctctctctgcctggcctccaactttgcctctcgctatcctctccgccggcgccccctttcccggcggtccccgggatggtccccggcaccccgaggacgccgaggttacgggaagttcggggactggcgggagaaggggtttgggggtggtccgcggcgaggggcgcggggtgcatcttctcttccttttatggtgagtcccgggcggagggcgctttcaaagggaggtgggatttgcgttttatagcctgggccataaagtaggcccttgcttgtaaacctgcccgcatcttcctgaggctggggaggtgctaccagccccgggctccgggctccgaggagggattttctttgaaatttcaaagagacgagctaaggggagggggaggggctcgagaatccggattttagggccgctcatccgaggtctcctctaagaaggcgggaagggggaggggcgggaagcgtcccgggactttgaacaccgcctcccaccccgcgggaagtgcgggcttggtttgtaccgcggtgacccccgccccctccgaagccgcagagccggggcctcgcgccagcagggctggagatgccttcttggcggctgagtttatttattataggaagtcattcgctcgtggggtatttatgtgatttggcgagtgatgtgcccggccagcgccctccttggctgcagccccgcaggaggacccggagtagggtgggatggagtgggtcgtgggaggagcgcgtcagcgcctgcccggggacccccagctcccgcgaggacacggaggcgcgcacgccgctcggttttcctggaaagtggagaaggagcgtcctgggcaggtcctctgagctcatcccccctcggattggggcgggtctgtgacggggtcacttaggacacgacgtccccccgccattcccttcccccgcccagggcgttcgcggtgggcgcccaccgccaagccccactgttcccaaggatgcgccaggtgcttcccgtagcgtcctgggttgacccttaaaaaaacagcacccctaggaggtggccggccctctcctcccagggtctctccgggtcacgatcttccaaagttcggaaactcgcaggatcgcgtgtgcaatctcccgctacctcccggggggccggggagaggtcagaggagcgagtcccgcgtccaccggcctcgcttgccccctgcccgtttgaggatagttccagggagcagggtggagtgtgcggacatctttggaggcagtgctggggcttcccgcgttggcggcgctccacccggcgtggggggcggctgcacgggcccccgcggtggggacgctgcgcacggggcaaggtctccctaggaagcgcccgggaaggagatggggcccgccaggaacccccctcactgaccagctttctgcacgccgtgcaggagggggccacttcctcggagagtattggcttttaattaaaacaagccctacaatttttacatcggtaagaaacttggggaaatctcacctttccactcattcattcatccgttcaacagacatttgagcgcccagaatcccagaattaataggcaggttcaggcacccacccctgggtcgctgtccctgggtgtcctgggtctcactaggaggtgctggaggaagtcggggtgagggagaaagtgaaaaagaaggtagaaac

SEQ ID NO: 916224 - DNA, 4001 bp, Homo sapiens
atttatctatttccaatacttaacagtgtaaagtccacagcacgtcattaattctggttaatacaactatattagaaactgagaaacaatatggcatggaggttaagatacccgagagctccacagtccttcagacagggttggaattccagctcaaccacagatcagcaatgtgaaacctttaggaagttactgcatttctttgtgctttgaatactccatctgtagaacgggtaatcgtgtaaggaagtaagtcaatgattacagactgagtacttataataccgctagggtaaactatcaataaaacttgattgtattttttaaatatcattgctcaaaagattggtatcaccagaactgggcaaaattttcaggtatccaaggtccagaaaccaggaaagtaatttgtaaaggatcctttcccgagtaagggattagctcacccctctataagctgaaaacctttttgtaattcctggggaatgaagagccctaatgacttttttttctttttaaaggaaaagggttacaagaggtttctactgctgggctaaggccctggtggcttctggtagctataaaaccacgaacgttaggtaaggattagagaagaaacccagagtggctgtgagtcaagaaaagacatcagataacagcaattattttaccattatgtgacacgtaatactaatgttcctacctgaagataaagagcacaattttaaaatctccgctcctccatttccaaaatccaacagctgctggtccccctaccacttaagccatattctgccctccaattcggctgcgcagcctgcattagagaaacaccaggcaagtgggcgggggagggggtaatggggaaaacgcccggatgctgaaagatacctaatacttttctgttcctactcactgcctgcggtagttttaactacttaagccggtgtccaaaacggagaaaaaacgtctcagtcctgccttatcgcgaccaggtaccaggtgatcagaaatcaacacgaggaggctggctgtccccacacaagccccggagcctagaacgatgaggcaagagggctgttgggcagagaacgtgaccttgttttccaggccaggactgtcttgtgctcccctaaccccctgtaatgcaagaaaattactgaatagcttctgaaccttttcgtcccaagaccaatgatatgagagccaaagtcaacttcattaaaggagaaccagccaaggcagaaatcgactgggtttgcgcaaacctcaccgcacagcacaatgtccctgcgttcttaaaggcagccaatccatggccccgatctaaccagtctcgcccacaggggccctattttgtgcaccgcaacccacacacggtctcagctgctgagaccgtgtgtgggttgctgagtcactgaagacggcggctcggcccccaaaacgccgtcagccctgaagtggggttcggggcccaggcatacggggttttaaaagctctacagtctggacgtccattggctctggcactgaagggcgttcaggattaagtaattctcggaacctcccttctccagagccgcctgggcgccccagggaagccatctcgactacccgcccccgcccccgcgggcccttcccctcccatcccctccgctcctctacactcacggggaccctgtccggatatttcttccggatcttttctccttcctttttccgatactcaaagggatggtcctccttgtactggaacttcatgatgcaccgcagggcttccgagatccccgcgcggggcctgcctccttcgccgctgaccctgtcccgctccctcagccgacgtcaaggtgtgctcagaatagctgcagaaacgtccgctccgggggcaacagcgctgggccgagtgtgcagggggggttcggggcggggatctcgggtgagcctgcctggaggtagaggagagccagatggagaaataccggcggcttttcgctagagctgggagcacaaaaacagctgggtggcgcgtcgggctgtgacgtcaccccgcgagccccgccccgccccccatgcgccaggcgcccagggcagggggtggccgagcgctctgtctcactgcgtttcctttctggctaacctttttcacaatcgatgtcactgcaaacatcaaaacattcgagttatgttttattttgtgactgtgaaattaaagatggttttaagacaaaaaaaagatttaaacatgttttattccccctccactgtttttcttggttgggccccaaaacaaatacaaaaggcgaaaatccagccttttcctgctggttgggatccagcctcaggagaaaagagggccaggcctcctgggatccctttggccaatgcagagctgtcccgtgcttgcaccgtgccctctgcgcgttccgctgcccctcccgcggccctcctcccgcgctggcgtcacagtgtttgggcggtgccgcagttcgctcctgaacagcaacataaacagagcgtgactcaggaatctgaagagaggagtcagatgaaggacacggagtgtaatcaaagtctaaaggagacatgatgtcagtaaggactaccgagggcttcacgtacaatcaaatatagaaatgattcactttctagccgggcgcggtggctcacgcctgtaatcccaggaggccgaggcgggcggatcacctgaggtcaggagttcgagaccagcctgaccaacatggagaaaccctgtctctactaaaaatacaaaattagctgggcgtggtggcgcatggctgtaatcccagctactctggaggctgaggcaggagaaccgctctaacccgggaggcggaggttgcggcgagcggagatcacggcgtcgcactccagcctgggcaacaagagcgaaacaccgtcttacagaaaaagaaaggaagggagggagggagggattcactttctgccataaactcagaaagggggctcgtcttctggaaaagagagtatcaagcaatttaggtgatgacctcagttgttcccccacatcttatttagttccagtggttaggtatccctcacgtgactagaaagcgctgcctggaatgctagtagaagattgggcattagggcaggtgaggcgaagcctcgttctggatttccccacctagagtcaaagaagaaagaccttccaaccagtactgtagggcagcgacagggaggactgtggagtttgcaaagaaaaagaacagtgaaaaggggctgcgttgcccatacaagtcgggtgagttctgataaatattagataacagcagccccgtggcctatcttcttcagtcggggtctcagtgtctctaattttaaaaacacccacagggggccaggcgcggtggctcacgtctgttctcccagcactttgggaggcccaggccgaggatcgcttgagctcaggagttcaagaccagcctgggtaacatggcaaaaccctgtctctacagaaaaaacaaaaattaacaaggcatggtggcgcgctcctacagtctcagctactgtggaggctaaggcaggagaatcgcttgaatccgggaggcagtggctgcagtgagctgagatcgcccactgtactccagcctgggagagagagcaagactctgtctcaaaaagaataaataaataaaaataggccgggcgcgttggctcatgcttgtaatcccagcactttgggaggccaaggtgggtggatcacgaggtcaagagatagagaccatcctggccaacatgagacgagtgaaaccccgtctctactaataatacagaaaaaattagctgagcctggtggcgctcgcctgtagtccccagctactcgagagcctgaggcaggagaatcacttgaacccggaagggagaacccgggagggtttaactatatttgcatcaaaactaaaatgaggccgggcgcagtggctcacgactgtaatcccagcactttgggaggcggaggt

SEQ ID NO: 916225 - DNA, 4001 bp, Homo sapiens
tgtgctctatttctcaaaactccaaatttgatttttatctagagcatcacaagttctcatttgtacatcaggtcggccctccggtgtccgataagcactaagacacagtcctgagtgtgggtgaaaaatagttccatcttctttaaaatgccaaataatgtttgctggtacagggaacccatctttgggacaattttgcattcccacataatttttttgctcaggtacctctgcacataactctgtcacagaattaaaccttatttctttgtttgaagtatattcaaagaattgattgcctccttgaccatggcatccaaacagtgaaaggttagcacctgtggggttgttgtcaggagaattataatctaaacattcagacgagatccctctactgcgaatagccccatgccagcctggtctatcctctggaacatgtaaattaggaaaaacgtttttcaaataccagtcaaagctcttgcatctcaaccgctctcgtagtaattttctttcagaaatatcaccataagcttcttttcttgctggagggtttctattgtagaagtgctctttgtattcatccatccaaacttctgctgcccgagcagtattctgtaggaaattggggcgagcatatggtgcccgcttggggaacacatggcccacgtgggaacacgggtggatctccaatttgccaccacactgccacaccctaaaagacagctcaaggttttcacctccccacacttccattcctgtgtcatacgttccaaggtactgaaaatatttcttgctgacagcaaacagtcctccagccatggtaggtgatctgatggggtcaattcttgatatccgcctgtccctttcctgtttggggacagaatgccactgaaatgttaaacgccagtcaaacccaccaatcatgggctcccctatctgcatatagaattcaaaagtattccaatcaattgtgtctataacaggacacacaactgctgtttcatctctcccaatcctttccaaaagcggttccagccaaccggaattacactcacagtgacaatccaggaaagtgaggacgtccccagtggcgaaagtggccccaatcagacgggccctaaccagcccctctcgcttattggtcctaatcaagcgtactctatcaagattgctgatgtaagtttcaagttgtgtcttcaaataaactctgtcactcaagtcatccaccaagatgatctctttcaaaagaactgcaggagaagtttctaaaacactgtgaatggtacggagcaaagtcgaccaggcttcgttatagaaagcaatgataacagaggtggtaggaagtgtcctatagttgaacttctgggacttacactcatacattcttttatcctctatgtgtcgatgcagggaaatcctgtcactgaggtaaatattgatggcgtatctctcaatgagttcttcttgctgcttcagttcatcctcgttgagctggagtttgctggctttcccccactccccaagtgcacgggaatctgcagggggcttcttataaagcggtcgagacaaatcctccgtatttttctggaggtctgagagccttcttgaccccagctccctggcacggccggctcctgcggaggcatgaaaagtagagaccaagagctccacgaagatataggccactgttaaaaacgccagcagcaggcagctcttgcctgcccaagtccacctcaccgccatccggattctcagggctgaggcgcagacgcggccaccaagccaccacgcaggggaagggcggcggaacccacagctcgagctcaggtacttcccagcaggttcttcctttcatgcaggcgctaggctcctttccagccacccaggctttccaggggtcacctgagccctctcggtcctcggcctccggcacagcccaactcctctctccctacttcctcctgctcggctcacaacttttcacaaactctccagccaacaccccaccctccccgggccgaggagaaacccctccccttcccactcactcctcctggtggttagtttgcgaaagtcgtccgccaggcccagaccgctggataggaggctcttggccgggccgggggctgggggccgggatggcagagggggccctagctgcgccccgccgcgctgggccctcgtctccgggtgctctcaaccctcatacaggcccttagccgttctcctagggaccctgcccggacaggaggaaaggtttccggcccatggagtttagtctcattacaaaagcaaaacaagaataagacttaccaagttgcttgccgttggggctgaggtccaaggaggtgatcgcagctttgtggcctttgaaataacgctccagaacggggtcctcctggaaaggaaagttgtcaagttttgaaagccgccgcagacctcgaattctggcggctgggatccacgctgccacttccccggagtccggcttgggaatggccacccaggcggcggcttggctgggcggcggggccgggcagcagcccacccacgggcgcggcgcccagtcctgctacagggagacgccggcgccagctctccccgcagagcccgcaaaacgctctgttcgcgcttcccagagtccagcgcatcgcaggaaccgcggcccctttgaaatgcacgttcccgggccccgcccgctggcccaaggcaggcaggtgcgaggatgcgcctcggctttggtactttttttttttttaatacttcctaggtgattctgacgcaggcgctccacggaaaccctccgagaattctgggggccgtggggccgcccagctcagtccggagctccggaactcggggaagagcgtccgggagccgggtctgggttccgcactccgtccgccccgatggcagagagtgagatacggacgccccgggacgaggggctcaggacccggctacggacacctgcctccatctccctccaggtgcggcttcggcccggacctggccccgcagcccgcgggacaggctccagggagggaccccccccacctccaacccgtccttaccgtggctgaggccatcgggggagtggtcggcccaaggctcctgtgggtgggggaacccggagaggggaggggagaggatggggaaggagaggggaccgtgcggctcccggaaccgtctgcccagagcggcagcgcctcccggtcactacaacaacggcggcccagtcaaaccccgcgctccaggcatggccagccgagccccgagacaccgccagccctgtaaagagaggacgggaggtatgcgccgggtcagctgtggccacacaccaagccatgttaactaacactcgcgttctccctggtttgatgtcaggaagtggggtagtaaccaggactggaataagagcgatgaatggaagggcgttgtgagcctgtgatcgatgcgatcagagttctattacgttttaaagagacagcacccgtgacgtttaaggtgatcccctaccgcttattttgttgacgtaaagctttgacatgaagaggggcagcttgctagttattaatatactaaaaggaactaaatcccctgagggcagatttgaatttatttaaccactgttttccacacagtgccctgcaggatattgatatagttgctggatgtgcgtgatgaatgaatgagtgaatgaatgaataaatgttgtgcatgcacttaataattttctgcgatatgtttccattctcatctgcttatttgcgtataccttagagcactaaacttacacagctggatacttaaagtctttaggaagacttggaaacatggttttttttgtttgttttttgtgagaccacgtttctacagcaggctttgttacacatagtatcatttgtgcttcagccaaacaatgaagttggtagaattacaaaatgttttcaatgtttccaagttataaacttgattcctagatattggtcttagaggtc

SEQ ID NO: 916226 - DNA, 4001 bp, Homo sapiens
acagctagaaatgtggcagaggcagaatttgcattcaggcctatgtatctccaaagcccactctcttaactatgacatcacattgtcttgcatttgactggtgcttggagctttgccaaaacacttcatatacaccttctcatttgctccccacccagggagtgtttatgtgttttggctaagattatatatcgaagttagtgacagggctgagtcagctgcctgccttcatgatactcactgcctccctgcactgagaggccctcagccctagggttagctgcccctcctggtcctgaggtctgttcgaggcaatggttgcatggactaagttcatgctcatatttcctgtccccacttcttccagctgaacttgggcaaatatgtttctgacctcacagggcacctgacacacatcagggcctccccttctctgccctgagttcttccatgctgctacaggtaggagtcagctgttccacccactgtaggactgtgggcagcattactgaggtgaggtcatcttgagcagcccagtctcctgcacacttccctctttcttttgagggtcttgtcctgttctctgccctggtgcccctggaagcaactttctctgattacctctgggttcctaaagtgcatggcaccattaaggaactggagctagggaaatgcctgcaatgctactggctcctgctaggcaattggaatcaaagcatatttctttctttctttctttctttttttttttttttttttttttgagacagagttttgctcttattgcccaggctggaatgcaatggtgcgatctcagctcactgcaacctctgcttcccaggttcaaacaattctcctgcctcagcctcccaagtagctggaattacaggcgcctgccaccatgcccggctaactttttgtattttttgtggagatggggttttgccatgttggccaggctggtctcgaactcctgatctcaggtgatgcaccagcctcagcctcccaaagtgctgggattacaggcatgagccaccacatgtggccggaaccaaagcatatttcaaacccctcacctgacctggttttcatcatcacatgaatttccctgtctcatccttcttaacctttcctttgatgggaagggagacagctcatctgtctggagcggagaatagggcctgtgtggtgcacacacatctctggtagaaggcgcaaaagtcctcgaggctctttggtgtgtccagaactatgaacctcacccagtgcctgtaaattgtgtgtgtgggcctgggggcgagctcagagcacagagttaacatcctttctgagagtgctgcaatgggttgtcggctgctagaaggggtctgctgtaagctttgtgggcaaactgaccaccctccacccccatacacagaagagccccatcctaccctctgcagacgtctgggtctgcgatgattggccctggatgcaagtaaaagctgtttctcctttttgtcagcctgggaatctgaacaactgaggaaatagggaagtcggtgacagtcacagtcatgaacacccagcagattccatttccccacagcaggaggcagatcccttcccacccccaaaagcccccaggctctggagggaattcaaccaagcagggctcagaccgacctccaccagcgaggcttctccttgctgtccccttctgctcaggcgcaacgtggcagggcaggaggaaacctctctgcaagagttgccgtaccagagcacatggggtggcccgatctggggagacggggcacagaaggaatgcagggcatgggtgggtgaggggaagagggtgtggagccctggctctggcttgtccccctctcacccctccaagttccagaggtctgggctcctcattcatctcgtaagcgccaaggtggaggggggtcctaccgagggaggagctacaggccaccgcgaccagcagagagcgaaggcaggagggaccagcctggcccagccccttcattttactgtcgggggtagtgaggaggaagaggaagaggcgaaggctggcggaggaggaggtgagagcgaggactcggcagaagcgagatccgccgaagggaagtccgagcagtcggggagctcaggggggccctcccggggagagggtcgcgggctccttctgccgcttacctgtcgcgccgaggcaaagccgcagccgcgccgcggggtggctcccgggtttccccaccggacggccgggagggtgggaccggggcgggacctcccccagctgcactaacgcgcccgccccgcccctccctggccaggtgcagcgggtcccgccgtgtcctcagcctgctgcgggcccgggaactcccggcggaccggcagaggggcgccccggcttctctgcgtctcagcccgccccgggggtgcggtctttgcggccaggctttcagcgcggaaaaagattggagggtcctagtcaccccaaagaggacaggcattagcagagccgcgggcggcgggtgcatggaaccggaatgtgctgcgcgccagcctggagcgctcggagcccggaggcctgccccggagggggaaacgcggcggggcggccatgggccccggggtcctgccccaggtttgcttctcatttgtgctccatccaacaagagctcgtattccgtgtgccatgaactgtgtcaagggctccaagtgccaggtatcaggtgaatcccagccccagcaaactttaaacctactatgattattccgaatgtaccggggaggcagctgctcacacagcagagggtgtttctcaaagtgggatcccccaccagcagcgccagtcagaatcacctgagaacttattagaaattttggccgggcgcggtggttcatgcctgtaatcccagtactttgggaggccgaggcgggcggatcacaaggttaggaattcgagaccagcctggccaacatggtgaaaccccgtctctactaaaaatacaagaaattagctgggcgtagtggcgggcgtctgtaatcccagctactcgggaggctgaggccggagaatcgcttgaactcgggagggggaggttgcagtgagccgagatcacgccactgcactccagcctggcgacagagcgagattccgtatcaaaaaaaaaaaaaaagaaaaaaagaaaagaaaagaaaagaaatgggccccaccgcagacctaaatattccgaaactcgggttgggcccggcgacttgtgttttaaaagccctccgggtgattttgtgcatgctcgaccttgagaaccctgaacaattagtggcagggctggaatgagaatcctggtaaacccgcctcctaagccggtgttcggaattaccccgccagggcccgtgctgctcagtggtcctctccggcgctgcctcgtgtgctgcaatcttttggggccttagcaacagagaaggagcgcgcatgactccaaatagccaataatttgaaaactttctatggtagaaacttctaccactagttcagtttctcttttgttttgatatttaaataaatttgtctttctttctttctgttttcttcctctttctgctgccccgcctccctccttttttcttttttctttctttcttactctctctgtctctcctttctctctctctctttccttctttctctttctttccttctttttctctttctttctctctttcttttcttttcttgctctactgcccaggctggagtgcagtggagctatcacggctcactgcagccttgacctccgggtctcaagctgttctcctgcttcagcctccacagatgcatgccaccatgcccagctaacttttttttgtagagagggagtttcgccatgttgcccaggttggtttcaaactcctgggctcaagccatcctgttgcctcggcctcgcaaagtgatgggattagaggcatgagccaccgagtccagccatgaatttgtatttctaagaccc

SEQ ID NO: 916227 - DNA, 4001 bp, Homo sapiens
aggcattagacttccatggtgagccggaatcacaaacaaaccccagaatgtgttgaaatcttacccttaagtttaaatgaggaggttaaaatttggcacagagcagtttatagatcaccttctgcatctacttcacaaccctattaggtcaggttgataactatcactattgttatcatcatctccatttacagaccaggaacctgaggctgagagagagaagcacttgctcaaagtcacacaaccacaatggcacatcaggattcgatcttaggtcctctaacaaagccctcattagttcatgaaaggagcacaccgcaaaatggaagcgaggcccttgccccagagattgccacctctcttcaacagcccctaccacacataggcgtggggaaaggaaagagagatcagattgttactgtgtctgtgtagaaagaactagacataggagactccattttgttctgtactaagaaaaattcttctgccttgagatgctgttaatctgtaaccgtacccccaaccccgtgctccctgaaacatgtgctgtgtcgactcagggttaaatggattaagggctatgcaagatgtgctttgttaaacagatgcttgaaggcagcatgctcgttaagagtcatcaccactccctaatctcaagtacccagggacacaaaacactgcggaaggccacagggacctctgcctaggaaagccaggtattgtccaaggtttctccccatgtgaccatctgaaatatggcctcgtgggaagggaaagacctgactgtcccccagcccgacacccgtaaagggtctgtgctgaggaggattagtaaaagaggaaggaacgcctttctgcagttgagacaagaggaaggcatctgtctcctgcccgtccctgggcaatggaatgtctcggtgtaaaacccgattgtatattccatctactgagataggagaaaaccgccttagggctggaggtgggacatgcgggcagcaatactgctgtttaaggcattgagatgtttatgtgtatgcatatctaaagcacagcacttaattctttaccttgtctatgatgcagagacctttgttcacgtgtttatctgctgaccttctctccactattatcctatgaccctgacacatccccctctccgagaaacacccaagaatgatcaataaatactaagggaactcagaggctggcgggatcctccgtatgctgaacgctggtcccctgggcccccttatttctctctacatactttgtttctgtgtctttttctcttccaaagtctctcgttccacctaacgagaaacacccacaggtgtggaggtgcaacccaccccttcaataggcctaaggacaggtctatggcccttgggattcttattcttctcgttgcctgcacatatgtagatataatgataatgcatgtgcacaagcccacacacgcatacacacacacatgctcacctcccccatactgcttgctctaatttccacttctactcacttcattctcaatacccatctcccatttgaaggcacagaattcagtgtcagatgcttcaatgagcgactgagatgaaaatgtgacctctcacccatttttccttccatatccctttttcctaagtgccccaaacacacacacccacacacacaccttccaggttagcattgtaaacttactcagatcctgcaattccacctccaagtgggagagtctctttatcactgccccgtagcgtttattcagatgtaaaggaagctccctgtggagaccacccgtaaacaggttttgtaaagtccccttgctagaaaataccagaaggagattgacagcaatggccagagtcagcccaatgaagagggctttggggagtttcctccaaaacatcatcttcttcctgggggtcgtccactccctgtgggactgagtgtgtcactgctggagcaggttaagaatcagaaccagcctagcttttgtgggaaagagagttctaggtgccagttgagttggtctcccctgtgtgagacacccatgggaagccacgggtggcctctgaggagcaaagtctccttattgccttctttgtctttatgccccgagaggataaccgctcagcggctttccacaggttgctcagcggctttccacaggttgctcagggagataacactcccttgaagcagaggagtataatcaaacatcttggctcctcctgaaacccactcccacccatttcagtcattaaagatcttaagtagtttagacacacgcctttgctcaaggaaattcacagaaaccgccactgttacacatcttatcgaatgactcactgattaatccttttcctcatcccttcctccccttcccatctgccctaagaacaaagagcttgtaaaccaataaattgggtggagcccagagctctgggccgtgagcaagcctccaacgctctggtcccctggacctgccttttaaacgcttgttctgtctctttctaactcctttgtctccgccggactcggggtatccgctgggtggtgtggggctggtttccccaacagctttctctccacccagcttcatagatgacaccctgcctgctaggccagatgttctccggccaagaacactattatagctgcctggcttctccctgagcagcgtcaggtgtgaggagtgcgcatggcagctgcccagtgacaggtaagtcacctggacacaccttgtactgtctcagaagtcagaagaatgcttgctcctgcagctagctcaggctgcctgggtgagaggcttttctctatatatgtttgtttgatgtttaatgttctctctccctggaaaaaccacctgggagactctgatagggcatgtgaggtctggtcctgtgggtataagaaggggataaataggatgaagaagaaatcacgaagcaagaagtctctgtacacttagatccttgcttttttggagagctgggatctaagatgtctttttacctaactctacagggttttggacatagtaggtgtgcaacaaatgcttgtcccacaaacttaaggacagactttcttgctagttcctaggacttcactgcctagaagcaggtggagaagagctggaggcggtgcccggggttgagcctcaggggatgactccgattcactggtctctgtcctttgcttgtcctctgcacaacttcatacactgggcttctgccctgccccagcttccagtaactcctttgcctccacacctcacacttataatatgttttggacaaatcaccagtgatcatcattgtagaataaacacataaaattgttccccaaggctaaaagttcaaagttctcagtctactgtcaatcccgtcaaaatcacagcttccaccccggcctggctctttggactatttactacgtcccaaacacagcacatggtgacatgtgctgaggcggacatgtggattaaaggaaagtaatgtggctttaggaaaaacaggatgaaaatgaacaaaatgaaaaggaatcacttcttctgtttcgcagggatagaaaatgtctcccagcctcccacttgcaaattagactcaaaacataagaaacgcatgatccagccaggcgcagtggctcacgcctgtaatcccagcactttgggaggccgaggcaggtggatcacctgaggtcaggagttcaagaccagcctggccaacatggtgaaacgccatctctactaaaaataacaaaattagctgggcatggtggcaggcacctgtaatccgagcgacttgggaggcagaggcaggaaaatcgcttgaacccaggaggcggaggttgcagtgagtcgagatcgcgccactgcactccagcctgggcaacaagaacaaaactccatctcaaacaacaacaacaacaactacaaaaaacaaacaaacaaaaaagcataacccttctgcttctgggacaagaagaaatacctacattta

SEQ ID NO: 916228 - DNA, 4001 bp, Homo sapiens
tgcttccttatctcccgccaatgtcagcaaagcggatcatgggtcctggctttttccaccaccaagaatcccagccgattctcaccttgaagggtgaggcagggaaaacgactcacagggccgagctgccctcgtggtgttacacaacctcagtgtgctgccaatgtttttatgtaatcctctggctctccccataaaacagaccataacaccatggcgagcacacttcaatagagccatgtgctattgccgggcacaccgccttccgggagatgaattgctctgccgggcggctgggcggctgcttgaactacttttctcccctcgtggctccagctgaatcagaaagatcagagaagccacagagctcaccaagcacagctctgcgggaaagtcagggattctgtgggtgatgggaaggcgctcaggaagtcagggtgctctgagtcagacaaagctgggacaacccctcctcatggggattcacctccccctcccaccccacggcctgtctgcagcccaccctcaagagagggtgtggctcctgaaggaaacgcaagaccaccccccgcctttgcccccacacacagcaggcacatccggagcccccgcctgcccgcgtaaccccagctcccgtcacctcccactcgagcctgttacggatgctttctggaggaggtttgctggggctgccaaggcagaagcctgaatcatcggcacggaacggaaagccacaccagctagtgatgtaggcacatgcaaactttctccttcctggcgccccggtgcagagtggccttgggggcggctgctcctccgggaaggtggagcagctggaaaagtgcttgctctcagcagctgtggccgctggccctgacctgtggtgatgccggtgctgctcctcgggctgacctacgtccgctcgtgatgaaacagacccaccgggagctggaggctttcatggattctggggctcccaggtgccacaacttgggcccccctgggtaatgagtcctgccaagccctgcatgatcctcaactccatcctcccaggagtctcaggtctcagcttcaagcttctcccataacaactttctaacgcggcctcgggcacccccaggacagggggccgcctagcccagtggtcgaagcatttggggtgccttcgaacctcaggggcaaaggacactgcaccagcagcctcccaagtgtggcgtccccaccctcctctttccccaccttcaagagtggaggggtcggcgcagcctaaacctgacggcccccactcctggagcgccaagccagccccccaccccacactcctggacctaggcactgcctgcttctagagcagctccaaagatcctctgcagaagttccctcggagagcaagtttgcgtcattgtgggggcagggggattcctcaagtctccactggaggggtgggtgcccggtgcggggggaacccaggttgctgcccgctgctgaaggggcttccgcggcccttccctctcctctctcctgtatattccctcccacaggggcgcagaggggcgcgcacccgaggccggcctgacccatcgcgcccggggtggccactgtcccgggcagggctgcccccactccgccccggcgcccccgctcaccgttgagctggttgtagaccacctcctccaggtggtccaggcgctgcaggatggcctcacggtcccccagcgtgcccaccttggcgtgtcggctgcgcacccggcggtcgccgctcacgatgcgcacgagctcctgggagcggccctgcaggcggcagtacacggagaacaggacgatgcccacgaacaccaggatgttcaccgtcagcaaagttcggatcttcctggccaccgccatgaacacggctgcagcgggggcctcacccgcggggcatccccagcatccccgcccgggcctgggcttcagcttcggcttcggggaccatgagccgcccggggctgcgggggctgcggggctcggccggagctgtcccttcagcaccagctcagcgcgccgggccacggccgccgggggtcccccagagcgcagagggctgcccggggctggggtcgcggggcgcggccggcatcccccgctcagagggcgcggccccgccccggggagcggtgaggggggccgggggcgccggggggcggcggggaaggcgcgggcgggcggcgctcggtgtctgtgccggctcctgtcctgcccgccccgcagccaccgcgccggtgcagagtgacgcggcctcacctcacctcatctgcaaccgcggccccaggaccgccccgccccgcctcccccacccctcaaggccgccccccgggaccgccccgcgcgcctgccccgccccccccaccgcgcccccccggggaccccaggacagcaggtccggggggcgggggacggggggcggggcgcgcggggtagcctgggccaagggcgcgcgggcgcggggagcgggggcggggcaggcgcggaccctccctccccaggacccgccagacgcccggggcccccaacggccagcacggtccgaatcgaccccaagcttgacccgagggcagcggggcctccgggaatgcctggccagggcggtgtcgccgggagtgaatgggggagggggcggccggggcaggacccgggtcagggccactctggtagtctcctgcccacccctccccaagccgagctcccggcctccctccctctcccccgtccagggctgaggactggggaagctgagtcccgggacgggtatgggggggttggggcttgggatgcagccggacctccgggaacagcagggggccctggagccaccaggagggagaaggccccgtccctgagccaggctcgcaggtaagacccgaggccgcaaaccccggctgcccccacccccagcccaggctctgatctggccccacactggcgttttgtggaggagaccctggaagccaggggagatgtcagccaagccgcgcagcacaggggcccaacttccactggcagaatgcaagcacccaagaggcaggagtttcacccaaaggcagggttcacccctgtgttcccagagattggacacatagctggtgttcagtaaacatttgcgggatgagtgaataaatgacggagcatttattaagagcatggctgtgcttggctctccatacagagatgagtaaggcaaggggcttcacagctcttggctgtgtgtgtgtccgtgtgtgtgcatgagtgtgcatgcatttgcctctgtgtgcctgtgtatctgcatatgtgcatgtctgtgttgtcagcacgcatgcatgtgcatgtgtccacgtgtttctgtgtgcatgtctgtgtgcccgtgtgtgcatgtatctgtgtgtgcatgtgcctgtgtctgtgtgcattgtctctgtgtgtgttcatgcgtgtgcatgtgtctgtctgtgcctgtgtgtatttgtgtatgtgtctatgtatgtctgtgtgtgtgttcacatgtgtgcatatctctgtgttcatctctgtttgttcatgtgtgcatgtgtctctatatctgtgtgcatctatgtgtctgtgtttgtgtgtccatgtgtgcatttgtctgtgtatctgtgtacgagtgtctgtgtgtctgtgtgtgcatgtctgtgtttgtgtgttcatatgtgcatgtttctatgtatatatgtctctgtgttcatgtgtgttcatgtctgtgcatgttcacatgtatgcatgtttctctccatgtgtctctgtgtgtgcatgtttctgtgtatgtatgtctgttcatgtgtgtggtctgtgcatgttcaaatgtgtgcatgtctgtgtgttcatatctgcatttgttcatgtgttcatgtgtctatgtgtgtgtttgtatgtatatctgtgtgtgcatgtgcctgtgtgtgtgtgtctgtgtatgcacatgtgtgtagggggatctggggggttctggctctgagcttagtact

SEQ ID NO: 916229 - DNA, 4001 bp, Homo sapiens
ggaaccccccgccccactgcaccagccacctcccccagcacccgaacacaccaacaatctgtttacaaacagctgcttgccatgcagacaccgctccacgcatccccagaacacacacaatcaaaagcccaaccagcctccccagctaataaaaccccgcagcccctggctttctgaacccccacgcgcagcagaaacgtgtttgtcactgcgtatccttttatgcttccttccgtgtcgttccacttaagcaataccagccttcctatacgtgctctttcactccggtttgtccccccgcgctgtcctgcctgtgagggttggttttgtgtcagcgtggcagggaacagggtgctgggacgtttgctctcccgattctgggtggtctgtgcatggcctctggtgggagccgtgtttaaatctgtcccctacaggcctgagtaggacagaaaggccgaggcagggagtgttcacacactctgctcgattcgggctgggacgtgggtcctcccctgccttcaggcttggagctcacgccaccggctctcctgggcgcctgccagccgacggccaatctcggtaccctcagcccccgtaaccgggtgagtcaattccttagatgaactttcacagctaagcccacgtccccaccatctgctattaatctgtttccctggagagccctgagccagccccgtcccatcctatcctaccctatcctgtgctgtcccatcccatccaccccattaaaaaaaggccgatgccacccacgggctgacatcactatgaacaaatgggtctgatccacgtggcccaagctccgccgtgctcaggtcctcagccctgagcctgccatgctggacgagtgtgccaggcccagggcgggcactgtgcttgcctcatctcctgaatccccccaccacccgagaaagggtgggcagccctggcattgccccgttccctccgcggtgctgagaaggtgccgaggccgagggtggtgccaactgcaggggcgcacggggtggagcctctgcccagctgagctcggatccctcagtcatccctggactctggttcatcctcgtccaggctgctctcatctccaggccgttatcttaatcatgtctgcaaagatcccttttcccaaagagggccacactcacacgtcccctagctgcatcctccgggggtcgcctgtcagcccagcccaccccagaggcccagtcccttgtgtgggggagcagggggctcctccctcccccggactctctgccttcaggaagccgagtcccagggagagagagaaccgggaggccgtatcgccgatcacttacggctgctccgacaccgcccaccgcaggacagatccagagtccggggcaggagggagccgctccctcctcgccgagatgaccacacagcacgcagctaacgccaggctccctgaccccggtccggcaacccagagcctcctcgctgctcagctcagcccagccggggacacccccgccccacagtcccacgtcacccacaggggtccggctccttccccgggatggtggagtccgcggcgccgccgtgccaggctgaagttggcctttgcatcccgagggagcgaaccgcgtttctgcatcaggttcacatcgtggcaggtggtttctgggtttctgtctgttgtctctgctgtgggacaacctgcctgagaaaagcctggggttttccagccccctgagccggggcttcctttctgccttccagactagggtcgggatttctgttcgcagcgggaaggggccccgctggtgaatcccgcccaccgccctcccactccgcggatgtctcccaccctcaacctgagaccacccaggtttcgtgagaaggaggggggaagcacctcggagccctgcccttcgctggaaggggccggaacgaaggaagctctgcaggggcgggacagagcctcgtcctccatcgtctgcccacccgtcttcagaagcgcctggcacactggcctctgggacgacctccagcagtttcagcctccttgtctacccccagtacagaggccacggtgactcggtccccccacccaccacagaatcctgtcctcgggcctcacgctggggaacacgaagccccccagggctcctgacgcctgccttgcccaccccctgggttcgaagcaccttggccttcccagcacccccacgtgcacccctcagggccttggcacaggtggtgcccacgccgggcgcccttcccaggtctctgcatgctccactgcctccagccttcaaagctctagtgccagagagattagttaaaggcacaaaaccagccgggcacaggggcctcacacttgtaattccagcactttgggaggccgaggtgggtggatcacttgaggccaggagttcgagaccgcctggccaacatgatgaaaccccatgtctactaaaaatacaaaaattagctgggcatggtggcagatgcctgtagtcccagctactcaggaggctgaaacatgagaatctcttgaacccgggaggcagaggtgacagtgagctgagatcacaccactgcactgcagcctgggcgacagagcgagactccgtctcaaaaaaaaaaaaaaaggaccaaaaccacaggcagagaggagccagtgctggtgccgctgagggaggaccgtggacctgaccgtgacccagccggcaactgggaggaggagccgagcccccacacaaggaaatggcaaatgtggagatggcggctgacctgagtgcggcacgccataccccgtgaacggggacaatcctatttgtccattaaaaaaaccagcgagcctgggcaacatagtgagacaccacctccacagaaaaaaacaaaattagccaggtgtggtggtgcatgcctgcggtcccagctgcttgggaggctgaggcgggaggatcacctgagcccgggaggttgaggctgcagtgagccaagatcacgtaacgctctccaacctgggttaaagagtgagaccctgtctgaaaacataaaaagtaaaaataaaccccaaatgtcaccatcaagtcttcagggtgagtcctctccctccatcctgtttagagccgccgtccttgccccatagctgggcgtccggaccagaggctcacacccctcagtatggcgccgcctgctatccgtccccgtctctgcctgtccctccccatggctcagctccgcaggacagggtttctgtcgcttctgctcacagctgcctcccagtgctcagagcgaggccgggcacacagtaggtgcttgataaatagctgcggaacgaatgtgttccctttaggaaccccacagccacttacggccactctgtccccggggccttctgtggcgctggggcgattccacatgggaacctggtgggactgctgggcggtctgcgaggcctccccaagccagctccacaggtgccagccccgtcagtgtgtgctgagcttgcgggtggtgccgaggccccttcttgggtgaatgcagcctcaggtctctcggccctcgggtcccccaccgtgtctctagaaggaccgaagctacgggagaggcgaggctcccgggcggtgggagtcggccaacttccatcattagctgaggacctgtcacagccggggactgggctgcttcagtctccgggcttgggccgcagacccctgagctttcggggtgtgtgaggtgccccctaagcacaagggcccacggcttgcgtgacctggcttttcagcagggccattagctcaggagtgataaagtcggagagtgaacccccatgccctcagcaacatcccctttccaatccctgcaaaacagggaaagaacaagacagcccccaccccccaccacgactcctcgcgcaagcagcactggtgtgtggcgtccccacacccggggcaggtctcttttctgcgtcagagttaatgaccgtgtagtttttcacatattttgaagcc

SEQ ID NO: 916230 - DNA, 4001 bp, Homo sapiens
cacctgatgatcttgaggctgttgtcatacttctcatggttcacacccatgacgaacatgggggcatcagcagagggggcagagatgatgacccttttggctcccccctgcaaatgagcctacagcagagaagcagacagttatgaacccgggtcctgcctttgcagggctgagtcagcttcccctcccgcgggccctcctgcactcaccccagccttctccatggtggtgaagacgccagtggactccacgacgtactcagcgccagcatcgccccacttgattttggagggatctcgcctatgggggtgggggggagatggggacaggaccatattgagggacacaaggttaccatatacccaagggagccacaccatcctagttgcctccccaaagcacatttcttccattctgtcttccactcactcctggaagatggtgatgggatttccattgatgacaagcttcccgttctcagccttgacggtgccatggaatttgccatgggtggaatcatattggaacatgtaaacctgggggaatacgtgagggtatgaaggggctgcccatcagccaggtggctcctcccacaccagctttggggctcaccatgtagcactcaccatgtagttgaggtcaatgaaggggtcattgatggcaacaatatccactttaccagagttaaaagcagccctggtgaccaggcgcccaatacgaccaaatctaagagacaagaggcaagaaggcatgaggaggggaggctcctccagaatatgtgagcagccctaggccacctccccattaagagggcgaatgcagcatctccttacccccaggagggcccaagaggttgaattttatctcccttgagcttccctgccaggctggcctggcttaaggcatggctgcaactgaaggctccagggctgcccaacacccccagtcatacgaagcccttccaggagaagcggccatgtggggcactgccacccacagtctgggcacaagctttgtacatggtattcaccaccccactatgccaccccaggaatgcttgctgctgcctagctcagctgcaccctttagggagaaaacgcttgtacactcagcatcatcaaactcaaagggcaggagtaaaggtcagaaattaactggacagggcaagcccaccccttctctaagtccctcctacaaaagggacagagactggggcgggtgggaagaggggaagctgtattttaaccccctagtcccagggctttgatttgccaagttgcctgtccttcctagctcttttccagaaatcaggagtgggagcacaggtaagtgcatgtgtgtggggagaagggatgggagagagccccagcccaggcccccagctacagaaaggtcagcagctatatttaacctcagaccagggtgcggtgggagatctggtttccggaagacggaatggggagaagggcaggttccccgaggcgcccagacacccaatcctcccggtgacatttacagcctggcctttggggtcgggtcaacgctaggctggcaggggaagggcggggccgtgaggtgagccggcgctgcaggaaggggccaccaccagaggggccattttgcggtggaaatgtccttttccaactacccatgactcagcttctcccggcttggcaccatgccacagccaccacacctctgcggggaggggacacaagaggacctccataaacccacttctttgatttaccagagaataatctaggaaaagcatcacccggaggagaaatcgggccagctagcctcgctccacctgacttccccgccacacgcgactccacccatcgaggcaggagcgcagggttagtcaccggcaggctttcctaacggctgcccattcatttccttcccggttgcaacatggcggccgctctaccgcaggcgcagcatccggacagggatgcacccgctgcgcactagcatcccggggcctgcggtgccggaggccgtgggggaggggctcctctgcgacacgtgaccccgcagagcgcgaaaggaaagaaagcgtcccccacctaggggtccgggtcgggatctcgggcgggagtagggacctcctgtttctggggactaggggaaggaggctccgggcagatggcgccgcaagggcggagctgcacagggcgccacagcctgggtgcggggctccgccaggtccgagcgctgaccttgagctctccttgcggggaacagctaccctgcccccatacgactgcaaagacccggagcccgcaaggctcgtagacgcggttcgggggcggtcgcagcccagggccccccagccacccgcgaactcacccgttgactccgaccttcaccttccccatggtgtctgagcgatgtggctcggctgcgcggagggagagaacagtgagcgcctagtggccccggccgacacacacgcctcccctcccctcccccaccaggcctccatgcccagcccgcgccgcatcacgtcctccgcccgcccctgcaatgcggaggccgcccgggcccaccccgcagcggcgcgaacacatccggcctgcgcccgcccctgccgccttcaggccgtccctagcctcccgggtttctctccgcccgtcttcacctggcgacgcaaaagaagatgcggctgactgtcgaacaggaggagcagagagcgaagcgggaggctgcgggctcaatttatagaaaccgggggcgcggcggcaggcggtgactcggaccccgcctcccgccaggctcagccagtcccagcccaaggtcttgaggcctgagctacgtgcgcccgtaaaaccgctagtagccgggccctactttctccccgcttttttttttccgcagccgcctggttcaactgggcacgcaccgagcgtgtgggccccgacgtaggggggaagggactgagattggcccgatgggaggtgatcggtgctggttcccaggactggactgtgggcagcaggacactagggagtcaaggacggggacccttacacgcttggatgaaacaggaggactttgggaacgactgagatggggaattggagccggagcccagcaccgctcgcggctgcacgcggcctgccccctcccctttctttctttcaaaggctgagaggcgggaaagttggggaacttctcctcgaggctctgcggtagtgacaccggactgctcaggcaaaggcctaggaggggcccatgggcctcgggcgggggcccgtggttccttcccagcccccacttccccctccccatctcctggctcctggcatctctgggaccgaggcctgggctgggcactgggcactgggcactgggggcctggagaggaaggaggctcgggaggcggcttgagggggagggggaggtttctgcacggaaggtcacgatgtcctgcagccctgtagcctggacctgataattagggcagacaatcccggccctgtgtgcaccagcggctctctccgggctggggccccaggcggaggacaggatggctggtgggggcccagaggcctcccacaaaggcactcctggaaacctgtgggctgtgctgcctagggagagagacagtgtgcctttcattccatccagcctggggcgaagagcgggacgtgagggcggaagtccctccccgccctgggacgtgcaggcgagccaggagccagggactccctttcactggctgcgccgggggatattgagggcagggtgagtcaagaagagggaaaaagtgggaaaagaggtcttgggcacacggtgggaacaggtcccctgccccctcccacaggggatccattcttctggtaggagggcagagggccaggtttgtgagtgtgggatgggagggtgctgaacacttgtaaggaagggggtggggtggggtggccttggcccatcagcaggtgcatgggagggggatcccgggcctctttgctggcccagcataacctgac

SEQ ID NO: 916231 - DNA, 4001 bp, Homo sapiens
gaatgcagcatctccttacccccaggagggcccaagaggttgaattttatctcccttgagcttccctgccaggctggcctggcttaaggcatggctgcaactgaaggctccagggctgcccaacacccccagtcatacgaagcccttccaggagaagcggccatgtggggcactgccacccacagtctgggcacaagctttgtacatggtattcaccaccccactatgccaccccaggaatgcttgctgctgcctagctcagctgcaccctttagggagaaaacgcttgtacactcagcatcatcaaactcaaagggcaggagtaaaggtcagaaattaactggacagggcaagcccaccccttctctaagtccctcctacaaaagggacagagactggggcgggtgggaagaggggaagctgtattttaaccccctagtcccagggctttgatttgccaagttgcctgtccttcctagctcttttccagaaatcaggagtgggagcacaggtaagtgcatgtgtgtggggagaagggatgggagagagccccagcccaggcccccagctacagaaaggtcagcagctatatttaacctcagaccagggtgcggtgggagatctggtttccggaagacggaatggggagaagggcaggttccccgaggcgcccagacacccaatcctcccggtgacatttacagcctggcctttggggtcgggtcaacgctaggctggcaggggaagggcggggccgtgaggtgagccggcgctgcaggaaggggccaccaccagaggggccattttgcggtggaaatgtccttttccaactacccatgactcagcttctcccggcttggcaccatgccacagccaccacacctctgcggggaggggacacaagaggacctccataaacccacttctttgatttaccagagaataatctaggaaaagcatcacccggaggagaaatcgggccagctagcctcgctccacctgacttccccgccacacgcgactccacccatcgaggcaggagcgcagggttagtcaccggcaggctttcctaacggctgcccattcatttccttcccggttgcaacatggcggccgctctaccgcaggcgcagcatccggacagggatgcacccgctgcgcactagcatcccggggcctgcggtgccggaggccgtgggggaggggctcctctgcgacacgtgaccccgcagagcgcgaaaggaaagaaagcgtcccccacctaggggtccgggtcgggatctcgggcgggagtagggacctcctgtttctggggactaggggaaggaggctccgggcagatggcgccgcaagggcggagctgcacagggcgccacagcctgggtgcggggctccgccaggtccgagcgctgaccttgagctctccttgcggggaacagctaccctgcccccatacgactgcaaagacccggagcccgcaaggctcgtagacgcggttcgggggcggtcgcagcccagggccccccagccacccgcgaactcacccgttgactccgaccttcaccttccccatggtgtctgagcgatgtggctcggctgcgcggagggagagaacagtgagcgcctagtggccccggccgacacacacgcctcccctcccctcccccaccaggcctccatgcccagcccgcgccgcatcacgtcctccgcccgcccctgcaatgcggaggccgcccgggcccaccccgcagcggcgcgaacacatccggcctgcgcccgcccctgccgccttcaggccgtccctagcctcccgggtttctctccgcccgtcttcacctggcgacgcaaaagaagatgcggctgactgtcgaacaggaggagcagagagcgaagcgggaggctgcgggctcaatttatagaaaccgggggcgcggcggcaggcggtgactcggaccccgcctcccgccaggctcagccagtcccagcccaaggtcttgaggcctgagctacgtgcgcccgtaaaaccgctagtagccgggccctactttctccccgcttttttttttccgcagccgcctggttcaactgggcacgcaccgagcgtgtgggccccgacgtaggggggaagggactgagattggcccgatgggaggtgatcggtgctggttcccaggactggactgtgggcagcaggacactagggagtcaaggacggggacccttacacgcttggatgaaacaggaggactttgggaacgactgagatggggaattggagccggagcccagcaccgctcgcggctgcacgcggcctgccccctcccctttctttctttcaaaggctgagaggcgggaaagttggggaacttctcctcgaggctctgcggtagtgacaccggactgctcaggcaaaggcctaggaggggcccatgggcctcgggcgggggcccgtggttccttcccagcccccacttccccctccccatctcctggctcctggcatctctgggaccgaggcctgggctgggcactgggcactgggcactgggggcctggagaggaaggaggctcgggaggcggcttgagggggagggggaggtttctgcacggaaggtcacgatgtcctgcagccctgtagcctggacctgataattagggcagacaatcccggccctgtgtgcaccagcggctctctccgggctggggccccaggcggaggacaggatggctggtgggggcccagaggcctcccacaaaggcactcctggaaacctgtgggctgtgctgcctagggagagagacagtgtgcctttcattccatccagcctggggcgaagagcgggacgtgagggcggaagtccctccccgccctgggacgtgcaggcgagccaggagccagggactccctttcactggctgcgccgggggatattgagggcagggtgagtcaagaagagggaaaaagtgggaaaagaggtcttgggcacacggtgggaacaggtcccctgccccctcccacaggggatccattcttctggtaggagggcagagggccaggtttgtgagtgtgggatgggagggtgctgaacacttgtaaggaagggggtggggtggggtggccttggcccatcagcaggtgcatgggagggggatcccgggcctctttgctggcccagcataacctgacaccagccccctgcccttctagctaaaagccggttgctaagtttagcctgcctggtgataatctttgcttaaaaagcacccacaggactccagtccctgaccctgcctttctgggattgcctttcctgctgggacccagagccaggctgtgtcctcgtctggctgccactggcatggttggtgcgggcttttcacaatgaccacccagagcagagtagcaagagcaaggcaagaaggtccctaatggtgaaaggggtggggtgggggagtggaggaagccccacctctgactcagctattcctgcaaccaggaccgttaaccctttctcattgagagcattaagagcacctccatgctcctgcaccacccaagcgtgatcttcccctctgcctcatgcttgtcatttttcattactgtcttctccccgcaaagagggagctcagtgcccagggagcactactgacgtagtgtgctgttgtcatgacagcagaggcaccagtgtggtcacgacagccagctcacagcctccggttcgaaggtgactcagcagagaagacttgaggagctggagaggggtgcgcaggcttcagggggcagcccgcctgcagcatagctcacgccctctgcagacccgggaacaatgaggaatgctgggagacaggtcttgtctcctgcagagctggaggggatcatgatctgaacttccacgagcctgggccggtctgctgccaacctttggagatgggattagggaacacgagtgggggtggggtgaggcacacggcagaaagcaacccttggtctagagcaggtt

SEQ ID NO: 916232 - DNA, 4001 bp, Homo sapiens
aggggctgcccatcagccaggtggctcctcccacaccagctttggggctcaccatgtagcactcaccatgtagttgaggtcaatgaaggggtcattgatggcaacaatatccactttaccagagttaaaagcagccctggtgaccaggcgcccaatacgaccaaatctaagagacaagaggcaagaaggcatgaggaggggaggctcctccagaatatgtgagcagccctaggccacctccccattaagagggcgaatgcagcatctccttacccccaggagggcccaagaggttgaattttatctcccttgagcttccctgccaggctggcctggcttaaggcatggctgcaactgaaggctccagggctgcccaacacccccagtcatacgaagcccttccaggagaagcggccatgtggggcactgccacccacagtctgggcacaagctttgtacatggtattcaccaccccactatgccaccccaggaatgcttgctgctgcctagctcagctgcaccctttagggagaaaacgcttgtacactcagcatcatcaaactcaaagggcaggagtaaaggtcagaaattaactggacagggcaagcccaccccttctctaagtccctcctacaaaagggacagagactggggcgggtgggaagaggggaagctgtattttaaccccctagtcccagggctttgatttgccaagttgcctgtccttcctagctcttttccagaaatcaggagtgggagcacaggtaagtgcatgtgtgtggggagaagggatgggagagagccccagcccaggcccccagctacagaaaggtcagcagctatatttaacctcagaccagggtgcggtgggagatctggtttccggaagacggaatggggagaagggcaggttccccgaggcgcccagacacccaatcctcccggtgacatttacagcctggcctttggggtcgggtcaacgctaggctggcaggggaagggcggggccgtgaggtgagccggcgctgcaggaaggggccaccaccagaggggccattttgcggtggaaatgtccttttccaactacccatgactcagcttctcccggcttggcaccatgccacagccaccacacctctgcggggaggggacacaagaggacctccataaacccacttctttgatttaccagagaataatctaggaaaagcatcacccggaggagaaatcgggccagctagcctcgctccacctgacttccccgccacacgcgactccacccatcgaggcaggagcgcagggttagtcaccggcaggctttcctaacggctgcccattcatttccttcccggttgcaacatggcggccgctctaccgcaggcgcagcatccggacagggatgcacccgctgcgcactagcatcccggggcctgcggtgccggaggccgtgggggaggggctcctctgcgacacgtgaccccgcagagcgcgaaaggaaagaaagcgtcccccacctaggggtccgggtcgggatctcgggcgggagtagggacctcctgtttctggggactaggggaaggaggctccgggcagatggcgccgcaagggcggagctgcacagggcgccacagcctgggtgcggggctccgccaggtccgagcgctgaccttgagctctccttgcggggaacagctaccctgcccccatacgactgcaaagacccggagcccgcaaggctcgtagacgcggttcgggggcggtcgcagcccagggccccccagccacccgcgaactcacccgttgactccgaccttcaccttccccatggtgtctgagcgatgtggctcggctgcgcggagggagagaacagtgagcgcctagtggccccggccgacacacacgcctcccctcccctcccccaccaggcctccatgcccagcccgcgccgcatcacgtcctccgcccgcccctgcaatgcggaggccgcccgggcccaccccgcagcggcgcgaacacatccggcctgcgcccgcccctgccgccttcaggccgtccctagcctcccgggtttctctccgcccgtcttcacctggcgacgcaaaagaagatgcggctgactgtcgaacaggaggagcagagagcgaagcgggaggctgcgggctcaatttatagaaaccgggggcgcggcggcaggcggtgactcggaccccgcctcccgccaggctcagccagtcccagcccaaggtcttgaggcctgagctacgtgcgcccgtaaaaccgctagtagccgggccctactttctccccgcttttttttttccgcagccgcctggttcaactgggcacgcaccgagcgtgtgggccccgacgtaggggggaagggactgagattggcccgatgggaggtgatcggtgctggttcccaggactggactgtgggcagcaggacactagggagtcaaggacggggacccttacacgcttggatgaaacaggaggactttgggaacgactgagatggggaattggagccggagcccagcaccgctcgcggctgcacgcggcctgccccctcccctttctttctttcaaaggctgagaggcgggaaagttggggaacttctcctcgaggctctgcggtagtgacaccggactgctcaggcaaaggcctaggaggggcccatgggcctcgggcgggggcccgtggttccttcccagcccccacttccccctccccatctcctggctcctggcatctctgggaccgaggcctgggctgggcactgggcactgggcactgggggcctggagaggaaggaggctcgggaggcggcttgagggggagggggaggtttctgcacggaaggtcacgatgtcctgcagccctgtagcctggacctgataattagggcagacaatcccggccctgtgtgcaccagcggctctctccgggctggggccccaggcggaggacaggatggctggtgggggcccagaggcctcccacaaaggcactcctggaaacctgtgggctgtgctgcctagggagagagacagtgtgcctttcattccatccagcctggggcgaagagcgggacgtgagggcggaagtccctccccgccctgggacgtgcaggcgagccaggagccagggactccctttcactggctgcgccgggggatattgagggcagggtgagtcaagaagagggaaaaagtgggaaaagaggtcttgggcacacggtgggaacaggtcccctgccccctcccacaggggatccattcttctggtaggagggcagagggccaggtttgtgagtgtgggatgggagggtgctgaacacttgtaaggaagggggtggggtggggtggccttggcccatcagcaggtgcatgggagggggatcccgggcctctttgctggcccagcataacctgacaccagccccctgcccttctagctaaaagccggttgctaagtttagcctgcctggtgataatctttgcttaaaaagcacccacaggactccagtccctgaccctgcctttctgggattgcctttcctgctgggacccagagccaggctgtgtcctcgtctggctgccactggcatggttggtgcgggcttttcacaatgaccacccagagcagagtagcaagagcaaggcaagaaggtccctaatggtgaaaggggtggggtgggggagtggaggaagccccacctctgactcagctattcctgcaaccaggaccgttaaccctttctcattgagagcattaagagcacctccatgctcctgcaccacccaagcgtgatcttcccctctgcctcatgcttgtcatttttcattactgtcttctccccgcaaagagggagctcagtgcccagggagcactactgacgtagtgtgctgttgtcatgacagcagaggcaccagtgtggtcacgacagccagctcacagcctccggttcgaaggtgactcagcagagaagacttg

SEQ ID NO: 916233 - DNA, 4001 bp, Homo sapiens
cgtcaagagatcgagaccatcctggccaacatggtgaaaccccgtgtctaccaaaatacaaaaatcagctgggcgtagtggcacacacctggagtccaactactcgggaggctgaggcaggagaatcgcttgaacccgggaggcagaggttgcagtgagccgagatcgcgccactgcactccagcatgggcgacagagcgagactctgtctcaaaaaaaaaaaaaaaaaaaaaaatagagataacatgaactacattttaggattactaagaggtttaacaataatataagtaaagaacacaatacctgatatataatgatgtgtttgataaatagtaatccacgtgtttatgatgtgtcagatactgttttaaatgctttacatgtataatttagtcaataaacaataattatccctatctctggtactgccttcaccttctacctctccccatcctttggggagagctcaaaactttttgtctaagttaaacagcagagaaataataatagctatgtatcaggcactgtgctaaattagttacgtggaatttcatttaatctttacaacaatcctctcaataaagtaggaactattattaaccttctttcacagactaggaaatttaggcttagaaggattaaataatgtgtctaaagtcagatatccaatgaagtctgatttcagagcccccctgcttagcaactctgtcacgctaaaaaaaaaaaaattactacttctaattcaatgtcagatagcaaacacctactgttcaatgacagttggtttctaatgagattttgaaacagatgagtcagacaacaggtatcggcatctacaccagatcactagagtttccacttctgtcatttgaaacagttccaatttgttcccaaagggaatctgaggtggtgagaatttcaatttctaatcatttaagtgccaagacaggtgatcagatagcaattcacaaagcggttctgttgttcttgttgtttttgtttgtttgttttttgctcttcacacaagcgaagcaaaacccaggctctgacctaaaatcatctctttgcaaccactggggatcagctattccaccatgccatgccacaaagcactcaaatttacaacattcaatccctcggtgtgaaaagattaggaaaggaaccacgggtgactgcatagaggagcacgccctccaaaactttcctctgacttccaaggcactctacaagccttccctttcttttgccagcctctccccgggcagtcctccaaactgagggttgtgggcggaaggcatcgcgcagggtctccagctctattccccagttccgcacatgtgggcgttctagaccctgcatggactgggagaaaaaacagggaagagcctataaaccttgctagagggcaagaataactgtctgtctctttctctttgcagggccagagacttcatcaattctttccgaggatgatgaacagaaaaaaacagaccctctaagtgccaggcgcttagggatgagggtgcccctgaagatcccacagtaccttcgggctctgataccgctctggatttaaagcagggcgagtagcggctggatccctcctccccagctgagctcgcccacaccagcagccccaaccgccccgcacacctgtcgcccctctctccgcacttgggtggacaggtgaaggcaggcgcaacgtcaccttgacggccccaggagccaatcagagcacgcgactgccgcagccaggcaaacgcagagcgtactggctcccgcagccgggagacccaacaaacctcagcttcggggcctcagagagcggggggctcctggagccctcaggctgaggcgcggaggccccgagacagcgcgtaaaagttcgccaggaaaagagaagacaaacagggaagtactcaccaggcgcaggagggtcacttctcccagcggggcgacaactcggctcaatctgtgcggggccaacacgcccctgaccaaccgccgccgctgccgccgccgcctgggcctcagggtcagtagccgctggccgccgcctgtttcgaagggaccaatcataaggcgggggcgtggtctgaggccccgcccccgggctgccgggaagcacgcgacccgtgggcgctcgcctgtcagcgcgtccagcgctgcgcctccgggcgtctcggagcttcggtggccaagtccctctgttcactgaaaggcgaagtggttcagtcagagcaggtcctccgatctggcctttcagcgacagccagttcgaaagccacagcccgtcctgttgttcccacaggcctgagaggtgaatgaacctcgcctgtaataattgcttctgagcgtcctggaatgttgcggtgcagctgaaggcgcttccctgagttttatcctggtctgttaagagccgctcccaaccccacatccactcgggagctggctgacctgagggcgccacggtttccagagacgcagcctggaacccagcaggaatgggggtcctcagcagaaatctttcagagagaggcccctcttctcaggtgcggagggatgaggaggaatcctgtagtcccaagtcacaaaaggaggatgttgactcttcagcaaacaccggagcctgaaaacaaaacaaaacaaaacaaaaaaacaatgaacttcaacgtaagggatgcttactagctcccagggttgaaataaagccgagactagacatcagtgtaacaatcccaagtcggttatatctgtaaatgtggcttgtttcatagcaaaaaataaaataaataaataaataattttttaaaaaaatcactggctttgtccccgaggcctgtgttgcagcccaggcccttcttttttttttttttttttttttttttttttttttgagacagggtcttgccctgtcacccaggctggagtgcggtggcacgatctcggctcactgcagccttgatctcacggactcaagagatcctcccacctcagcctccagagtagccaggattacaggcctgtgccaccacaccgggctaatttttgtgttttttgtagaaatgggtttttgccatgttgcccaggctggtcttgaactcctgggctccagtgatcctcccacctcggcctcccaaagtgctgggattacaggcgttagccacctcacccggccctattcagtcttttagccttcctcaaatcatgtctcctctctgggcctcaggtctccatctgtgaatggtgggcactgaactggaatgacatctctctctagcatttattccttcctttactcaacaaaaacaatgagatgtactgttgcttgctaaagaaactgaaatgaaaacagccttaggcttcaaagtgctcagcagcatggtaaaggccaaatggaagtctgtggaggtccatgaaagaaggaacccctaagagtcttgaagggtgatggcagaggtttgaaaggagctgaatttttaaagatgaattaagactctgccaggagggagggataactgggaataagaattaatttccaggcagagagagcaacaaagacaaggttccagagatgtgagagtacatgaaatgttctgagaatactcattttgaatgactgaagtctgcagattgggaggcagatcagatgggagaagtagacacaaatgaaaggcctggtagatgctgaggaatttagtttctttcccacaggcaattgggatgattataaggaaggactggtaggaacagatttgtgttttaggggaaaaacaatattttcacagatgtttgaagatggtagtaagacaggtggcaatcccttaaattaaaagatgacggttacctaaattatctcagaagggatggtgaggaagaggtatctggtgatacctaagaagctgactcatctggacttagttattatgtgattgatgatggtaccaatctaaagaatacaaggaaaacaggctgtgggggaaaataatgcattttgg

SEQ ID NO: 916234 - DNA, 4001 bp, Homo sapiens
aaaaatcacttgaacctggagggtggaggttgcagtgagccaagatcatgccactgcactccagcctgggtgatggggcaggactccacctcaaaaaaaaaaaaaaactttcttgaggaagtgggaggctgaggcaggaggattgcttgagaccaggagtttgagaccatatggggcaacatggcaagaccccgtttctacaaaaattttaagtattagccaggtgtggtggtgcacacctatagtcccagctatttgggaggctgaggcaggaggatctcttgagtctagaagtttgcgaccagcctgggcaacatagtgagaccccgtcccaaaggaaaaagaaaattgcaaagtagagaagacatttgaaagaatcaaacacggccaggtgctgtggctcatgcctgtaatcccagtactttaggaggctgagatgggtggatcacctttgctcaggagtccagacaagcctggggaacatggcaaaatcccgtctctatcaaaaatacaaaaaattagccaggccaagtggcacgcgcctgtggtcctgtacttgggaggctgagatgggaggctctcttgagtctgggaggtggacattacaatgagctgagatcatgccactgcactctaacctgggtgatagagtgagactccatctcaaaaacaaataaaataaaaattcaaggcaggaataaaacagtaactacataatgagctcacattttaataaaagagatataacaaatgaacaaaagtccattaaaatgttagggaaaaaacccaataggatgagttactaactagaaggggagaagggatttggagtggttaggagagccctttctgagaagataagctgagacctgtgccaagagggaggcagccatgcaaatactgagaggaaggaaaaaaacgaagggccagtgcagagatctagagaggaaaagaacttgtcttgctggagaagcagtcaaggtagccaaggagagtactgagaagagtacgttggagtgagtaggtagggactctatggagtagggccttaaaggcgatgattaggccaggcgcggtggctcacacctgtaatcccagcactttgggaggccgaggcgggtggatcacggtcaggagttcaagaccaacctggccaagatggtgaaaccacgtctctactaaaaatacaaaaaaaataagccgggcctggtggcagtcgcctgtaatcccagctactcgggaggctgaggcagagaattgcttgaacacgggaggcggaggttgcagtgagccgagatcgagccactgcactccagcctaggcaacacagcgagactccgtctcaaaaaaaaaaaaacaaaacaaacaaacaaaaaaaaaaacaaaggcagtgattagcagttcgggttttgtttccacttacactagcgagagcatcagtaatgaacaaggggaagagtgaagccactgactcgcgaggtgactgtgggcaagttcctgaatcttgctaacactctttaaccccctggaaaactgttcgctaatcgtcacattaaacggctgcgaacgggccacggtcaaggcttcggggctgcagccgcgagtttacctgtcctccaggaccgattccatgggctccaccccgtctgtgtccacggcgcgtagccggtcggcgaaggcgatagctttctccagtcgcgccactgcctcgcggctgccgaagtccacaagcgctagacgctccaggtgctcgatcaccgcagccgtgatccggccactgccctggaggagggatgaggcggggagtgtgggtcaccggcgctccgaagtgcctcccggcttgctccgccacccgcctagatggccctggcctttacctgaggatccgccttggaggtgaagccctggcgcccgcccagaggggcccgaaggcccagccacaccaaccgcgaccacatttcttccttccttggcccccgcagtgcgcccgcgcgtaacgccgagcgacgcgcctgagagtgatgacatcagagtgcgccgtcgtcgccgccgccaccactgtcgccatgaacagtgtgggggaggcatgcacggacatgaagcgcgagtacgaccagtgcttcaatcgctggttcgccgagaaatttctcaagggggacagctccggggacccgtgcaccgacctcttcaagcgctaccagcagtgtgttcaggtgagccctcccgcctctgttcccaggccctgcattctcggcgctgtgtcccaccacactcatcgtattttacggggattgggactggactggaagggtggagaaaagtcgcagtgaggccagtggcaggagctcgctcccctaccatcaccaccgaggccacttgggtgtctctccgaatgacaaatattggggcagtgcttttcaagaagcacagtcacatcctttggttcatttggtgttcaccctaaactcgcaaggtgggcatagttactcatattttatacataaaaaactaacacccagaaataggaagtgattaatccgagttcactagcatcaggtttccttggttctttcgcaggtggtgcacttttccactattactgctggggtctgggcgggattatacttcagaattcagactggagggtcacatttttttgttgttataaacccttcgttagcctgtttctctctcttgaccagtccccgcaactgcagccaggaaatgtttattctggcccaatggatgtggaactgctttgaattgttaagaacagcaccgggcaaagcacttccaataagttaacccaacacatcctcacagcaattccccgaggtagttgctgtcttcatcccatttacagttagtcacatagccagtaagtcctggaacccagatttgaacctaagtctttcactaacacaaagtgatgattatttttcaaatttcacttaattttaacggttccctcacaactccttttccagtctccctcaggtcttacacttgatttattcattatggtacttctggtttttatttatttttgaggcagagtctcactctgtctcccagcctggagtgcaatggcacaatctcagctcactgcaacctccgcctcccaggttcaagctattctcatgcctcagccacccgagtagctgggcttacaggcatgcgccaccatgcccagctaatttttgtatttttagtataaacagggtctcgccatgttggccaggttggtctctaacttctggcctcaagtgatccacctgccttggtctcccaaaatgctgcgattataggcgtgagccaccacacctgaccggtacttgttttttaaaaagtatgtggtttgaatcatggttataagtctttataatcagcttgattttacttttgtactgtcatattttatttacaaagcttgcaacttaagcttcatgtaggtctttataatgtgttttctcctcctaccagaaagcaataaaggagaaagagattcctattgaaggactggagttcatgggccatggcaaagaaaagcctgaaaattcttcttgaccttgacagtcaccttgaaggatttcgcaagtccagaaattgaggactctggatttttgtcaactaactctgtgaacatagccatcagatttgatgaggaacttaggagagaggagttttatttcctccttcgatgttttcctctcagttgtaaaagatgaactctttgagatgatttctcacctgctgtggtatcttgcaggaactgtgtgctaaaattgaacaatttttttgagattatggttgcaatacttggcgtggaatcagctttacataaatataccttgtatgcaaacgatgataaactagtcaggatgagcagagctgcctgacctcttgatttctgctgcaaaagacatatacactgtactggggtcactatttatgaaagcaattggttaggacctctttttttcctctcagggaactaatgc

SEQ ID NO: 916235 - DNA, 4001 bp, Homo sapiens
gacagagcgagactccgtctcgaaaaaaaaaaaaaaagaatactgaagacaaggccgggcatggtggttcacgcctgtaatcccagcactttgggagacagaggcggacagattgcttgaggtcagaagttcgagaccagcctacccaacatggtgaaaccctgtctctacaaaaactagccgggcatggtggcgcatgcctgtaatcccagctactcgggaagctgaggcaggagaattgcttgaacctgggaggcagaggttgcagtgagttcagatcgtgccattgcactccagcctgggcaacaagagagaaactccgtctcaaaaaataaaataaaataataaaaaataatttcaggccaggtgcggtggctcacgcctgtaatcccagcactttgggaggccaaggcagaaggatcacctgaggtcaggaattcgagaccagcctggccaacatggagaaaccccatctctactaaaaatacaaaaattataaaatacagaaatattctcctgcaccacccaatacggtagccactggctacatgtggctaactgtgcactgaaatgtggctggtacaagtgaagaactaaattttttttttttttgagacagagtcccactcttgttgctcaggctggagcgcagtggtgcgatctcagctcactgcaacctctgcctcccaggttcaagcgattctcatgcctcagcctcctgagtagctggaattacagacatgccaccatacccggttaattttttgcatttttagtagagacggggttttgccacgttggtcagactagtctcaaactcctgacctcaactgatccacccgccttggcctcccaaagtgctgggattacagggtgagccaccacgcccagccaaacaatgaatttttttatttaatttaattttaacaaacttaagccatgtggctgccatactggacattgcagctctagagatttttccctcaagtgagtatcaatgttaaacattcagcatgtattcccctaaccctctcatactaagcttttctttctagtattcagtacaacataacttgaacatcagccacctgcataggagtctcagtaaatgtctttttgaatgcttaagtggtcattttctgggcctacacataaaaatcaatcccatcaccctggagacaccaaatcagcccagctgtccttagacacctgttcttcccctgcctcatgacaatgtcttttcaccttaaaacataacaactgggtggaggaaaaggttttcccaggtccttcctgaactacaaggtacccataggtaacactcttcctggacaggacagttcttttcactaaccctggatctgataacaaccaacatatatcaagccgtattttatctcactgaaccttcacaacaaccttttaagataagtattgttttaacttcattttatagatgaaaaggcagacttggcggggttaagtcacttgtttggcatgtcacagaaatcgacgagcaggaactcaagcccagatctgtatgaatccaaagactacactcaaagtccctgctcatagtaggtgctcaaagaatatttgctgaatacaaagtttaaggaagacttggcgttggcccggggctcacagccggagggctttggagaaaagaagtagaggctcggtaaagtgaacttctgcaactctggggtcgggcaaaggccccgccgagctccagctgctgaagtcgaggcgggagccccggactcctcgagcccgcggtctgcctgcgccgcccgggccgggccaagcccgcagccctgagagtccagcctgagacggccccgagactacgacctccacagccaccacctccaacgcccctaagccgaggagcgagaggggccccgcccgacggccaccgtccgcacccagtccctggccgcgttggccccgcagccgcccgcctcacctgcgtgtccgccgccatcctgccggggctgactccggaaccgcttccggaacgcttccgggtcacagcgtggcccacgcggcagggcgaggccgggagccagcgggggcagggccccgggcttggtgcccccgggcaggacggcggccgctgcagcccgggcagccggatcacgggcttaaagttggcccgcgcccgagccacaaggcctcctccccagggcccgctcttcagccccgggcgcctcgtgggagactagcgcttgtaacgtggtgagcccgcggtgtaacgctatgggcccgccttgcagcccctgacccacttccagcccgcagggccagccctacgtgggcctttcctgagtgatgactaagttctttagaaaaacaagtgttgcttcctagatagcaggaactaaaaactaggtaaaagagtcggtgaactagtcttttgtcctcagtttgtagttcagttggcggatgacttgtacagggttagcaaacgtggctggatacggaggtcagggaaggttcagaactgaacgaggcccctgccctggggaaatgctggacgccccaggctgggagttttgaaggccacagggcaagaggctacgtgcagacgtggctgcaatttagggaacagggtctccacagcttagttgtcagccctgttagcagtggctttcaaacctttgacacagacctagttagaatgaatatatcatgttccagcagacagatctctaagtgaaatacaggaatcacaacaaaaacacctattctcagcagatgctgctttctctttaaatactggggccaggcatggtggctcacgcctgtaatcccagcactttgggaggctgaggtgggtagatcaacctgatgttaggatttccagaccagcctggtcaacatgacaaaaccttgtctctactaaaaataccaaaaaaaaaaaaaaaaaaaaaaaaggccgggtgcggtggctcacccttgtataattccagcgcttcgggaggacagggcgggcagatcacaaggtcaggagttccagaccagcctggccaacatagtgaaaccccgtctctactaaaagtacaaaaattagccgagtggtggcacatgcctgtagtcccagctactggggaggctgaggtgggagaaccgcttgaacccgagaggcagaggttgcagtgagctgagaccataccattgcactccagtctgggtgacaggacgagactgtctcaacaacaaaaaaattagcccggtgtggtggcagcctccggtaattgcagctacttgggaggctgaggcaggagaatcacttgaacccaggaggcggaggttgcagtgagccaagtccaagccactgcaccccagtctcaaatatatttgagactatctcgaaaatataaattggttaccaccgagttggagcaccacccagtttgaaaaactttactctaggggactggccccagcatccaccaggtgcctatctcagctgacactaaacctactccaagtatgcagcagccatagaaacagtaattctagtgtaatagttacaactgtgtctagaaaactgtataggatgtttgattggtagcttcatttagatacccaaacatcaacacctaaatacaaagctctggttttaccatggctttcgtttctagcatatggcactataaacctcaaaattaagggccaggcacatggtggctcaagcctgtaatcctagcactttgggaggctgaggcaggattccttgaggccaggaatttgagaccagcttgtgcaatatctctacaaaaaaaaaatttaaaaattagtagctgagtgtcatggtgtgtgcctgtagtcccagctacttgggaggctgagatacgaggatcccttgatcccaggagttcaagggtgcagtgagttatgattacaccaccacactccagcctgggcaacagccagaccctgtgtcaaaaaggaaaaaaaattacaaaattaagagtccagagactttttaaaga

SEQ ID NO: 916236 - DNA, 4001 bp, Homo sapiens
cacccatcctggaaatcttcacacacactacaccacagagactagagtatcttttccctctgtaaccttcatcttccagcaaactcttgatctgaattcctctataactctgtttcctagaaaccccaccccctacccctgccctcagtcgatctgagactgaccctagcttccataagcagaaggcttaagaatagaagggaaactgaggaaccccagaccggatccccatacctcccacccccacagccagtttcctggttctttgagtttaacagccctgaccaagtcttgtggaattgaggtctgcagaaataccaggggcagtgtgaggcactcagcctcccagatgcacacctgggttcctgtgcctctcccatgggggtgggccactgggactcccctcagcccccagctttttatgacccatctgccaataaaccagtctcccccgtcttctgttcacagccataaaaccaaactctgtgtgtgttgcagggggctgtgggaaggggggaaccttgccaaaccactagggaataagagaggcctggttccctgtagttggggagggggggagacctcagtgggggaggagaaggagtcacctgaccctaaggagagctggaaaagggggggtgtagtattcgcctggattttccaggccataaaatttcaaagcagctcatgtctattatatgttcatcttccgtttggtcaggggctcggatgcctgggttcctgctcccccatctactactttctcttttttcctaggtcttcgtctctctcaagtccacctgcggtaggggtgggcgaataagggatggaacactaaggtttgagtagccaatgagtgtccttagcccccagcgcaatggagttgagctctccgagctcggtcagtatcaagaaggcacagcttttccgaccccttgggatacccggtctgagacaggggtcaggatggaaagggtgccagctgggctgccaggaggtgtacagggctctgggaccctattcttgggagaaagcacacagttctctgcaacccgttgggcacgttgcgaacggagcacggagtggggagttaccgccagggccactgggaagcagagagcactgcagtccagctggggctgcgggggtcctgcagcctcccgattctgttctccagcctccccaccacggcttttcaggacagagtcactgcccagccccagcttccccggactccaacaaggatctttttagcatactgggggtggaaggcactatctcgaaacccgccccatttcccccgccccaacctccgggaactaggcgtgcatacaactttgcagcccatctccaccgctcggaaaacttctatgaagtagcccccgctccctaattcgtcaagttttcgcagaaaaagcttccgggccggggcagcagggagcgccccgcttggagcagaaggcgcccttcgcggggccagagccagcaccccactgctcgcgccccgcagcccacttactctcctgggccatgctaatgacggtctcggtggtggcgtggtactcgtcctcctccaggaagtcctcgggctgcagcgcgtcgccctggaagtcgtgtaggtccaggatctgctgcagcggcggcgccttgggcagcagctgcttcaccacctcgcggctgatgttgggcgcctccttgagccgcagtttgctcaagatctgcgacttgatgctctctaggcgcagctcgcggctgtgctgccgccaaacgcacacggggcagccgtccggctcgggcgccacggacggggctggccggctggagcgctcccccccgacccccgccgctgccgccgccgccgccgccgccgccgccgccgcggggccctcggccgcctccccccggggccgcagctccagggcgaggagcaggaagcccagcagcagcggggccgcgagcaccatgctggaggggaggggagggaggactggggggcggggacgccggagtcccgcggggagggggcggagggaggagggagggaggaggagggggtccgggcggcgcgggattgggggctgcccggccgaggggggacccggggggccgggggcggcgggcgcgcgggcggggcgggcgggcggccggggcgggcggctgggggggcccgagcccgggccaggccctttatagccccggcccccgtgtcgtcagcggccgcgattggctgcggagccaacaaaagaggcagcgctgtcatccgaggcgagagagggagccggagagagccgaggaatagagagagggagggaatgagggagcaagggccagagagagatgaagagacagagatatgagggggcgggggggcggatatagagggaaagtcagagccagagagaccaaggagaatcagagagataagggggaagagacagagataggaaaaggaggaggagagagggagagacaaaggaggaaaagaagagtcagggggaagacgcagaggtgagagacttagctagagagggaaattgtgtgtctgtgggagacacagaaccaagaaggaggaagactgggacaactagtgggagagttagagtggagacaaaaatggggagaagaggggtaccactagatagggggagacagaggtctacagagccagaccagaagagatcgggggtcatggagatgggaacagcggcagaggaacagaggacagaagagtgccctgggaaaggggtgggggggggggtgggggggagagaaatcaggatgggggaggagagagaggggcacagacagggagacaacaagggagcccctgaggaggcaggtgcaggggattgggggtgggggagaggaaaggcagaaactcctgagagaaggagccacaagagtcagccttggtgggagcacagagagcccaggggacagaggtggagaacttgagaccagaggagctctagccaccagaggtagcccaaagaagatgctcaaggaagccatggaaggaagcaccaggctaggctcatcagagggattaaggggactaggagaggaagaggtcagggacaacctaagaaggtggagaggtgatgggaagaactgaaacagagggaagacatagagctgggaagactgtgagcttgaaactggggcttaacagggctaatgtagtcagccggctggaaaaggcaggagctagaggccactgggggaagggtgagaggagatggctggaggctgttatacttggggagaaatctagatctctggatttctagctatatctttggatctgcagggtcttagaagtctgagaaggggctggaggttgcaagggtgagcatgggaaagaagtctgcgctcagatgcacgagatgaaatacagatgtgggaccagccctagtcttcaggtgtgatcctgggcagtcagagagcagagtaaaacagtactaaggtgaaaaaatgttttgaatgtgcttaacttctgacttcaggttttccaggcttatttctggatctgaaagccctggagcaatagtcaaatggaaaatgtttgtgccaggccaggcgcggtggctcacgcctgtaatcccagcactttgggaggccgaggtgggcggatcacgaggtcaggagatcgagaccatcctggctaacacggtgaaaccctgtctctactaaaaatacaaaaaattagccgggcgtggtggcgggtgcctgtagtcctagctgctggggaggctgaggcaggagaatggcgtgaacctgggaggcggagcttgcagtgagccgagatcgcgccattgcaccccagcctgggcgacagagtgagactccgtctcaaaaaaaaaaaaaaaagaaaagaaaagaaaatgtttgaaggaatcaggtcttgctaatttcctggcattcacaatgtttatttaataaatggatgaactttattattgggcttctcagaatagaggggcattggtttcctctctgga

SEQ ID NO: 916237 - DNA, 4001 bp, Homo sapiens
cctcatctctataaaaaagtacaaaaatcagcctggcgtggttgcgtgcacctgtagcctgtagttccaactactctactcggcaggctgaggtgggaagatcgcttgagcccaggaggtggaggctgcagtgagccgagattgtgccactgcagtccagcctgggtgacacagcaagacctgtctcaaggggaaaaaacaaaaagaggaagaacaagaggaagaagaagaaaagcctgaagtacttgaccaggcaaattctgagggagtacttcaggcagcctggatacagcacgtgtgaggatgagacaagagtgcatgctctagaaggaatagactactatgagcttggagttgagtgtgcaaggagagggtgtaaaaggtgagactggggaagtaagcagcagggtcagaacaggcagggcatggtgggtcaactcttgcagaattttgcagacgagaattttacgtggaggagcagtacgactcaatacgcatttttaaaaggtaattctgggctgggtgcggtggctcaggcctgtaatcccagcagtttgggaggctgaggcaggcggatcacctgaagtcaggagttcaagaccagcctggccaacatatagtgaaaccctgtctctactaaaaaattaaaaaattaaaaaattagctgggcttggtgacacacgcctgtaatcccagctacttgggaagctgaggcagaagaatcacttgaacccaggaagcggaggttgcagtgagctgagaaagtgccactctactccagcctgggggacagagcgagactctcaaaaaaaaaaaaaaaaaaaaaaggcaaactttatcttgtattctcaaggccatacacagttcctggctcaccataggtatccaataagtgcttcttggacaaataaatattcaaatcttctctccagttgctgtaaaactaaccaaggctctaaattctgcatctgaaacacccgggaggttgtatagacatgcagattctcaacacccatttcagactttgaataagaattgggtggggagaactaggggcaggaatggggttggaggatctactgttaatggaagacctaagttatttggtgggtggtcagtttgggaaagtactggatcccactcactgagatccttttaaaaggatatgacagttgtatatattattgctctctattcacaaatctagaataacctttgccacccaacaagagtagccaggaggtacaaataagggaagcaggactcctgggcaaaccaacctcaaaattttcataccctgcttgccacatggaagacggcaggatgtgtatatatgggctgcagggtgggagactgagctctgattcctccctcacctctttcatctcaactgaagcacaaagcagttgattcagaaaacaaaaacctatttcaaatcctgactttgttctcacacactagctgtatgatcttgaatagattacaggttacctactgtctgagcctaatttccttactgttaggaacttgataagaatatctaacttcctctcaggatcgtggctggaattaaatgagacaaaatatgaaaaataccagcacaaggccatcagtaattgtcatttcctattgtcctttcctttcttcacaccacccagttccagatgtttttctggataacactctatttccttaccttggtctgggagaaagcgaagtacattcccgcggacgcccagctcctttacgtagcataagtctcgggagaccccagtggtcgctgctgcctcgcgatcctggaaaattttcttcaagatataaggcacaggttggaacttctggggtgaaggcgccttatctaagcccagaaattggagaaagacatattcttgaaattggactgcctggcccaaagccagaattaacaggaagctgaaagccaaatctggcaagaaacgaagcatggcctctggagtggctgtcagaccggggagagctccactgccagactgcccaacaattcagaggctgctaatttatctgatgtaagataatcaagtgtgaattgctctcttcccagctcctcaaaggccattggatgtgaagagggaatttttttttctcttctcttgctctactcttccaggaaaaagttcacagaacaaagattaccaatgcatggacataaattctacaacaatgtgaggttgtcagcagtagacagagtgaaaaggagacatgcatttattcatttaacaaacagttactaagcatctattatgtgcacggtgctgagataggtgctaggaatagagcagtgaataattcatagacttgtaattaatcatctacatagaccaagcttgtccaacctgcggccggagggtcacatgaggctcacgatggctttgaatgcagccccacacagattcataaacttccgtaaaacattatgaaactttcttgtgatttttttaagctcatcagctatcattagtgttagtatattttacgtgtggcccaaaacaattcttcttcttccaatgtgacccagggaagccaaaagattggacacccctggattagacaaatactcaagtagatttcattattttatttttatttttatttttatttatgtatttatttatttttgagacagggtctcgctctgttgcccaggctggagtgcagtggcctgatcttggctcactgcaagcctcgaccccctgagctcaagagatcatcccacctcagcctctggagtagttgagactacaggcatagggcaccacttccagctaattgttttattttttacagagatggggccttgccatgttgtccagactggtcttgaactcctggtctcaagcagtcttcccacctcggcctcccaaagtgctgggattgtaggcatgagccactacacccagccgccagccttgtttctcaccacccaccatccttagtgtggatgctctaattacattgacctatttgtagctctgtgagctcatttcatctcagagcctttacacagaccaagttcaaaggtcacctctacttccacagtttcgactcaccaaaatagattgagatacttctttctcccactgagccatacttgggcatccattacagtttttttgtttttttgttttttttgagacggagtttcgctcttgttgccctggctgcagtgcaatggcacgatctcagctcaccacaacctctgcctcccaggttcaagcaattctcctgcctcagcctccctagtagctgggattacaggcatgcgctaccatgcccggctacttttgtatttttagtagagacggggtttctccatgtcggtcaggctggtctcaaactcctgacctcaggtaatccacccacctcggcctcccaaagtgttgggattataggtgtgagccactgcacccggccctccattacagtttctgcagtgcattttactgtgtttgcctccttccttttcagacaactcacaccttgaggatcagaactgtgtctctttgcctaagtatcttcagtgtgtctttttccccaaagtatctccactggtgaagaaagtgtccggcaggtagcagacatttgataagtatctgtgcaaaaaataaattaaggaattaattggttgctatttctagaggtctcactcttttatatagtgaggtcttccccatttcttttttttcttttttttttttagagactaggtttggggagtgtctcactgtgttgcccaggctggccttgaattactggatcaagggaatcttctgcctcagcctccaagtaactagaactacaggcaggtgccactgctcgcaggtcccacttctcttatctcctgtttctatcttatttaacacttttaaattaatctacaatcttaaccttttttcaacaataagagtaggttgtatttgggttttctttatttgactttcctgacttaaggtcagaaatcagac

SEQ ID NO: 916238 - DNA, 4001 bp, Homo sapiens
ttcgttcacgtgcattttaggggagaaggccttagcattcaacagaatctcaaaggggtccctaaccctacaggtaattctctcagtagggctgtgcagaaaaggcagcacaaattcccagctgctcaatttcacagaatatttcaaggtagcctaattatattcaaaacaggaaggaagtgactcaagtctctgcagattaggcgtatgagacaacaactaaagcgatacaatggaagagaaaatgttctgaaatgcacaaaatgctgcaaaagtatatttaggatggcaatggaggaacaattttgctttgccctgtaccctatcaagaagcaaaacaatatgcattccaagaggaagttagaagctagacacatgtgaatcaaatacatcacggtaagttcaactgaaaataggcaagaaaataaggaagtggaacaaataacatttttagagaaaatgatggagtttgtataactcacactaacttggtttagaaaacacttctttttaaactcctccataccccctccctatcttcaaaggaaactggtaacacctgcactgtacgggccataaaacaaccacatgaggtttgagttatcacagttctatttacaattggtctccacttccaaatgacaagcttaagatcagaacagttgcaaagccagtggtgttcaatgatttaattaagattgtttatcggacactattgtgccaagaaagccatgttaccttcgaattaactcaaagccaatacatccaagcacctaaaacagcatgtaataatctatccagagacctgacaattcagttgcaattgctaagacacacttgatctctaaatgtgaatattatgtatgaacagttatgcatcattatgaaggaatggctttagcgtttcaatgcccctatattgctggtgattttgcgtttgtttccgttgtaatcaacgtatgatttagatagtcaaatatagctttaagggactacaagagttctactgtagacagcataatgcaaaaaagaaaagccttagatgatatgattctacgagtattcattgaatcttcctcaccactaagcgtgatactcccgattatcctcattgaaaaaaatgaggaaatcaagcaagtgaccaagtgaagtcaccagcccaaggtcagccagaagcaaaatctagtttgaacccaggccgttcagatcctcaaacttgagacaagcactgcctcctaagtgctggttgtgtttggaagaccccgatctcctggcaattctcccgggcagagtagctgtcggatgtcagcagcggggaagtcatctacggggaccctctggcgagtctcagggagtgtcatcctccccgggcaggacacccaggcggagaaagggtctagtgggaggtgacacctgcagcctctggaggctgcagccgggaggacgctcacattttacttctgtaattggctttcctgtggattgcccaagccccttcctgttgggggagcagccctggcccccgtcacctccccagttggcctaggacggagggaacgggagggaacgagagggaagggagggccgcgagggacggggagggcggcggccccctgcccgcccggctctgacaggcccgggacggttcccaccccaaggccgcccagggacctcttcgttgcgaccctagccgcgggatgcagcctgacctgagggggcggccccggggtaggggtccgggccaggaaagcagaggggagcgggcccggccggtgcgactcacccggcccgctgcagtcagcgcacacctcgctgctccggagccgtttcgacatggctcccacctcccacctgcggggaactagaggccgggggacagcaaaggcggcggtggcggcggcgcttccgctctaacgggtcccagctgcggcggcgctgacggcggcgcctctcccctcagcgccttgcagccttggcacagcacgcacgcgcggggaggtgcccttcggcgagtgtcaggtcatgtgaccggaaagggcactctgccttgtcgccatcttgagtgagggcaggagactgcccgagtatcatctgtcctacctttaaatattgaatttgggtcttcttctctggcagagattcccctcgtcccaactgattaataccaggggaagtagcaatatcttgtgatgagaaccctgcagccacaaccttcctgaggcaatcaatggtcaagttcattcattcattccttgattcaacaaatgtttatcaagcacttaccatgctttatatactgtcccagccactggagaaacagcagtgagcaaagactgaatttctagtccttatgaagcttgcattttactggggtaaagtaaaataagaatatattatatgattccaggctgggcgtggtggctcactcttgtaatctcaactctttggaaggctgaggcaggaggatcacttgaggcaggagttcgagaccagcctgggcaacatggtgaaaccccatctctactaaaaatacaaaaattggccgggcgcggtggctcacgcctgtaatcccagcactttgggaggccgaggcgggtggatcacgaggtcaggagttcaagaccagcctggccaacatggtgaaaccccgtctctactaaaaatacaaaaattagccgggcacagtggcaggagcctgtaatctcagttacttgggaggctgaggcaggagcttgaacccagggggtggaggttgcagtgagctgagatcacgccattgcactccagcatgggcgacagagtgagactccgtctcaaaaaaaaaaaaaaaaaaaaaaaaattagccgggcgtggtggcgcatgcctgtaatcctagatactcaggaggctgaggcatgagaatcgcttgagcctgggaggtggacgttgcagtgagcagagatcgcgtcactgcactccagcctgggggacagagcgagactgtctcaaaaacaacttcaacaacaacaacaaaaataacaaaaaagaatatattagatgattccttaggcttcagttttaatctcatgttcaaaattaagataatgcattgtttacttctagtccacgatttgtttttgtatggcttgctacttaagaatgatttttacatttttaaagggttgcgagatgaaaatgaagaagagagagagggaaataaagaaaaagaggaagaagaatatgcgacaaaacttgtatgtgaccagcaaagttaaacattcattttggctaaggacagatggaataaattatgggaaaaatgtgatacacctgctggatagtaacccctcagtaaatagtagctcccataattatggatattgctattattttctaattactgtttttcttcatatgcgtggaatttgagaataacaatagctaacatgggataatttacaaaatggtgtgagataaacacaatgaaatgaggtaaatcagtgtgaaggagaaaggagatgtgaccctaataccaatgactacttattgtctgtcttacatataaacacagctatgatctccattcagcaaatattgaatgcctgttgttagccaggtactattttggttttagatactctggtaagcaaaacgatgtggttcctgtcattatggggttttctgattaatgagatagggagattttcaataaacacggcatgatgaagaagaaggagaacgttaagttgcaaaaggcatctgaaagaatgagaagtgctggaaaaggcctcagaagcactggtcttgagtccatctctacagtgtgataaatgtgtgatggagaaataatcacagaattcccacgcattccatggttagagtctccgggtgccatcctggtgctcctgcatcctgttttggtttaacaactcacaaatcttctgggctccacatctgtggagaatggattaggttgggattcttgaacagctgttgttgcaggcatctgaagagctggatg

SEQ ID NO: 916239 - DNA, 4001 bp, Homo sapiens
tttgcaaatgatcccccaaacactagagactcccccaaacttgcctactcagtcatctttctgccccactgcctagctgccgaagagcctccaaggaaatggggctacacccctcctcgcccacgcgttccacagcccacccatatctccccttcaggctagtaaaaggaaaatgtcgccaacttttttagcttcggtaaagtttttctggggtgtgagagttcgggatgggacagggagctctagggttcccctgccggagccctaaaccatcttcggtgtctccctgttttccagcgtccccctcgcacccccgctccccaactcccaggagtcggctccgcccccctactcccggtcccgccttccccgcccccgtgcctcctcggcccacccaagtcgccgccgcaggcactggctgcagacggctccgctccccccacccgccccgggagcccagtagagcgagccataggggtgggggctgaggggcgggccacattcttccctcctcctctcagcacatccggaaagcaggcagtggcgcccaggggggcactactggagagtgggggtccccgttggtggggttagaaagggagaagaatccagaaagtataggggagagaaagcagagaaagtgactgggtcaataaaattaggtgtgtatggggaggaggaggggcccggacaccttaggttgctggttatagcagccggcttcccaagggttaacccctccagacccccgggaaccccctggtgacgtcaagggcggggatgccagggagataatggtggagggggagaggtctctggaccccgccccctagggaaaaccacacttattccgacccttacatatcccccgggaaaccgcccgccttctccctctactggaacgtaaagacctatcctagaagaccccagctctccagacccctaaaaccctcagtccccaggctctacggggtcccctttccgtaatcctgtcccgaaagctagctgcccagtgctgattgtttcggggtcatgggacctgaaagaggattcagagcggggagcaagggcaggcagggtggtctgagccagaggaggggcctcgatccccagctcccgtttgggcggggtgccaacggggatacacaggctggcagtggccagtggtcccgcccagccccggtaggggtctccctgcggctggctcccgctgccccggtggtcctgaggtcagagggtcaagacaaggtctccccggctcctcctgagctccttgcccacagcccttgggactcaggagtccaaattgcatggggtcattctagggccttcactagaccttggacagcccccccccgccccagcccccttccaagtccagaagacactcctttcccctaaagcacaagcatccactggcacatctgtcacaagacaggtcaaaggttcaagcctggctggcccctagtggctctgttgcctcccacacacccgtccccaccccacctggagctccctcctttgcagtccccacctttcagaaacactgacatcttcctaccccacgcgcagacacacacctggggttacctctctacaacgcagacctccagctagccatccctccagcctcttaaacttaaccgcatgaaagtaagatatttctaatatatgggagaggcggagacaaagacccacggttccctgagacagagatacacagactgacagaagaaaaaaagggaagaaaaagaagatacagagaaagacacaagtgaaaaatctggagtttctaatgtctcaccccaggctctcccacccctattttgcctctatgtcccgggtctgggatgagtccctaagaagctgagcatcccctcaggccccctcccccactgctcccaggtggtcccccgcctgcccccccttctcacctctgtctgggcgctgggctcgggatgcgcggtccagggctggagtctgggctggggggtgtgcggtggggagggggggcggagagggccacggcagcgcagcctcgatgccacccccacccccccaacctggcccccagccctcccgccggcccagcccgccgggccgcaagcccggaccacccgcgagaagcgcaaactttttttttcccttttgcaaaaactttttctctctccagccgctggcgcgccgccgctcttcccgctcgcccctcacctcccttctatttccctccctcttgccgttctggaggatgaggcggggtagctggaagcaagagaaggggtgccgggcttattgcacccccaggacccccaggatcctccccctcccttgagggaccctatactgcttacgcccccccccccgccccggctgaacacgctgctgttggtgagtactaaatcccggcttggatttctggatcggctggccccaaagaggccccgacaaccagattgaggaaaatattgcggggcagggggagaagttcaaccgagaacgataatagtggaggtagggtagtcgcctttggttggtgctaactgagcattctgccatcctgtggtttatctgcaggcctcaccctttggatggaacttgcagcggccgggacagagttgcggtttggggcaaatcaagttgggttgggggctctggaagaaggtgaggagtctatggagcataaaagcaaggagcagcggctgaggctctgggtgcagggtgtggttcacgaggtcaccaaggagccctgggactgaagcccctttccctagaaccccggctctacgtctcgaagttctggagggtgccgcccctccgcaccacgtcactgcaggctctagctgctcttccaggctttctgctccctctgctggccgttctcacacatgacacccgctcggagtcgaagcagaagagctggggaactgaaggaggagcccagttgaaggaggagcccctcactaaagcccacttaaaagcccaggaggtggatatgtgagctctgagaaacggagaggcagaggttgctatgcccagcggtactgcctgacagggaagtgccctgcctctttagatttgcattgccatcgtgaccggatataagggaggggcagcatttcagtctctgatttttatgagaaagaggaggaagcatgacaaggaaaaagggcaccctctcccctttttttcaaccccacaggcagacctcccacatcctagctctgcttccaagaaccacccccttgggtgtggaaggtcagtgggttaactgttcagtctgagggtcaagggggaaaagaaaaggtgaaggtagggggagatctgggactttgacccaggctagttatccccagagggtcagagacccagctcagtcagaccagactaatgggcactgaaaaaaaggcaccccacacatgctcctgtcccagcctcgagccccttcttccagaggagctatttatgtatttatgtatttatttatttttatttgggacggggcctcactatttgcccaggctggagtgcagaggctattcacaagtgtgatcatagcctcgaactcctgggtttaagcggtcttccggccttagcctcctaagtagctgggaccaccggtgcccagcaagaagagctctcttagaacaccttactttcttctccccacccagttctatagaccagtgagtctcaaactttttggtttcctctatactcttaaaagtcattaggttaggcacagtggctcagacctgtaatcccagcactttgggaggccaaggcaggcggatcacctcaagtcaggagtccgagaccagcctggccaacatggtgaaaccccatctctactaaaaatacaaaaaatagctgggcatggtggcgcaggcctgtagtcccagctactcaggaggctgaggcaggagaatcgcttgaacctgggaggtggaggttgcagtgagccgagattgtgccactgcactccagcctgggcgacagagcga

SEQ ID NO: 916240 - DNA, 4001 bp, Homo sapiens
aggggaaggagggaagtttgcaaatgatcccccaaacactagagactcccccaaacttgcctactcagtcatctttctgccccactgcctagctgccgaagagcctccaaggaaatggggctacacccctcctcgcccacgcgttccacagcccacccatatctccccttcaggctagtaaaaggaaaatgtcgccaacttttttagcttcggtaaagtttttctggggtgtgagagttcgggatgggacagggagctctagggttcccctgccggagccctaaaccatcttcggtgtctccctgttttccagcgtccccctcgcacccccgctccccaactcccaggagtcggctccgcccccctactcccggtcccgccttccccgcccccgtgcctcctcggcccacccaagtcgccgccgcaggcactggctgcagacggctccgctccccccacccgccccgggagcccagtagagcgagccataggggtgggggctgaggggcgggccacattcttccctcctcctctcagcacatccggaaagcaggcagtggcgcccaggggggcactactggagagtgggggtccccgttggtggggttagaaagggagaagaatccagaaagtataggggagagaaagcagagaaagtgactgggtcaataaaattaggtgtgtatggggaggaggaggggcccggacaccttaggttgctggttatagcagccggcttcccaagggttaacccctccagacccccgggaaccccctggtgacgtcaagggcggggatgccagggagataatggtggagggggagaggtctctggaccccgccccctagggaaaaccacacttattccgacccttacatatcccccgggaaaccgcccgccttctccctctactggaacgtaaagacctatcctagaagaccccagctctccagacccctaaaaccctcagtccccaggctctacggggtcccctttccgtaatcctgtcccgaaagctagctgcccagtgctgattgtttcggggtcatgggacctgaaagaggattcagagcggggagcaagggcaggcagggtggtctgagccagaggaggggcctcgatccccagctcccgtttgggcggggtgccaacggggatacacaggctggcagtggccagtggtcccgcccagccccggtaggggtctccctgcggctggctcccgctgccccggtggtcctgaggtcagagggtcaagacaaggtctccccggctcctcctgagctccttgcccacagcccttgggactcaggagtccaaattgcatggggtcattctagggccttcactagaccttggacagcccccccccgccccagcccccttccaagtccagaagacactcctttcccctaaagcacaagcatccactggcacatctgtcacaagacaggtcaaaggttcaagcctggctggcccctagtggctctgttgcctcccacacacccgtccccaccccacctggagctccctcctttgcagtccccacctttcagaaacactgacatcttcctaccccacgcgcagacacacacctggggttacctctctacaacgcagacctccagctagccatccctccagcctcttaaacttaaccgcatgaaagtaagatatttctaatatatgggagaggcggagacaaagacccacggttccctgagacagagatacacagactgacagaagaaaaaaagggaagaaaaagaagatacagagaaagacacaagtgaaaaatctggagtttctaatgtctcaccccaggctctcccacccctattttgcctctatgtcccgggtctgggatgagtccctaagaagctgagcatcccctcaggccccctcccccactgctcccaggtggtcccccgcctgcccccccttctcacctctgtctgggcgctgggctcgggatgcgcggtccagggctggagtctgggctggggggtgtgcggtggggagggggggcggagagggccacggcagcgcagcctcgatgccacccccacccccccaacctggcccccagccctcccgccggcccagcccgccgggccgcaagcccggaccacccgcgagaagcgcaaactttttttttcccttttgcaaaaactttttctctctccagccgctggcgcgccgccgctcttcccgctcgcccctcacctcccttctatttccctccctcttgccgttctggaggatgaggcggggtagctggaagcaagagaaggggtgccgggcttattgcacccccaggacccccaggatcctccccctcccttgagggaccctatactgcttacgcccccccccccgccccggctgaacacgctgctgttggtgagtactaaatcccggcttggatttctggatcggctggccccaaagaggccccgacaaccagattgaggaaaatattgcggggcagggggagaagttcaaccgagaacgataatagtggaggtagggtagtcgcctttggttggtgctaactgagcattctgccatcctgtggtttatctgcaggcctcaccctttggatggaacttgcagcggccgggacagagttgcggtttggggcaaatcaagttgggttgggggctctggaagaaggtgaggagtctatggagcataaaagcaaggagcagcggctgaggctctgggtgcagggtgtggttcacgaggtcaccaaggagccctgggactgaagcccctttccctagaaccccggctctacgtctcgaagttctggagggtgccgcccctccgcaccacgtcactgcaggctctagctgctcttccaggctttctgctccctctgctggccgttctcacacatgacacccgctcggagtcgaagcagaagagctggggaactgaaggaggagcccagttgaaggaggagcccctcactaaagcccacttaaaagcccaggaggtggatatgtgagctctgagaaacggagaggcagaggttgctatgcccagcggtactgcctgacagggaagtgccctgcctctttagatttgcattgccatcgtgaccggatataagggaggggcagcatttcagtctctgatttttatgagaaagaggaggaagcatgacaaggaaaaagggcaccctctcccctttttttcaaccccacaggcagacctcccacatcctagctctgcttccaagaaccacccccttgggtgtggaaggtcagtgggttaactgttcagtctgagggtcaagggggaaaagaaaaggtgaaggtagggggagatctgggactttgacccaggctagttatccccagagggtcagagacccagctcagtcagaccagactaatgggcactgaaaaaaaggcaccccacacatgctcctgtcccagcctcgagccccttcttccagaggagctatttatgtatttatgtatttatttatttttatttgggacggggcctcactatttgcccaggctggagtgcagaggctattcacaagtgtgatcatagcctcgaactcctgggtttaagcggtcttccggccttagcctcctaagtagctgggaccaccggtgcccagcaagaagagctctcttagaacaccttactttcttctccccacccagttctatagaccagtgagtctcaaactttttggtttcctctatactcttaaaagtcattaggttaggcacagtggctcagacctgtaatcccagcactttgggaggccaaggcaggcggatcacctcaagtcaggagtccgagaccagcctggccaacatggtgaaaccccatctctactaaaaatacaaaaaatagctgggcatggtggcgcaggcctgtagtcccagctactcaggaggctgaggcaggagaatcgcttgaacctgggaggtggaggttgcagtgagccgagattgtgccactgcactccagc

SEQ ID NO: 916241 - DNA, 4001 bp, Homo sapiens
attaaaaaaaaaaaaaaaaactcaatgggtggctctgaatgtggctattgggactaataatatggattctgggggcagaataccctcagaatggttcatataagtttacacgttggcctctctgttggcctgggactgactttttctccctccttgtgtagcaccgtgcgtggtgcctagtgcatggcacacagtaggttttcagtcgatgtttgagagaatgagaggttgtggaagcatcagttcttattgatgtttctgtctgagagtcttgtttcttccaattttatagtcccaaaacaattggctcaaatttcatttaaaactcatgctacagctggaacctgaaaatcctttcactcataaggttctttgatttctcacaaatggaataaagtcctatgggagaatagctgttacaggaattgttcaaagcctgtccaagttggtgggcctcacatattacctattatgtgtttagttcacacaactaaacttttcaagcattattttctgttcttggaggctgttctatttaactcccttatatttacaggtatactagcatactatacattttcttaacttcatagtacaatttttctcctcatacttgaaaagacagtttcaagataatatagggcagatccttacctgagtgtagtggccacagacttttttgcatatccgagtcttgaagtcatagtcctggatttcgtcataccagtttgtgatggcggaagacacagaaaaaatgggcacagacccagtccagatgttctctcccagtgaagtgaagtttgggtgcagcttgtggggtggcttcagccgtgtattatgtgaaaactggcaattgctggcccatgcttttgcaatttgggctagtgctgggtcccaagtctgcaaaaataaacattaaacaatagggggttcatctgaaatgtaactggggtgagtacagtgggaatttgaatggaaaacgaggtgagataaggagagaagataccactgcatatgagtcctctataaatatggtcttcaagcactgagtagggctggtaggaaacgtgacaatttagtttcatggaatttagaatctaagtgaggaaaactgacatttcactgaaggctaattgtgggcaaaatagtgtgtgccgtgtttcacaacattattccataaccacaacagcccatatcctaagaagttcagaaaggttaaaaaccagcttaaagccacagatctgaaattcaatcccaagccttactgaatcaaaatcccatcctttccccagatgccattctgcctacctgagcaactcagtactttgtcagcagcaaaaaaagtaaatttagagacaaaaaaaaaaaaaaaaaaagaaaaccaaatcacaaaaattaacagggaggaagataacaaaaagagaagtaaaatccactgaaaaccagaaaacaggaagtgtccaaagagaagtaaaatgtgctgtggcacttgcttataacaacagttgggtagacagagctaaactggatgtgttttgatcacagactgtgaatttactgcatacattaatcacaatgaaaaaaaaatcattcagtattacgaaggtattaacaccaaagtcaatacacattagttgtttctgactgactgacgccacaattaatgatattttccttaccatgtatagcatatcactggctgttggtttcacctctgatcggaacttgttatggattcgaacgcagtctttgatgaaatcttcattttcgatatctggcaaaatatttgctgtgtgtgaataattggagacaaaagaaaccatccaggctattgtagcaagtgtgacacgcatgctttgtctggcatggagccttgggaggctgcagtccagagccgccgcagtttctgagagtgtgattgcctgagtgctcagcccacagctttgcaaacctagccgacttcagctttgagaaaacagaacagagcatgagttcatcactagttttaagaaacgggtttctccatatatggtgtgcagctcactttgtgttcttaaccctgtcttttcagtggttttcagtgacacagcacctattacgacatagatttttatgaggctgtgtcagacttccttttgaattgggagatatttccaaagaaaattctgaagtctccaggaataatagtctccaatttttaatggaggttgcggtgataaaatgaaaatatctcttacttctataaatgcctcgcaaaatgctttcagaaatctttttctttttagagtcatatcaacacatagtggttggaatatctggttaacatcataaacttgacctagaattcattcacgatggtagaaacatgtaagcgtgtatgtgtgtgtgtgtgtgtgtgtgtgagagagagagagggagagaaagagagagagagagaaagagagagagggattgagagggagaatagtagaaagaatacaggactcaagttgagaatttagtttctgtttctaactagctgtaagaccttggacaggatacaaaactctctaaacctcagccacctattgaatgagactatgggaccttttctgcttccttaattacagaggtttggcaggatcaaatgaactagctaatattaaattcctgccttgtatattcaccttagtaatacagaaataaaaacacagtcactggccccaaggagcttacagtggtaagagctgtgagatggtgatgacaaggatgttacaacaggggctgttggagatctggatataggaaagcacaggtagatatggacacacaagagagcatacttaacccattctggaaacggcagagccggcctacatacagcaggtgaggtctttgctgaggctagaatcagctaggtgttgatcaagtgaaaaagcgctggagaggagaagggaattagagggataggaactatatatctagttgtgaaattgaagacatggtgttatggcaagaatagagcaagaacctctccatattgtctccctctgtaaatatggtctgtaaataagtagtgattctgactggtagaaaacttgatacctggtgtcatggaattcagaatccaaatgatgctttcatgccacttgggggagagaagttaagagtcagatcaggaaggatttctcaattctgctaatgattttttattttatcaccaaagtcatgggaagttattggaggattttagctgtaggtggggtttagacctggttttagaaaacacgtgtattttagaaaattaagagagatggaaaatggaatgaggtggggaaatatttctaatgcaaacaaaaagtaaagaaacattccaggcacacctgtagccccacctactcagaaagttgaggtgggaggatagcttgatccccacaatttgaggctgtgaagagctatagtcaggtcactgcaatccagcctgggtgacagagcgaggccccatcattaaaaacaaacatacgggccaggcgcggtggctcacgcctgtaatcccagcactttgggaggctgaggagggcggatcatctgaggtcagttgtgcaaggccagcctgaccaacatggtgaaaccctgtctctactagaaataccaaaattagcctggcatggtggcacatgcctgtaatcccagctacttgcgaggctgaggcaggagaattgcttgaacctgggaggcggagttgcagtaaactgagattgtcattgcactctagcctaggcaacaagagtgaaactccatctcaaaaaagcccaaccaaccaaccaaacaaacaaaaaccattacagaaccataaggcagaattactattgccacacacacacaaataaccttaaaaatactcatacataaattcaaattttgtccaggctgcctaatttctactagcatgtctttacattataggaatctgagataagcagtgtcttatccaggtctcataggcaactttttgatcaatg

SEQ ID NO: 916242 - DNA, 4001 bp, Homo sapiens
tctctttctccctttacttttgccaatttttgtgtattaaaatatattattacatttatttgtattgaagattgctgtgtcttttgttgaattagcccttttattttcctaaatgtccccttttatttctggtagttctccttgtcttaaaatctacttcagtagccataaatatagctattctatcttaattttagagtttgcataatgtattttttccatctttttactttaatctatttgtgatatgtttctgttacaaaagcattaatccaatctgataatctttatttttaattaaagtatgtagtagtcatttgcatttaatgtaattttaacatggttaagttttagtctaccatttgctatttttaaatgattccctctttgttcttttgttccttgttcctgttttccaaaaattaatcaaggactttagtattctacttactggatttttagctctacttctttgtatatttttaatggttatcctagatattaaaatatgcattcttaacttctcacggtccatccagaaatattattgtgattcttaacaatataaggaactttcagcagaataattctattgacacttcacttcattttttatgcattggttataatgtgtttagtttctacattattataaactccacaattcattgttatcatattttgctttaaatagtcaatgagtacaaaagaaatataaagaacatttattatatttaaccccacatttactcttttttatcatacatttacaataaaactctaaaggcatcaaccatattaatactaatattagtatttctgaattccgttgaagatttatttctagttaatttatgccttggacaaccccaagctggtaaacattatatattaaaatatcttaacaattctgcattaaagagattagtttattcttgtttcatttctgatacatatttgaatctttctccatcaaaatataattttcttatacagtagactagtacagttttgaacttattttaatgcctgagttgtgattttataattacttttgttttccactggatagaaaagaagaaagctggaatagatatgagttatactgtatctacatctgcatagcacataaaatagactaatactatcaacgtttatgctcatagtgatgcatttataaacaagaaaaagttacaatgcaagggaaatttccaatcatacaattcatagtcaagtatttaaaattttgtaaattctatggattatttaataatccaatgctttttatgcttattcttcaatagagtactgtatttttttcaaataatactacacatgaagtgttgttttgatcttggattcatatgatataaaaataagtaagagaacaagagaatctccattcctgggctatttctttggtatcttgtatcttggttgtggggggtggaaattgctagctaaaaaatggaagaaagaaaacaaaataatcctgtgttcagtacttataactttagtggtgcaacaaagcaacttccaaacactgctccagcatccccaccttccccgcaagaggcaaggaacagcttcaagtcttcctttcttgttcactcctatgactctggaggagacagcccaaccaaggtgtgaatttttttctttttaactgcatatatgtaaagtccggattgaattagtacaagttaagtccgtgaaatttatcacccagatacctcaggatgagtcagggatttaagagcccagccctggttctttctcaccatgtatttcatgtcggccgcgggagggttgactttgccacgccattcgttgtgggcttctatgcagttgtctataaagtgtgggtcagtgatggatgggattttggaagatgtagtggctaccaaacacagacccaagatccataaacaactgaatttattcttcagagccatggaaggatgtggaggatgcggaggatgccctgactgcgcggaccagtaacggctggggcaacccgatttccccacgcccccgcaccacgctctcccttggctccatcctgccgcacaggctcgagcccagcgcggctggatcaacttgtcagtgtcgctgtggggaagaacaggcagcagggttccccttccacaaagctctgagctacaggggaaagctctgagtcgccctctggtggagggaatttcaaccatccaaactgctttctgtggatccaatctgtaatctgcagagcgcgtctggattgtaatacagattgcaatatgcaagccacacaagttaggtaaagaacaagtgcgggatgctgacaatgggccagtcgagtgcaaagcactatatattcgtttcttagacgcagcttccgtgtatagatttttattgttctaaataatctagaatcatattgccacttccctcagagattgggaatagagtaagaataggcaattcttatacagtgacatacagtgatcctaaattatcaacttgtcaaacatttaataatttccttctgttttttcgtctgaagagaccgaatgcttagatagataacaatagatgcttggaaaatgtagccaagtagttcctcttgacaaaatcttccctttttgatagtttggaacagagccactgtatggtgactggtagactccaagagttgctttaattgatacactgagactgggatggacagagtacatttgattgtctattttacctgcaatgcaatataaatcaacgtcatttggcttaatgttttaaattcattacatcagttatattgatattctgtaataaaccagcatttttccccatgacattaattttttttagtatttctatgtttcaaataaatacctttacttagtaatttgaagttgtttacaatgctgtttaattcaagtgaacacgtacttacatctgctgaatgatccgccatagtcaaccttgacacaaaaaacaaaaaccaaaacaaactactttgatgcagctactatctttttaaaaataaaaagcagaaaattagattataagaaaacgaaaaatgcaaggatcctaatggaaattctactgggcaatagataatatatttctagtctactaccagctaatggagaattgctgtatatactactttcatatcacatacatagtccaaactgagcttctgatatcccacacccaaagacatgaacatatatacgtgtgtgtgtgtgtgtatatgtgtgtgtgtaggtatacagatagataaatcaatacagttatatacatctacatgtgtctatatatatatgtctcttcctggatataaagatatctataggcatatacacacatacatatacacacatacatttatatatgtaaagttctctctatgtataaatctgtttgtatacacatatatgtgtgtgtgtctgcctatagacatatatacatctacacagagagagatacagatgtctataggcatatatacatatacatatgtttgtatacaaagagaaagagaacttttaaggaattggctcacattacagtggggggctacaataaaaaatctgaagtcctaggtatggcccaaaagacactacataatctgaccatggctagttctctggcattctctcctggcttattctgcatcagccacatccatcagcttgataaggatgctctctcctcagcatctttgcacttgctgttacttttgcctgcagtgctctttatagagttcccttcagtgaagtcttccctgatcattctatatcccctgtctgtcagtgcctatccatttaacctgttttatttttcttcattgcattaattacctcctgaatttatgttatttatttttttaacatctgccttctctatcagattgtagccttcaccacaacagtagctttgttttcttcattgctacatctctagcaccttgaacaggaactgaatctttaggctctcaataaaaattggtcgaa

SEQ ID NO: 916243 - DNA, 4001 bp, Homo sapiens
tttataaaaagtacatacattaaaatactaaaaataaccaataaaagagtttaaataagctgagtgatgtccaaatctgctaaagaaacattttaaataggccatactattatgatagactatactatttacagttaatatttatgtcctaataaaatacatgggaaaaatatacattaacttcaagaaagaagaaaaaggtaaaaatttagggtgggactttaacctatatatcaaatactattcctttaaaaatgtctatatttaaaaatatcgattgtgggtatacaggtatattattttatataccttatgtttgaaatactatataatttttagagatgagatagaaaacctatgaaaagttgtattagaaagtattatgtgtttattaattttcaggagtaaggataatcttcaaattgggaagaaacagaattagtcacaaaaaatgggaaattagttgaaactcccaaatatccccaaactctataattgaattcaaaagaaaaagaattggcttagaaaaaagtatcttcagcagatagaaccaaatgctagcatagttctataagacagcatataatctgacatggaaatgctgacaatataaaaggtaaaggaaatgacgaagaaagaactcaagtatgtcctatcaaaatagtattttaaaatcaacattaaaacaaatgaccatttttgtaatttattcatttagcaagtaattgaacatgtccaaatcagtgaggatgtggtgaaaacagaacagctggtatttgctaaatttggcactaccctttagcatagcaattgctatgtgttaaattaataaaaaatatcatacccttaatttatttatcccatttctgaaatttgtgctaagaactaatgctgaaggaagaaaagacatgtctaggaaagtagtccttgcaatataatttataagtttgaagcttctaattccctaagaggacagttatttatttgccggattttcagtcattttaatgacagtcaggaaaactcaatagcaaccagggaatagttgagttgttaaatgactatagggtgtaaaagagggggaaagcaagaaccgcattgtaaggtaaggcaaaatcagggtcaagactagggtgaggaaactgagacacttccttaggagccaaatttggaatgggcacaaaaaaaaaaaatcaagataacaaacatttttaaaaggcaaagctaatgtgacatcgatgatggaaaaagctaaaaataaaaatttcaaatacaaacagaatctcatcttgatttgcaccaccctgagagtgtcgcacttgtttttccctaatccagacccaaggaacctgtctttgttaaattttttaacattttctttacccttgatattgatatttttgcactgatttttaatttttaaaaacccgttgcattaaaatatcattttcttgaattggcgcccccttaaaatctgcacttcaggccagtgcctccatcaccttagtcctggccctgtgtaatatcatggtaataagcatgtgttagagtgtccgcagtttttctctgtgtaaacttcacgtgtactttaaaaaccaagctaaaagtgcggttctccgcgatccttcagcctcagagcagtggccccaactacccgagatccagggaggcgttgtggcaacggtagtggaagggtcggcaaaccgccttccggcctcaccatgaagcgcaagttagaccctcggggaatgacgtcgccccgcagctcattgtggaggttcacgtactcgttgataaagtctacgtcctcctcgtctggcaaaaatctggcgttcaaactagaacccagtagcagtagccacagctcacagagccgcagcttcaaaacgccccctactgccaggggtagggactgggccctccactcccgggcgaagggccttgcggcctccatggtccaccggccgctgacaggccagtgcgcacgcgctggccgtcccagtgacctgccaatctacggaggacgcaagcaagccttgtcccgcctcccggaaggagaaagggaggagggaggagggaaaaacaaaggagggaggagggggtaaggaggagggaggagagaagagggaggggagagtgggtaggggagggggagaggaggggaaagctagacctgcagagtgaagaaagctggtaatagatgtctgacaaactaaagaaagacttgtgttacgtgagtaagcccttttcactaaactaatgtagtgaaatgttatcccgaattgatttctgacactgaatgatatgtcgttattaatgagtcatcagtttgtatggtaaatgccaattgctgagtaacaggtctgaggaaccttctaattgtgccaggtgaaatgatttttctgcgatacagatacaaattcaattaaattttttttccccattacctgttgagttggaaatttggtgcagggcctgccttttattttcctcagggacagaatggaatacagaaatattgctagttcttaaggccaaagaagttcttaaggccaacttaattgatgagatttttttcagtttttaaatgaacctttgtgggaaaccacaaaataaatgggagtgaagggagagtagggatcaccaaactcttcaaaggttaaaacatttctacttcttctctcatcagcacaattcagacagcccggaatatcaagattcatctttttcactaattgtggcattcacagtaagaacgaactcttttgttttctttttttgttccagacaaaattggctaatatctagctgattttggtctgatctgtttacctccaaacattttcctcaaaaacaaaacaaaacaaaaccaacttgctttgaagactttaaattctaagcatggaaaaaaagcaagtattagttttggaatacacgtttgcatattacatattgtgcttaatagcattaagcagatatggaaaattgacattgggagagaattttactacaaaacattgtaacaggttagccaaacatttataaaaagaaaagtgcttttaaaaattgtctgtgatgcacacaattgaaaaacaatagacctatgtaagatggtttcatttatgcccttgaatacttactactatgactgcatagtagtaagttttaagtgattgagaaagatcagtagacaagacacagatccagctttcaagcagcttacaatttagtgaattagcaatcaggcagtatttaaaacgtgataaatacaaagccaaaattctattgcttggtactcttgtggaggagcagggaagcctttctggaaattgtatacagaaagtgaaacagacaagtctaagatagcattctaaacaaagggaaaagcatgtaatgtgcctaaggagaggaagatcctaaacgctagaagtattttagtatggctagaacctatttaagggtgaaggtggcaagtgctgaaagatgcaattcttttattatggtggtactgttgttagactgcaaaaaatgctaaagaaaaagtataaatagaataatgcaatcttagatttggaagaaattttagccactattgctagcctcctgtgttaggtatactctccggaacatcactgacaggtgatcatcacatccttttcttaaataattagaccaacagggaagcccattccactgctagacatctcattcaataaatatttccttggtacttcctgtgtgtcacagcccagctaaaggctcaaatgctgaacaagctagacatggagtctatccacagggagcttttaattaaaggtgacacagatgaatcatcaaacagttacaatacagagtggtgaatactatttttaatctatttcacaaatatttaatgtgtcaggcactatttaaaatgcttggacaatatcaactcactcaagtcacacaaatcttaagaaatagttattatccctttaacagatggaaaaacaactgagaaa

SEQ ID NO: 916244 - DNA, 4001 bp, Homo sapiens
cctggggggaagttggggtggagactagaacaggagggagagggcttatcctttaaatgttctgtgtctctttaagaagaagctgatgggaaagtactgtgtaatatggataagcagacaccatgactatgaaaaagagaaaagggccgggcgtggtggctcatgcctgtaatcgcagcactttgggaggctgaggcaggcggatcacctgaagtcaggagttcaagaccagcagggccaacacggtgaaaccctgtctctactaaaactacaaaaagtagcgggttgtggtggcgcgcacctgtaatcccagctactcgaggtaatcccagctattcgagaggctgaggcaggagaattacttgaacccaggaggtggagattgcagtgagtcgagatggtgccactgcactccagcctgtgtgacagagtgagactccgtctcaaaaaagaaagaaataaaagtactgcataatgtcattaataataaataatacctattggtgtcccttacgacagagactcgagtagtggtgaggtagtgttgtgtcagagactcgagtagtggtgaggtagtgttgtgtcagtctggctactttactgatggtgtccatgtttctgagtgtcatcagggagatggcagcgacgagggagatggcccatttcctgttcctgctacagtagagcaggggctctttggacagtgtctatgctggccctctggggaggacaagatttcctgctcagcaccgtctgggtctcagagaaaaaggctcagccaccaagtgtgtcctaggcggtggggaagataaaggtttggcatcctgggtggaagaaacacccaaaggaagagaacgttttagattctggagcctgggcagcacaaataaaggctctgactggctctggtttgggaaatctgcgtcttaaagacctttcctccattacaaatattctccccattcaacaaccagtttggaaattcccccccattctgctgttcagggagcactgctacgcacacacccaacacttatggacgtacctgcgcaccaataatacacgcgcatcacacattacctgccgagaacacgcagaaacacaacacacagaccccagtacacctggaccggaggcaggaggctgttccacatccacgcatctcctaaaatacacacgaggactagggaaggtgaggactggcggcgtgagcccggccctgcactcagacacgtgagccaagcaacactcggcgcgcatctgtgatccgggttaagtgcgcaccttggacaggcgccatccccaggacccgcttgcccgaacgcactcctaggcagacggcagattaccgcccgagcgcggcgcacccaaagccccacatccaaaggaaaaggcaccgagggctagtgagcgaggagaggggagatgagcggcgctgccttggaagggcactcgggaactagcgagaaccacagtgggagtgggggcaagcccgtcccctgccctgtcccaggagccttactgatcctggtgctgcggctggtggctgtgtggcgtctctctgccctgcgccgcggcctcactgaggtggtgccggacgcccccgccaaggagggggctccggctcgggtgaccccagcctcctcgcccgcagtgactgccagcccggctcagggccttctgcagagccttcatggagcgcatgccccagcaagcctccggctctgcaggtgcgcccgggacctctagctgtggctgggaaggaggggcggagcgagcgagacaaggtgcgggggagttctgtgagggagcgctggacctggaagacggagaatgtgggcccggtgggtggggctggggctggggcaggagaaggggcctgcccctttaaagctggctccagggttaggggcaccctcaggacaggggctaggtgaggagcgttggggatgaaggagaacccgggtggctttctagtgggtggagagagggcggtgcctgggagctggaatggacaatgcccaggtccaatcactgaggaagcaaaaacattgaggcggggaaagggtaaggttgcccaatgagagcaagacggtgggaccttgcgacagtctgcggatgcttccgcgtgggcccggcgagcgcgggtatccgcggatgctgagggcgggaaaggcgaggacaagctgaggcgaagccggtgggggcgggaggcgctccccgggaacaccgtggggctgcgaatgatggagttgtcgtgtagagaggagggtgctgcctcgagagaggaggctaagtaagagtgagcccagttcaggaggtcactcagagagcctcgacctccgaaggccaaaccagcgcccagtaacccggcgggtagcgtggcgcgcggccgacgtgcggtggtgctgagtggagagtaggatgactgctgggtaccccgggcagaagcagccgaccagcacctcagggaggcattgggcggcgggaaggtcgctctggcggttaggaagcctgggttccagtttgtgtccctctaccatttatttggtgtaggacttgttttcaaatctggaaagttaagacattaaaataagttggcacgcagaaaaacgttttataaaccatgaagtgctccccacatttttcctattttaattgtttgcccttgtcctcctcacgggcagaaaagaggcgatatacaaaaagcattttgaaatccaagaacattcaggacttttgccatttgcagctagaactttcaccttgtatctcggcagcgcctaacccagcatccatatttagtagggactcattatgtaaatgatagctattattgagtgcccatggtgttccaaccgcttagtttctctctccctcttaccagagacctacaaagtagttattagtctcaatttgaaggtgaggaaactaagactaggaaattaagaattctcgcataaggtaacccagctagtaagtaccagaaccagaaattagacccgttttttttttttaactacaagtctctccttcatgcagcccttctcaaaaattaagcattgaattgaattatcccgggagaaatgaccccatccctaaaggaggtattttatgtggaagtattatgatacagtactgggagtcttttccttgtgatagttctggctgtatcacaaaatactagtttttgtttgtttgtttttgagacgaagttttgctcttgttgccctagctggagtgcaatggcgcaatctcgactcactgcaacctccgcctcctgggttcatgcgattctcctgcctcagcctccctagtagctgggattacaggcgcctgctacctcgcccagctaattttttgtatttagtaaagatgtggtttcgccatatcggtcaggctggtctcaaactcctgacctcagatgatccgcccgcctcagcctcccacaagtgctgggattacaggcatgagccaccgtgcttgtcccatagttttcatttttggattaaaatgagtttcaagggtactcgtgggaaaacaagtactgaaaccagtcaggtgtgttctgtggaaaggcagttctcctttgccttggttagggttggagggcttatttggcttaaaaccagatggagtgacatttgtttttgcttgttttcgccttctgtagtcattctgtgtctgctgtatctgttctcctgtccgtggaaagccgtctaattctgggagggcttgctgctttatgcttggctttgcccaagaggcagagttctgggtctcaatacttaacgtaaactcaatcctgcattagtttttttcatacgtaacagacgaatcttatccttgtttcatagaaatatgatttatctgaaacgttttgatctattcaagagaaaaataccatctgttagggaatttctaaacattacccagaagtaatttgcttcctttttttcctatttctgcctctttgaattagctttatactctaatgagtt

SEQ ID NO: 916245 - DNA, 4001 bp, Homo sapiens
tggagttcagtggtgcaatgtcacttcgctgcagcctcaacctcctgggctcaactgatcctcctgcctcagcctcctgagtagctaggaccacaggcatgcacacaccacatcagctaatttttaaatttttttttgtagagatgagggtttcaccatgttgcccatgctggtctttaactcctgggctcaagcaatcctcccatctcagcctcccaaagtgctgggattacaggcttgagccgccatgaaagcctgccctaggttttttgttttttttgttgttgttgttgttttttttttttttttttttagatggagtctggctctgtcacccaggctagagtgcagtggcgtgatcccagatcaattggctcactgcaacagctgcctcccaggttcaagcgattctcctgcctcagcctcctagttttgctttcttaatagcactaatccctatgtgaaatcacctccttcattcctctcccatactgggatgctggttcatccaacagagccaggaacacaaagggctcctcactgctaaacccaagcagagcatcactgacctatttaatagaaacctgcaccatgaaacctgagtgtaaattttccagcaaatttcagaaaactgatggatcctctcttggtcatttctgcttatgatctttaggagaaattagctgaaagggacatgaaagtgttggtggagtctcaattgctcattttaatgatgaggaggccgggcacagtggctcatacctgtaaacccagcactgtgggaggccgaggcaggcggatcacctgagggcaggagttcgagaccaacctggccaacatggtgaaaccctgtctctattaaaaatacaaaaatcagccgggcgtggtggtgcacacctgtaatcccaactacttgggaggctgaggcaggagaatgcttgaatccaggaggcggaggttgcagtgagcccagattgcgccactgcactccagcctgggtgacacagcgagactccatttcaaaaaaataaattgatggggaaacaggcccacagaagggaagtaaatcgggaaatttcatgaagcaagtccgcttttacacacacacacacacacacacacacacacacacacacacacacggcttctgttaagctgcaggctctaatcctggcacttcccaggcttcgcctcaaggaatatgtttatccggctaatacaggccgagcgcccgctgtgcgggtgggaggcggcgggattaacgcggcggcccctccccgggcccccgccgggcttgcgttccagcgaccagaacacagaccaacaagtaaacaaataagacaaaggcagaaaaagatgagtgtgaaggagctaaccagccaggaagacgagaatagacagggcagaggggaggtgggaaagggacttcggggacaggaccccggacgccggcacacagccgagacccgatccgcgagggcagggctggcaccgcggtccccggcctggaaacgcgcccccgccgggagctccgcggaccccgctgcgcatccctgcggatcctgctcccatcctgcttctgcagcgaggccttcccgggcccctccacgacaggctccgggcctgttcacctgctcagtcccctccggagagcgcgaggccaatgcgccggccgcacggagacccggggacacgcgcgccacgcagaaggcaccgacccccgcgcgcccggcaggcggcaccggcccatccgtttgtgcgcgcggctcgggacggccccggcgcggctggagggggcctggctgagcgccccgcgtccccgggtcccgcgtccccgccccccggcccccggcccaggcttcgtaggccccggcgccctgcacctaccgaacgcgctgggccgtgaccgcgttgccggtgtgtggccgcagcaccgccaggaacaggagccgcatgccgccgccgccgcccgggccatcgaccggccccgccgccgccgaccaggccccggggccggcgcagacgcggacggcgggggagccggggcggctgggtctgtcccgcccgcccctccccgaggccgcgccccagctcgcaggttccggcgccaggcggggagggggacaggaaccgggggcctcgggcggcgcgagccctgggtgcggggtggcgcgggtgtgccccgtggggtccatcaccagggtagccgcggtctgtttccacctggaccaggaccagcggtgaccacagtcccttccacggggaccaggaccatcggtgaccacagtccctcacacggggaccaggaccagcggtgaccacagtccctcccaagaggactaggaccagcagtgaccacgttcccttccacagggaacaggcagcggtgaccacagaccattctcacggggaccaggaccagcggtgaccacagtccctcccaaggggaccaggaccagcggtgaccacagtcccttcccacagtgaccaggaccaggggcggccttggtcctttcccacagggaacaggagcaggggtggccatggtccgctcccatggaaaccagtgatggcttccatgggcttcattgggaaatcagggcttcacggaacaccgggttggctgcaggtctgtgcccaccgggaccagcagagacctcgggttccgtcccacagggtgctgcagagaggggctctcagcctcattttccatgacaacctgagtggggccttggtccgcacgaagcccaggattcctttctagtcccattccagggaacgtggcatgatcagtcccaaattccttcccaggctagactaccctaaaactaacccgaggaggggaacatggggactgtgtgaggagacagtagaaacccatttcagggccgcacctgtcgggtgagaaagatgttggagaggggaacctggggttcatcagggtacatgggctgcacctggtctggatctccaaactaggataccttgagtgagagaaatagggaactgaaggaggcctctggcaaaatgccatctgtggatttaaacaagcactccccaaaacagctgttaagtgtttacaaagatgcacatgtatttacagatgtgggacattctagtgggtgcccaatatttccattgaccttcaaacttgattttctgtcatcccctaaataccttccagcctcaaaaaggtaaagtgggaatgaagaaagccatgacatgggataaccaccgtcagtggcaggtctccggcctccctacgcagcatggtgacccccaggcttatcaagatataaaagtccatcctggagggcacattcggctccgcaggcttctcccaggtacgtccaccactctgcctctcagtgtggcatggagtagggaagagttgtatatcattgtagaacaatcaaaatcctgtcctcctctcactctcaaaaaaacacccaggattttgctcttcttcctggtatttcagcttcccaggcaccaggcaggcaggccacatcctttttaaaggacaaaagcgatctgaaaatattatcattctgctaaacaacttaatactttccaacagaattacataagcaaacaggaaaggggacaagttgcacagagctgtcacaacccccttctaacgacattttagaaaaagagttttgaccccgggcacggcggctgactcctataattccagcactttgggaggccgaggtgggtggatcacttgaggccaggagttcaagaccagtctggccaacatggcaaaaccccgtctctaccaaaaatagaaaaatagatgggcatggtggtacaagcctgtagtcctaggtacttgggaggctgaggcatgagaatcatttgaacccaggaggcggaggttgcagtgagccgcgatcatgccactgcgctccagcctaggcagtaaagcaagactcagtgttaaataaataaataagttttgagtggactcctgatatatttgctacacaccaaga

SEQ ID NO: 916246 - DNA, 4001 bp, Homo sapiens
aaaacaaggcatccccttggatgagctccagggaaggtggagaataggatgtccaaaagaggaaccaaaatgaaaacaagtgtgtccagaatagcacaccgcagagtgtgctcctagaaatgttaacctacattatgtgataaggtggttcagcgatcaactgtttgggaatcattgcgttaaacaaccttaagaggatttctctactacaggacttctcaggacctttaaaatgctattatgccttgcgatctctaagagggtaatatagttcacagagtttcccatgggactatgttttctcagaactttctttggaaaatgctgaaattaaaaaggatttagaatcattttcctcgggaactagaaatgaaaactatgagggctgtgccttaatgaacctcacattttctcagcaaggaaagaggaagcacaaagaagaaataatgaaagacagaatgggaaataaaagaaagagaggtgtctgaaggaagaaaggaagaaagcaaagtgctggagagatgacatattagggtatgaggaacacttggaccactggactgtcagagggaaccatggtcaaaagcagaggtgttgccaaaaacaggatgcatgatcacttttgtcaccactgccatcatcagcaccatcagagaagctaacctttcctgaggcctaactactttgcaggtcctgtattatgtcctctatagacattaggtcatgtaatttccattttacagatgaggaactagggtgcatgcagttaaacaattcacccggagtcgagcttagaaggtgtgtaagtggcagcatgtagattcagtcctgtaagcctgaccccagagcctatgttcttaccactgcattgcacagtctacttccaagtgcattaaagggagaactggaattccattatgtaatatagaaaggatattacacagaagtgccacaccagaacatttggaggaaaaggaaaagacaaaaaccaaccaatatcactttggatatttggctgcacaggggccaaacaacgagaggactgattttttttttcaaagcacatccagacattcagatatcatcatgttttctttctctcactctctctcaggtttttttttttttactctcatgttaactatccttcttatttcataaattatataccaggcttgtccaatgtgtgacacttgcttataaagtaaacataagatcttttttaatgtttaaaaagcattttcaacccaaacaccacgactactgtatttacaataagcctcacttgggtttccacaacggccagttctttctggggggatggagatcctcagaacagcttcctaaggcagattctgaaaacatgaatcatgctcagttaaataatttgtggctcaggacataccttcattaaataatagcattcatccacatcctaactgctgatttttatgtttaaaatctgatacaaatagtaaattatcatatttgtggagagaaggaggagaaacccaggtctggaaaagcagcccaggatgtgaaaaacattgcacactggatttgctggaaatggccgaaaagggttccgctggaatgctaccagttcggactgggaagtttctgaaggcaaagtttgtgtggggcaatctgacacctctgatttactttcttgggtctgtagcagaataaagaactgctgcagaccggccaggataaaacggaacgactgcacactgctcgtaaatttctctatttacctggtgaatggtgagggtagggctttgggctcctcggtccagaagagctgcaaggcagagcgttcaaatcgtggctggccctgggctgccgccctcacgctgcttcggctgcttctaagatcccattggaagtcccaaagggctggagagccccaaggccaatattacgtttccaaaagaatattcctccccgacccgcactcccctttgcttgcgttgacttcggaacgtctcgggtttcttccacctctgcgcgaagccgctgggaacccaggagttgcgctggcagagaggggcggccccagaaaccacttccagatgtgctcggctggccggctcggatgcgccagacttcctctggctaagtgcaaaacatgcaaaaaacaacgctgttctggaggaaaagacacaaaaccagagaagagcaaatgctttcagggtgaatttctaccacacgttgagtcgaaggcaaactttgaaagaacaccagtgaaaaataaagttcatgctgattttgagaatcttcatggccactagcttctcctgaaatctcctagtcattgaaatgctgttgtccccaaatcaaaacccaggtaacaactgtggtcttcttctaccaaggcaataatgacaaaagtttcaggatggagtgtttttgtgcctgaacaaaagaggaatcagagaggaatgaggcagggagctgggagctgacctcaacagcaatctgcgctgttctgtatctctgcggtgtgttctcaaacccgggagatggtgccagcactttgtctgggatcacagaatttatttctgcaatggctcctcttcctatttcctataaggatataaggatctccctgctcactgtctctttctaaagtggtgctctccaacagaaataaaatgcaagccaccctgtaattttacttttttttttttttgagacggagtctccctctgtctcccaggctagagtgcagtgatgagatctcggctcactgcaacctccgcctccccggttcaaatgattctcctgcctcagcctcccgagtagctgggattacaggcgcccaccactacacccagctaatttttgtatttttagtagagatggggtttcgccatgttggccaggctggtctcaaacacctgacctcaggtgatccgccgcctcagcctcccaaagtgctgggattacaggcgtgagccacctcatccggccaattttacttttttttttttttaaagagacagggtcttgctctgttactcaggctggagtgcagtggcgtgatcacagctcactgcagccgtgaacttcaaggttcaggcgatcctcccgtctcagcctcctgagtagctgagattacaggtgcacatcactacacctggctataatttaaaattttctagtagccacattaagaaaaaagtacaaagaggtaaaatttatcttaatgatatattttactttacccaatatatacaagatgttatcatttcaacacataatataaaacattattaagaagatgttttatgttctttgttttgtctttaaatttaatttgttttgatacatattcatgtaataattgtacatattcatggggtacatattgatgtttcaatatacaatgtatagtgatcagaacactgtaattagcatatctataatctcaaatattgatgcttatgttggaaacattcaatatcctccttctagctctttgaagctatatattattgttaactatggccatactacactagaacctattcctcctatctagctataattttatatcctttaacaaatctctccctatctctcccttcctcctgcccttcccagtgttttttttttaactaagtctttgaaatttggtgtgtgttgtacacttggagcacatctcaattcaaacactaaatttaagcagaaacacttcacatatatttagattttataaataccatttaaaaagtagattcatttaaggtaatggatatcccagttacactgatttgatctttacaaattatatgaatgtattaatattaaatgtttgaatacacactcaaaatatgtatatctattatgttatcaataaaaaaatagaaaaaaacactgggaacaaaagtaaattcacgagtccaggttggtccaaatgtacttaaaagttttccagtaattgaatagagtatcagtttttcaattaaaattagttacagttaaataaaattaaa

SEQ ID NO: 916247 - DNA, 4001 bp, Homo sapiens
ggcaaaactgccctcagttgagaaccactggcttaaatggattctgaatccctgtccagggcaagctggctctgacttggaactattcctgcaaccaaagaggaaacaagcaagcaaaaaaaaaacaacaacaaccaacaacatcacaaaattaaacaacttttcaatgctagagctggttcgctcccaagcccccacctggagagtcagtattatctcaagactgtgacactgataataagaaagttttgtgcattcagcagtattgactgagcatctgctatgtgccaggcactgttctgggcactgaggacacagagtggatgtaaaaaaccaagcccttgctctcaggttgcttacccaggtctgggaatcatacacaccagacaattgcactccctcaaacaccgattaatcactctagcaaggaaccaaaactggattcaggaacttaaaaccacaccccctacagcgaagacctatttggcacttacggcctcggtactttacacacaccacctcatcgactcctcacagctgccctaggagatcagcatccccgtttcacagctggggacactgaggctcacgaggtgaaggaggggaactatagcctccaggtaaccacaaccatcccagagctcaggacactgtgggaactaccacccctaacaagccttctttgcccactaagtcggactgtcttaagatctcctgtctttgggtttcaggtggactctgccctgggggctggtattttcctgcaaggccaccaagtgaaccagcaggacaggacagagcccacatggagaaggagaatagaggctcaggttgcaccctttacccgggacccaaaaggcaaagggcaggggcagtggtgctggcttctagttcccattttccatctggggccttggctggactgggctaggctgagggagtgcgggaagagggtctgaaagtggaccgccttcccaatgcgcccaggaacttccacacgacatacaggggaggggcttcctctcgtagagcccaaactgagggaggaattggtgccaagctctgtatgtctgatgtcacctcacaaaacagctcccccgacaaccctcacccctgtcctaaaaggaggaaaaactttaggtggtttcccctagaaagaggccctggaattttgcaactccatcttcaaaaccctctccttgtccccgcctcaccaggcttcctacccttggagggggagatgggagtctttgatctggaatgggcgaattctgagggaagaaggaagggtttgtaggtcccatgagggagaggctggaagcgttcaaagagaaggcttatgaaatggggggattcattgtaaggggagcgagttgagagccatcagaaagcgccagggatgaaggactttggggaagaaggggcaggaggctttgggggagatggtggattacagaatgcctaagggagatggaagatcatccgtgttgggggcacggatgatcagggggcatttgggggatatgtaggactgtgaggtgtctagggagagggaggatttggggaggacaggcaggatgtgacatgtttagagcggagaggacttgggagtggtccgggaaagggagaatttagggtgagtggagggaaagaggatcttgggtgcctggggaaacagtacttaggggtgtctagggcagagatggttaggggatgctcgggggaaggaggattcgggtgcgcgtggggctgcgggccgcctcccccctccattccggctcaccgaagaagggcggcaggtgggacaccgcctcgaggaagggcccggtctcgatctgcttgtccgcgggcagcggcttcagcaagtgttcggccagcagcgccatttcggggtcgaggcccgcggtgatgccccagccggcgccgcgggcgtcgacaccgcccccccggccgccgccgtcagcgccggggccgtcacagccgcccgccgcaggctccggggacgccagcgtcgccacttccgcccgcacggcgccctcgtagccgagcgctcagcgccgcccgccggccgagcgcctaaactgccgggcgcgccgccccgcccccgctcaccggctcccaatccgcgcccgccgccgaggtctccgcgcccccattggccggggggccggccgggggcgggacgcagaggaggtgcgccggttcatgggtcccggagggcccaagtgagccgctcccaggtgagtcttccccaggtgtgcctcccgccgcccccggtttggccccccaatccgggcgggccgactcgggccaggtcacagctcacaacccgcccaccagctcgggttacagccccacccagccaacgctccccaggacccccgtttcccccaaaattgtaccccagtaaccccaagtgacctgggtggacactgctctcctgttggtcacggttctctttcgctacaaccgacgaggacgctcgattgcttgattcttggtcttcaatgaccttatacctgttgaacactgctgaagtcacagtctaactcagccactgccctgctggacaactcctgcttcccgaaatctggggtccagtctgccctcaacagtctgatgttacctgttgtgaggcagaaaaatagggcctggaggcagggaacataaggctgacttcctagacctaaatcaaaaagcaccttagcaatgacaggaatgtaaacggctttgcaacttcacttcatcctctccattcacgccctttacactttgtaacttcacattcatcctctccatttacacagaccacacactccaagaaacatcctctccatttatactttgtaacttcacattcatcctctcccaccaagtaacatcctctccatttgcacatcctctccatttgcaatagggcacattctgagtaaatgactctgtgacttcacttcattctcttcatttacatagaatattcaccaagtaaccaatgggaaacctctagagtattgagaccctagaaaattctgtaagcagagctcttgagcctctacgctcaagcctgctcccaaactgtggggtggacttttcgttctcagtaaatccttgcttttgctttccttgcttcgtttgtgtgttttctccaagatgccaagtacctggacaccttctactggtaacagctggagccagcccagtttataccaattcacccacaacctggacacttgtttcccaaacctaatgtctctccaacagcccagggtccagcttctcacaccttgaatcacaagtcatctcagccacaacccacctagatgcttatgtcctaaacccaatgcccagcttatgcaaaaatctaacacaccattgttgagagcctcttattcattccagaataaacatttgccatccttcccacccctcccccaccctccaccactatgtgtcatgcactgcactgggcactgaggataaagtgaatgatacagcaaaatccctgcccttgtggagctgacaatctggttgggaacacaacacaatgcaatacacaaattggtaagacaacttcagacactgatgagtatgtgaagaaaataaaacagtgtagtgacggaggatgactgaagcctgttggctgagatcggatgtaggggtttgggagcagtacctctgaagaggtgatatttgagctgagacctagaggagaagtaggatagagccaggtcaaagacttggggtgtgagtctggccaacatggtgaaaccccatctctactaacaaatacaaaagttagctgggtgtggtggcaggagcctgtaatcccagctactcaggaggctgaggcagggagaattgcttgaaccagggaggtggaggttgcagtgagccaagaccgtgccattgcactccagccagagcgagcgagactccgtctaaaaaaaaaaaaaaaaaaagacttggggtgtgaggcacatgagcaaaagccttaaggtaac

SEQ ID NO: 916248 - DNA, 4001 bp, Homo sapiens
agccttagagaaataagtctctgccctggagtgtcttagactgatgtgggaaagagatgcatgcatggccagaggtgtgttgcttgtaagtgtttaacaagcacctctccagtgttggtgaggaaggtgggaaggtgatttccacgatacgaatacttgcactttgaccagtttccagctgccaatgtgaggtcattggaaacagatttgggaagagatgcacagagctggctctcccaagccgagaggagcctgcttgcacccaccgctgcagcacggctagctttttaactgggtgcctggggcatcaccatgaccctgaactgtacctcctgaaatctgtggtactatgccccttgagctctaaccacattttagacttaggctgggggtccagagtgaacagacttgatttgccatcacttgcattgctatctttttttaaaaagttaaaagcaattttttttatattaagaagagatctcactatgttgcccaggctggtctcaaactcctgagctcaagtgatcctttcacgtcagtctcccaaagggctgggattacaggcgtgaaccactgcgcccggcctgctttgttatcttgggcaagttgcttcacctccctgagtctgtttactcaaggtgtaaaatgaggcttatcatagcacctaccttacagagatatcatgaaaattcaatgaaatcaggtatttatgcagcttagcccagtatctggctcataaaaagtgttcactattaacatatttaatccaatctaagatgcatcactaagaaagaaaagatgctgtcaattctaattgaaacaatgatccattgctgaatgcaccttgatttcagagatgtcaaaatgtgaagaaatgtgcatcttagaattgacaaaatacagcatagaaaactagcagctagagtctacaagggctttataatttacaaagtactatcgcttcttcatcttcaaggccctgggagggggctgtggtcactcttgttctacggatgagaataggaaccgtgtccgcatctttcgcatccaatatggtgcctggctcagagcaggtcccgctaaaatgttggtcgaatgaattaattaatgggtttcctcactccaaggacgtgctgtactaatgctcggagcaacgcgctattgcgggtcggggagctcccttcccctccccccatgccctgccttccgggggacagggggtcttacctctgccagagtaacgtcagcacaggctttcctggcatcctgcagggaaagcagacatcaggggagcaagggcgaggtgggggtggcaggtgcatgggccttcagggcaggttggtcttggggctctggggcttgggggtctcaaatatgcgaaccaagtttagaaagtccctggtcacttctagtcactcaagagcaaacccagccccctccccctgggccacgctcctcatgtccccagctgttttctggggccccaggggtagggctctggagttactgcaatctgcttcttgagctgctccgcttcctgacgcagttgctccatctcccccatggctgacaggtcgaggggtcactctggctcctgccaggaacatggggtcggtgttgaggaaccccccaccaggctgtgcttctgcccttcgtgcccacaccagactccaagacacagggaaacgactgggtggctgcaccctctccccagctaggccctccaagtttgaggtcctttgcgtccagccccagcctgcctgagccctgcctgcgccccagcccaggagagcagagcccaggccagctccctcttacttgggctctggctggacctcggccgggtttccagctccggttcctgggagcctccttactccctcagctgcgacgcccgcgcccgcccgtcacctgcccaggctctgctgccagaggagctggcctggcctggcctggccccgaccggcggggggttgggggggcctgacagggaagggtagagccaaccacaacgtcaggcaaatgaaatcagctggcaggggtggggggaaggggtggggggagggagggaggtgtacggattccagagagacttgggcccagccgggaggagggttgggggcaggagtgtggggccatagagaggggcagcccccaccacaagccctgagagaggagggggtgaaggggtgcttccctggtcagtctctgcaggcagagataagagcatcaggccccacaggattagagcaaagctgtgaggattaagggttggggtttgggaggggtgcaaaggagcagacaactacagctccagtggcccccctggtcccggcccccatccatggtgatgatcttggcagtcagggccacttagcaaccaggccaggaggtgggatataagggtgatagatggccccattgtcagtacctcaaactgtgctcctcagctcagggtggtggggaagagggtttggtgagtatgggagggtacaggcaggagctgagattagaaaggactgatctggataatccttcttctcgacaaaccccaaccagctgcctctgggtctgatcctgttgggggagaaaggtacaggggacccacagagaaggatggacaggtctgcccctattgtgggcgggcaacggatttcaagtggagggaaggcccgcacgctgctcccaggctggggtctggccccctccttgccctctcgaggctgtgaaagcaggggtcagagagaaagcaggcggccctaagtctcagcaaagctcagagagggaagacagggcttacacttggaggcctaaggagcagctgccaggggcttgggtcatttgcatgaggggagcaggtggctgagatttccctgacaaatcacaggctccaggcgccccgcctctgggaggcccaaagacacctgtctcctcccaggccagccagagccacccccacctccagccatcacagaatctgtgatacacttgactggcccctggctgagagatcttcacgacctttattgcacagactgggagagaggagcagggttatacctcccaaccccaccatcctcttcatttaaagcatcagcctcctcccctgccatttctgttcagggaggcacagtgttccccatctgtccagggctgcaggtccggcagcggggccccgtcccagctccccaggcctggtgagctccaggctagcctgtgcactgtcctctgagtccaggcccttgtaggtccccaagatggtgggggtgcagggacagagagcttgctgttctgctcctgatgtcacacaggggcttcctgtgtgtcctggcatcaagatggccttccacaagtcaagtggccacatcctcaaggagctggctcagccactcacagctcctcccgaacccgaggtgcccttccagtcttgtcttggaccctctggtgcctgcggctagggggctctggggaagggtctttgctgggcatttcttcctcttcctcttcctcctcctcctgtgactcctgcagcagttctttggcttctatccactcctggggttggggaggagagtgtggcccattccctgcacccaccttccctgggtcagctcagcccctgaccctcaccgactgtgagccttctcgggggctccttgcccacccttcacgcaccaggagaaccacatcccttcctaccccgctccttacctgctccctgtgctcaggtgcccacgtgtgccacagtgccagggcacagcgccgtccccgagtcacggcccacaccccatggggattctcgacaccggagctgaaggccacaaggcgcccacagcgaggacgcacccgagcctggagggatgagggcaggttcagctccagggattggctctctcagagaacttggccctcactccctagagcaggatggggacaggggcacagagaggatcagctctctcgctaccacttcctactccttaattcagggactagct

SEQ ID NO: 916249 - DNA, 4001 bp, Homo sapiens
atatgtaaagcaattaagagagtgcctgatacctgttaagaccaatataagtattagctattattatgatcattatcaactggagtcagcaatcaaggccaaatctgcctaatcatgcagctcctcttttccattatgccttacaagttaaccacaggccagctgccttcacctctcatgacacctgttggcactgtctgcctctcatttctcttgtctgttccaaaccttatgatctgtggccatttcaggactgcaacaaaatgtctctcttttggtaaacagccaagcatggaatgaaagcaaaaagaaaaggatataaaatgaaaaattcgggccaggtgcggtggcttacacctgtaatcccaacactttgggaggccaaggcaggcagatcacttgaggtcagaagtttgagaccagcctggccaacatagtgaaactccatctctactaaaaatacaaaaattagctgtgcatggtggtacgcgcctgtagtcccagctactcaggaggctgaggtaggagaatttcttgaacctgagaggtagaggttgcaatgagccgagatggagccactgcattccagcctgggcaacagagcaagactctgtctcaaaaaaataaaataaaatgaagaattctaacacctgatgcctttaagtcatcttcacactgcatgggacttaataaacagttaactcaaaattaatcaaggccaaaaaaatcacacaaaagcaataaggcacctaactacacacagatacattaagttgcaacacatgaaacaaagacgagcaagtactataatattaagtacatatttcacacttacaaatctggagctttctcacccttatggtaagacattttttcccagcctctagaaccaagaactactaaaaaagtacatgctcagaattcatgccatataatttagccattaaacaaacacttgcactgcattctctggcagtacctggcactgtgcttgggccagggttacagtatttacagacagcaccttctcttacggagcttacaatccagcatgggtaaagacttcaagcaaatgtatactgtggcatttctaaaaactactctgttaaattttaaaaccttttgtaacctcctaccaaaaaaaaaaaaaaaaaagaaaaagaaaaaaactaaaactaaggaacagatttcaaaccacttaaaaatacagctttcctccccgttgctaaaagtggctttcttgggccaggtgcggtagctcatgcctgtaaccccagcactttagaaagccaagaagggaggatcacttgagcccaggacttccagaccaacctgggcaacatagggagacctccgtctctatttttaaaaaacggtgggcgagggagcaatatctaaaatcacatacatgcctttttccagttctgacttgctcatagtctctgcacacgtttatgataaagaatactgtatttggccgggagcggtggctcacgcctgtaatcccagcactcggggacgccgagacagggcgatcgcctgagctcaggagttcgagaccagcctgggcaacatggcaaaaccccgtctctaataatgaaaaaatacatactgtatcggggcatcgcggggcacggcgagggcagtgcagggtcgaggcgcccggtccaggctgcggcgccgctactcacctctccgaactggaaggcggagacgatggtgacaacgacgcccaagaagcacacgtagagcccatacctgtgggacaggcaggtataggtctgtctctgcaggagcttgaacagcatcaccccttcaccgccacgccacgccccgaggagcctgagccgccgccgccgccgccgccgcctcagcgagccgccattcaggggccccggtcgggccgccgcgcgcaggtcacagcctccgggcgccgctcattgcagctccggcgacggacgcccgctcggctccgcgccgcggccgccgcttccgggagccgggagcccacgccctcggcgcggcggaggcggacctgcggccggcgaggcggccggcgccgcccgggtctggccgggcgagaggcggctgcggcggcggcggggtctccagcgccacctggaggacggaggggcatagggaaggtgcgcgccctccccacctgcgcttgcgcagcgggccctgagggctgggctgggaggggcggagctgagctgggatccacttacccggttgggcaggcgaccaagagaaaactgccccctgcgtcgagactgtgccatagacggtactataatgccatgaatatttttgtgcataaaaccttctctgcacttagcattctctgcagagtgctaaaaggagatgctgtatgtggctcctttcctccaacccccaactatattgtttgaaagaggaaacctttgggttaaatctgccaaaaccgaatttcgttcattcatttagtcgttaaatatgtaatttgtgcctgttaggtggcatagtgcttggtgtcaggtattcaaaaatgaactagacctggctactgttctcagagagtctagtgggggagataaacatgtaaaccactaaatacaagagttgttatgatagaaatcatgcgatgaactggaggggaaccagctcaggggtggccaggtaatccgactttgacagcaggtttttcccacgagatcctttccttggtgcctctgatttacgaaagggagatctttttcttaatcccaatgcaccctagtcaataagatttttttcctagtcaccctgggaaacaatacacttatctaatgttgccatcattcaaagcatttttaaaaatatcttgggaaccagcttcaggaaatactcaaattcgcaccctcagtttgatggtcaggtggaattaacagacttgcaaaaggggttagcttcactccaatccaaggcaagattttttacactttgcagtcacttcttttaatccttcttttaaaaaagatgattgatatatgctatatgtacatggcaaaagattattgcagttgtacaagacacatatagttctgaggtcttttcaagcatgataacagatctgaggacttaatcagaaggggtaaaaaagcatggtaacagatataaaaacatctgccactcaacaggactctcaggataatggccaacatttatgtagcatctgccatgtgcccagctcatctaatcctcacaataatcttataatggagataccattattatccccattctacagatcaagaaactgtgatgaaaaaaagtaactatctaacatcacacaaatagtaaatgacagaattgagatttgaaccaggtacttaggctgtagaacagggccaagattaggggaaggtactgtgaaatgagtcatgcaagtttggagtgagattctgtctttgtttatagttttgatatcggggctgggtgtggtggctcatgcatgtaatcccaatactttgggaggtcaatgtgggaggatagcttgagcccaggagtctgggagcccagaagtttgagaccagcctgggtaacagaccctgttcctattaaaataaaaaaaaaatttaaaacgtaaaataaaacataaagtttgggtgttttgcttttcatggatattcttcagtaatgttttttgttttttttgttttttgggttttttttttttttttgagacagagtcttgctctgttgcccaggctgggttgcagtggcgtgatctcagctcactgcaacatccgcctcctggcttcaagcaattctcctgactcagcctcctgagtagctgggattacaggcacatgccaccacccccggctaatttttgcatttttagtagagatggggtttcagcatcttggtcaggctggtcttgaactcctgacctcaagtgattcacctgccttgacctcccaaagtgctaggattacaagcatgagccactgcgcccaaccattaattttgatttttta

SEQ ID NO: 916250 - DNA, 4001 bp, Homo sapiens
gagcagacaagtaagtgcagtagttggaagagtagtgaacctaaagtgtaggaggaaaattaaattaagaccaatgtcaacatggcttggtagaaactaacagacaatgaagcatatatggcaggaagaaatgtgtagtcaaaatgcaagcctcttaaaacatcagctataaaagactctcaagctcttgagcatcaacctaagaaatatattttacaactcgggaagaaagagagatagataatgattacctttatcaagtgtaacacacacactcacacacatggaccttttctattctattctattccagaggaaataaaaaatgttggtagttactcactaaactgatttcataactcactcaagggttgggaccagaggtttgaaggacactgagctagggtgtgtaactacacaagaaaagttaggaacgtcttgcctggagtatttcatagtctcagcattcagctgaaagcaaaaagagaactgaaacgaagaaagcaataaagcatttggttttaaagcgaagagaggaatgctgaacccagggtcagaggactctgcctcaactactcatgtcttgggcaagttgctttctgggcctccatggggaaggggttggagtggatgtttccaaaggtcacacattccataattctgcaatacacaagcaaaatttactctggaaaaaaaatgaagtcttgtgacaacacccattagatagaaaatgaaacactgacagtctctaatgcaacagtcaggtgttcaatcacactaattgaattttcttgattcttgtgaggcaacacacaccctcaatagttcgacggtcggcctaccagattagttcacttcaggcctttttttttttttttttttttttttttttttggagacggagtctcgctctgtcgccaggctggaatgcagtggcgcgatctcggctcactgcaactgctgcctcccgggttcaagcgattctccttcctcagcctcccaagtagctgggactacagctgcgcgccaccacgcccagctagaattattgtatttctagtagagacggggtttcaccatgttggccaggatggtctcgatctcttgaccttctgatccgcccgcctcggcctcccaaagtgctgggattacatgagtgacacaccgcgcccggcccaggcttatttttattgacatcagatacagacattgtatacaggcacaaacgtggaggtggtctaggtccctcataaaggggactggacttgtctgtgatcctctaatccaaaagaaaaacaatcaggccttgagtgctcttagacagcacctgatcctcattggttcaacccatcctccactggtctccacatgtttatcttgagatattaacgtaaactccacagcagtacggtccagactagaagctctgtgtgctgtacgcatgtgcctcaatccagaaaggaaaagagtattgcagtcccttacaccggcataaagggcctcaggtgggaaaaccaaacctacccaaggataagacagccagttcggggaggagggtggtggggaccgggaaagagagcaacaaaccgggtagtcagcccaagagatagaggggcggggcagaaacagaagagttaccatgccgccgagcacttcgtcctggtcgtccgtgaggagcagcaccacgttgggcctccgggttcccgcagccaccccgaagacccccaggcagccgcccagcaccagcagtagcagcgctgggctgcaggagggcaggtggcgggggctgccccgccggagccgacctggggctagaggcaggagccgcatagcggacaggctccggggtgaccccgggacgggacgggacggagggacgcacaggtagctgaagggcgagaggccgaccagccgaaggaataaaaagccgtgccttgaaggccggtggctggagtcagacgttttctccctaggcgcgatcacgtgagccagggacagggggcggagcacgctgcgcggtcacgtgacggccggcgtgggcggggctgcggactggcgcagcctggagggaggcatcaggcagtggcggaaaaggggcggagaaccggagaaaagggcggagaaccggagaaaagggcggagaaccggagaaaagggcggagaaccgggaaaagggcggagaaccgggaaaaggtcaagacctgtacgtacctctcgcgcaggctcgggttgcgttctggtaggacgtacgtgtttctgagcgcttggtggaaagatttaaatggggggaagagaagatgaaaagcaggaaagagttggcaaatactaaccaaccgataaaggaagagaaaggaggactgtacataacagaaattatcatcagctggtgaggaaagtggactctaccatatttaatccccaagtcgacgggcacttattcaaggcccggatgtttaatcgtttttaattttctctacaacttgtgagataaatcttaacattctcatttggctcagacattaaattcggaactggttagctctcttaactccaaagcctaattatgttcttctttcctcagcagacatcgtagtttcaaacaatttagggatgtcctgacagctttatcctaatggttatcctaatggtccttggtgactttttaaacaccctcttggaacatgttggaggatgtgcagatcgaacaaaaatcttgaaacgtggtcatccaactgcattattaagtaatctttagcggggaatagcccttgaaactagctccagatatttctgtggtcgctctggaataattagactttgcccctctcctctcaccgcccaccgtgggcgcggtggctcacgcttgtaatcccagcactttgggaggcgggtggatcacctgaggtcaggagttttagaccagcctggccaacgtggggaaaccccgtctctactaaaatacaaaaattagctgggcgtggtggcaggcgcctgtaatcccagctactcgggaggctgaggcatgagaatcgcttgaacccgggaggcggagcttgcagtgagccactgcactctggcctcagggacagagcgagactcttgtctcaaaacaaacaaacaaacaaaaaatcacagagatattcctggcaaggtgaactgtcaagtcacatccccagaccgatataacaaggtatacctccttgctggtaaaagtattttctctgagttgaactgtttgccaagaagagtctcttaaaactcgtgaaaactattccagaacttaaagtattaaaaaaaaaaactcgtgaaaacactatactataaggtaaaaataatgatggaaacacgttgaaacctgatgtgtacaaggatagggcttatgcaaaaaaaaaaaaattacctttattactttgtttttttcacacagaggggtaatgcgcggagtcctaacaaggtttgaggtaggggtggtaactcacacaatagcatgaaaacccaatcatcaggcttatgaaccacaaaaggatcttaatactttttttttttaagtaagcctacagaaggcaaaagaagctttaaaaaaactgaagtagtttttctgcaagaaacaattatgccggaagtgtggtcagagcagttcctagacaaccagaatacttggttacagccttggcctaggccaatttttcaagctggttagaataactaatccttctgtattcaggtttcaagacttccaggaagactttcttgcacaaaaaaataacctatttcatctgtatcgaagccccaaattgtaaaattgtttcttttctatttttttcaaggttagattataaactatttgaggccagaaattgtgtaattagttgcccactttgttcaggatgctgctgtcagaggcgattgaaccagagcaactccatcttgaaaaggggctgagtaaaataagcctgaggcctgctatgctgcattcccagatggttatgcattctaagtca

SEQ ID NO: 916251 - DNA, 4001 bp, Homo sapiens
cgggcagcgaggaggaggagcaactgccagtgcatcacagaaagctggtactacaaacatggctctattttaaataaagaggccagtctaatcagtctcacttatgatcactcgcactcctgcgtctctagagagaagagacaggacaaagctgtcacttagaactgcgaaaggtacacacaaccctaggttcacagctgggtaacatcaagggacttcatactgagaaaccaccacctcaggcacctacaggactttctgcttcccccacacctgaattctgtatacaaacattcacggctccatctacaccacctcgtttcacctgttcctatcgggtattagaaacaacagagcacagccaaaaaccaaacacgatttcctcaggaaaagagtacctggtggaggccacactagtatccaaaagtaaacacagatctatacacaaagtgaaaaccaaaagcaagcaagcctcatgtcactgcagagacgtgaagggcaggcttggaagtcaggactccggcctcagctcccgaccctccaccacttacctgtgagagcctgggctaaagatttcttaatcacatttagcctgtttcctcaccagtaaaacaatgagaaaatgaacgcaaaattttgccaggattaaatataacaaggcacagagtctgtcccgtgtcctcaataaaatgacagtaattatcacgattttccctttagttgttgcttgtcaaaatcgctaaaagccaactgaaggcattctcacttgggaaagtatgctacttcttaaggcaatcgggggaaaaaaagctcctcttcaatctgagtgatgtcagatgatttatttccttcttgccatttaaggtatactgcctgaaaagatattaaagggttataaagcgctatgttgatgtcgtttaaaagacagttcaaaataatccacgacgacgggtgtggctgctcacacctgtaacaccagcactttgggaggctggggtgggaggatcgcttgaggccaggagttccacaccagcctgggcaatacagcaacacacccagtctcttaaaaaaaaaaaaaaaatccatgagtcatctgtaaatggcttacactggcccagtgacaataaactccaacctcttaagaatccagcacctgcctacaccaacatccttaccgccatcgctttccccctttgccattacactgtggccacatcctccgccctcagggtcttcaaactttctgcctgaggcgcgcttttctcacaattttgcctggcttgcttctcgtcatagaggccttagcacggaagtcgcccgccccccaggctcccacttagagtagcggaccccacccaaccaccgcccggtaccctctcgctggcgaccctgggtgtccctgtcctaggtgggctccgcgggggcagtgacccagacccacaatacccaggacccgccacacgactgacattcgtcgggttcatacccgtgacaacgcccggccccactcgctctggccacctggaatgaagacaagtcggccagcgacaaagacaaacaaggaagtacacggactcctgaaaccccgacttcccacgaaccacccgacaccatgtcacgcctttcagctgcaaagggccaggctaaagcaagcactgcccgagtggtggcagtggacagcttcgggacaggccgcgctcgtcgggcgcagacaagcattcaggagggctcgcgggcaccggcatttacagagccagctccgccgcagctgaaggcgggcgcccaggcccgaggccaccgcagcgaggcgggggtgactggaacggggccgtcccgccacgctgcagggacgcgcccaggccccgccgccgcccctcgagcctcccccgcccatgcactgcgggagcgggagcgggagcgggagcccgagccccgaggcgccgcggcctccgagcccctcaccctgctgctctggcagccccggaggccgcccggcccggatgctccggcggagacgtggccgtgagaggggcggggcgagcggtgcatcggcctcgggtccccggaaacagcctgcacgcgctactttcgttccggaacagagaacgtcctcctcttcttcaagtggccaccctagggccggggaccctctgcccacagggtccggatcgagctcacctccgactgtgatgaggccgccttcagaaagtgaccttaagagtttgcggacctttccctagtagaaacgcaacttccggaactgcaggaccaactctttcaggaagctgaaccgagcttccggcggaagtggcgtggccggggctcggcatgggcgcggccgagctcggtgtgggcgtgacttccccgcccgccctagtcgggtccccgccccaaccccgcacctccacccggccggcgcccttcgcgcttcaggtgccagatcaaaggcgacgctgctttggaccctatttgcttcccctttaaaaagggcaaagctggacggcgcgggccgctggccgctggggaacggctttccaccttccctcatccgccaggccgctcttccagctgtcaggaaggaaatggcctggagggcgcctcggggtcctctgtgatgttgcgctcatctctgcggattttggaatacgcttcagtctacgaagttttctgggattttgatgggaactgctgcagatcgtttggggagcacgggcatcgctgactcggtccttcatctgcgtccctggtggcccctccatttatttcggtcttttgatttcttccaccagcattttgtaatttcagcatacagattctgcaccttttaagtttatagtatttcacatcaaacaactgtaacactgcgtttttgacgttttccacgtgttcactgttggtctacacaaatgtgatgaattctatgttgattttcttatcctgagacctcgctgaactcattagtttgagggttcatttggtgttttgcggttgttgttgtaaaatccttgtattttttacatgggccatcatgttatctgcaaatgcaaattctaacacaaaatgatcagactgaggcgtaaaatatacaacttttagaagaaaacagaatttctcacatctagagcttggggaagagttcttagatctgaccaaaaaaacacaattcacaaaagaagttgatagagtaaacttcatgaaaaaattagaaacttttcaccggatgcggtggctcacgcctgtaatcccaacactttgggaggccaaggtgggcggattacctgaggtcaggagtttgagaccagccaggccaaatggtgaaacccatctctactaaaaatataataattagccgggcatggtggcatgtgcctgtaatcccagctactcaggaggctggaggagaatcgcttgaatccaggaggcggagaggttgcagtgagcggagatcgtgccaccagcctgggcaacagagcaagactccgtctcaaaaaaaaaaaaaaaagccgggcacagtgtctcacgcctgtaattccagcaccttgagaggccgaggcaggtggatcacaaggtcaagagatcaagactatcctggccaacatggtgaaccctgtctctatgaaaaatacaaaaaaattagctgggcgtggtggtgtgtgcctgtagtcccaactactcgggaggctgaggcagggggatcacttgaacctgggaggcagaggttgcagtgagctgagatcgtgccactgcactccagcctgggcgacagagcgagactccatctcaaaacaaacaaaccaaccttgtgagaaagaccacattaagaggatgaaaagatgagttacagactgtgagaaaatattttcaaaccacgtttgttgaaggactagtagctagaatatataaagaactctcaaaacttgacagtaaaaaaaaatacaattattctgggcacaatggctcatgcctgtaatctcagcactttgggaggctaagggggcaaa

SEQ ID NO: 916252 - DNA, 4001 bp, Homo sapiens
acagtgatacttctccctgtagggcaataagctggcagtctcggtcgattcccagtcttgcttgatttttagttaaaatttggaatgactcagtcgtcagggcctcattacctcagactactgacaaaaagcgatctccgggcagcgaggaggaggagcaactgccagtgcatcacagaaagctggtactacaaacatggctctattttaaataaagaggccagtctaatcagtctcacttatgatcactcgcactcctgcgtctctagagagaagagacaggacaaagctgtcacttagaactgcgaaaggtacacacaaccctaggttcacagctgggtaacatcaagggacttcatactgagaaaccaccacctcaggcacctacaggactttctgcttcccccacacctgaattctgtatacaaacattcacggctccatctacaccacctcgtttcacctgttcctatcgggtattagaaacaacagagcacagccaaaaaccaaacacgatttcctcaggaaaagagtacctggtggaggccacactagtatccaaaagtaaacacagatctatacacaaagtgaaaaccaaaagcaagcaagcctcatgtcactgcagagacgtgaagggcaggcttggaagtcaggactccggcctcagctcccgaccctccaccacttacctgtgagagcctgggctaaagatttcttaatcacatttagcctgtttcctcaccagtaaaacaatgagaaaatgaacgcaaaattttgccaggattaaatataacaaggcacagagtctgtcccgtgtcctcaataaaatgacagtaattatcacgattttccctttagttgttgcttgtcaaaatcgctaaaagccaactgaaggcattctcacttgggaaagtatgctacttcttaaggcaatcgggggaaaaaaagctcctcttcaatctgagtgatgtcagatgatttatttccttcttgccatttaaggtatactgcctgaaaagatattaaagggttataaagcgctatgttgatgtcgtttaaaagacagttcaaaataatccacgacgacgggtgtggctgctcacacctgtaacaccagcactttgggaggctggggtgggaggatcgcttgaggccaggagttccacaccagcctgggcaatacagcaacacacccagtctcttaaaaaaaaaaaaaaaatccatgagtcatctgtaaatggcttacactggcccagtgacaataaactccaacctcttaagaatccagcacctgcctacaccaacatccttaccgccatcgctttccccctttgccattacactgtggccacatcctccgccctcagggtcttcaaactttctgcctgaggcgcgcttttctcacaattttgcctggcttgcttctcgtcatagaggccttagcacggaagtcgcccgccccccaggctcccacttagagtagcggaccccacccaaccaccgcccggtaccctctcgctggcgaccctgggtgtccctgtcctaggtgggctccgcgggggcagtgacccagacccacaatacccaggacccgccacacgactgacattcgtcgggttcatacccgtgacaacgcccggccccactcgctctggccacctggaatgaagacaagtcggccagcgacaaagacaaacaaggaagtacacggactcctgaaaccccgacttcccacgaaccacccgacaccatgtcacgcctttcagctgcaaagggccaggctaaagcaagcactgcccgagtggtggcagtggacagcttcgggacaggccgcgctcgtcgggcgcagacaagcattcaggagggctcgcgggcaccggcatttacagagccagctccgccgcagctgaaggcgggcgcccaggcccgaggccaccgcagcgaggcgggggtgactggaacggggccgtcccgccacgctgcagggacgcgcccaggccccgccgccgcccctcgagcctcccccgcccatgcactgcgggagcgggagcgggagcgggagcccgagccccgaggcgccgcggcctccgagcccctcaccctgctgctctggcagccccggaggccgcccggcccggatgctccggcggagacgtggccgtgagaggggcggggcgagcggtgcatcggcctcgggtccccggaaacagcctgcacgcgctactttcgttccggaacagagaacgtcctcctcttcttcaagtggccaccctagggccggggaccctctgcccacagggtccggatcgagctcacctccgactgtgatgaggccgccttcagaaagtgaccttaagagtttgcggacctttccctagtagaaacgcaacttccggaactgcaggaccaactctttcaggaagctgaaccgagcttccggcggaagtggcgtggccggggctcggcatgggcgcggccgagctcggtgtgggcgtgacttccccgcccgccctagtcgggtccccgccccaaccccgcacctccacccggccggcgcccttcgcgcttcaggtgccagatcaaaggcgacgctgctttggaccctatttgcttcccctttaaaaagggcaaagctggacggcgcgggccgctggccgctggggaacggctttccaccttccctcatccgccaggccgctcttccagctgtcaggaaggaaatggcctggagggcgcctcggggtcctctgtgatgttgcgctcatctctgcggattttggaatacgcttcagtctacgaagttttctgggattttgatgggaactgctgcagatcgtttggggagcacgggcatcgctgactcggtccttcatctgcgtccctggtggcccctccatttatttcggtcttttgatttcttccaccagcattttgtaatttcagcatacagattctgcaccttttaagtttatagtatttcacatcaaacaactgtaacactgcgtttttgacgttttccacgtgttcactgttggtctacacaaatgtgatgaattctatgttgattttcttatcctgagacctcgctgaactcattagtttgagggttcatttggtgttttgcggttgttgttgtaaaatccttgtattttttacatgggccatcatgttatctgcaaatgcaaattctaacacaaaatgatcagactgaggcgtaaaatatacaacttttagaagaaaacagaatttctcacatctagagcttggggaagagttcttagatctgaccaaaaaaacacaattcacaaaagaagttgatagagtaaacttcatgaaaaaattagaaacttttcaccggatgcggtggctcacgcctgtaatcccaacactttgggaggccaaggtgggcggattacctgaggtcaggagtttgagaccagccaggccaaatggtgaaacccatctctactaaaaatataataattagccgggcatggtggcatgtgcctgtaatcccagctactcaggaggctggaggagaatcgcttgaatccaggaggcggagaggttgcagtgagcggagatcgtgccaccagcctgggcaacagagcaagactccgtctcaaaaaaaaaaaaaaaagccgggcacagtgtctcacgcctgtaattccagcaccttgagaggccgaggcaggtggatcacaaggtcaagagatcaagactatcctggccaacatggtgaaccctgtctctatgaaaaatacaaaaaaattagctgggcgtggtggtgtgtgcctgtagtcccaactactcgggaggctgaggcagggggatcacttgaacctgggaggcagaggttgcagtgagctgagatcgtgccactgcactccagcctgggcgacagagcgagactccatctcaaaacaaacaaaccaaccttgtgagaaagaccacattaagaggatgaaaagatgagttacagactgtgagaaaatattttc

SEQ ID NO: 916253 - DNA, 4001 bp, Homo sapiens
tgacaaatcacttgaatgatggccaatccctgcagttaaacacactcacacacaaacacaatttgaaatccaaaatgcatttggttcactaatcgttttatgtttcaatccactgtttcacctaaaacatgtgacaagtgaacagcaaagagtaaaatttcattgccctcacaaaatttaatgaagtgaggagaatgcttctcagggagaatgcccatagtccaaacccactctcttgtttttataaagcaggcactcatcactatattaagtcttcaaaaatataatttctatgcacagattattctcagatctcaaataaagtttatatcaagtcttcttaggtgatagtggggtacagtgcaaaaggtttctgagccagcacacctgggatcaagttttgtttctgtcactttttctttgaccatgcactcaatttcttttgtgcctcatttaacttatgaaaggggcatgcttctgtgagccttacagggctcttataagaattatgcataatgattcacatgaaagcacatggttaactgaaagaaaatacctttatataattgccagtaattattattacactagattcctatcccctcaagactacacttttattttctttgatcagaacaggccaggccaatggaccaaagtgggcggcaaccttggggcaggtggccccaagaggcagccccagtccagcctcaggagggaagacagcctgattggggggtggcagtgtgtgtaggaggccttagaagctctgtgaagttggtctgccatgacttgaatctccacaagaagactccactttaaaatagggcattttaaataaacttctatttttcacttcaattcactgtttaagtcttaaaatattgaaaatctgagttaactggagtgaaatgaaaggcgtggcagataaagcaaagtgagacaaaaagagactcttatgaacatcaaaatatgaggtacagagcttgggcagacataaatacaaaaattattaatattaacaaaaagcagtaggaaagtggaaatattataatgaaagaaaaggaaaccgatatcaatgctagctttagagatgaaataggcctggagaactctgtggcaggcagagagcgatgctaaaataataaaacaagccacaaagcacaatatacaatactaacgaaatatatcctttaatggcacacaaagtggcttttctctactgcttgaaactttagcaggtagaaaagtgagaatgtttcaagagacttctaaaaggttgcttacagtactggcaaaaagcgaatattcaaaatgccacatttaagcgtaaggacattttcaaaaagagcctactgtaggtgacatttaaaataccgcctcccaaataaccagccagccagggacttgtagaggacccgaagtgtgtcatgcgcataaacgatcccgagagtgggccgcgggcaccacgcaaactttctcttgtggcaagcccctagaacaaagcgcccatctcactggggatgaggagatcagcgcgaccctggaatgagacagactctgggctaaagctcccctcccaacatagggcgtcccaccctgccccacagactcttctcccaggtcaggtccgccagtccaagtctagccccggcatcccgaaggcagccccttagggtcccagcagccctagctctgtctcgcaggccaccgcccccaacccagagcttcattcattgaccccggcggaggggcgagacccagccgggcgatgggtgtgcgcggctcgaggcgggggccccggagcaggtgcttactctgcgtgtccgttaaggagatcatggctgcagtggtggggacagcggcgacagcacctcggaaagcccagggtgggaagctgagtcgggagaaatgaagccgggaaacagcccaggcgagagccgccacgtcttccggaaacacgcagccaccctcactgccgctttaagagcgcttcctattggcgaaacctgcttccaatctcaaccaataactcgtaatgttgttcggtgacgcgcatggtgaccacaccccttgaccaattagagaagggagttatctgtgattggctgaacggaccgacccggaagggtggatgctctcagctggctggcgggaagattttactcccgagtagcggaaagatctgctcgaggcctgggtgctttggtgtcggagatccgagagtcggagatcggagagtcggacacaggacagtcggacaccggacagtcaaacaccggagagttagaccgggcttctcggtggggagaggctctgggataactactgttacagctttgaagggtcaagggtgtgcgctttttgtttcatccttccctttcctgctgcagggcgaggccggtctgtagcggatcacttcctttcgcccacacattggcggaggagaaaccggaaagttaatcactgccctgctctgagaactcgggcctttaggggcacgttcgcctgctgaccggtcttctgatctccccattcttttccatgcaggaggattggccaccaaagcctgtttattagcagctgccatttgttggtaaatactactggggatgcttcttccaccccctgcttcacagtagcggaagggcgggcgttattaatattaaattactattgcctctaaatgcaggtggcggggagagagaggatttagcctatggtatctcagtggcgtttcctccaacattgatgactggctgtcaccctgtaacattcttcctgtggatgcctagcttatactgctgagtgacagacctgctgtagttcaatttctggatacattttatgttgagatatcttttgctgttaaatcacatcattttgggaaggagcagtcttttaaccgcataatcaaaggagtcatttaaaatcgtgggggagaattggatatagactgtgtcttttcataagggtagaaacagcccctgctaccttagcaaacctgagccctcactacatcaaggcattttcctgggctgtgcggatacaaaggtgaagagattgaaccccagccctgctaaaggaccttacagtctatggaaggaatgttacattttcattacgtgaagagatgtttgtatagatcaagaattagaaatccttggtttactctcctatttagccttcttttaatggtgtggttattccacattctttagcaaggcaaaaaagagtcagcctatctttccggcctagtggtggcttcagaattctgtgtagaaagggcgtaaggtcagcagtctaaggataggtgttgcagaagtgacttttggagagcatcttagttttagaaaatgtccatattagagagatagaagaggtgtttttaggattatggggaatttaaagtttctactctccagccccattttccacttgtccatatgcatgcttaggttttagtcattcatagatacttagaaatcattacaaaccattttcccctccccccacctctaacttagaaaatctagcttttctgtagaataccagtttctcttttaagattgggcttatattgtaattctttaacgcaagggctcaataaaatgttagatgattaattttattatttatgttgatgtattttgcttaatctggtacatttgaatctatccaacttatttataagattgccatcctcccagttttacaggtagggaaagaggcttggaggaacagcatatgcaactttgcctaacatagtaatttagtcacatagcaattggtgctagacctgttgaatgtttgctgttttttgttacatcactttgtatcttgtggatgtttgctgagtgtcattgctactgtatttgtcatgtatacgtttatgtgactttggacacttctctgaaatctagagagttagtcgttctgagtgttgtgggttattaagctgaaatatagagttttccataaaaaattagtgtcaaaagaac

SEQ ID NO: 916254 - DNA, 4001 bp, Homo sapiens
aactgcctctcttttctccagcaaactcttggcctgcgtctgccattttctgttctccttgcttcacccaccctgaaccccacaacagtgagccgcaccctcccccatccacatgaaggtgtccctggcaccttaataagagatatgccagtggcgtttgccttcagatggcccttgagctggtcacagatcttgccgatgaactgatggggcaccacaaagatcaggatgtcagcatcctctgcagcctggaccacatctgggacagccacctgtgggggtgaccaagtgctcgcgggcctggcagacctcccctagcccctgtggaaccctattcaggagatctgggagccaaagagtgaggctggtaggggagcaggaaggcttgtttgggactgaatctagaaggactgaacttggaggaataagacactctactccctccccccagctaccactctgtctccctccagctgtcctgggctcttgaggactcctggaaacctcatcccagcactctcctatcccttggctgtgggacagtgcgggaggccaaaagcagcctgggcttggcaaaagaaagagctcaaataagatttcatcacccagctcctcaggaaccccagctgggaagggggagccccagcctttctgctctcttccctgcttcccctttccaggtggggagagccacgtggatttgaccaaagaccgtaagtccaaggagcagcctccaagtcggctactcactcagtgaatgagtaacaggattagtgccggaggcaggcactactggaccccaagtctgggagcccagtctttggctgccatggagaccaacttgttctcccatcccttccccacccacccgcctgggagcctgtgaggggaaagcataggttctcctcagtcctcaggaaagggcccagagcagccctcctgagaccttcccaagtcctgctgcacctgaagcggccctctcagcaggaggcacctgttgagtaaggtcggctccaactcctggccctcccttcctctccctgttcttcgcagggtgttggggctcaccacatttgggggcaacttgtgccctggcaggtatttgacattctcatgctgcgtgttgatgatctcagtcagctttttgcctccaatgtcttcctcaaatacccacatggtcacccgtgggtcaaactgtgccagctgggctgcattgccacccacgatcttggcgatggctgagcccctggtgggagggggagcacaggaaagtacaggaggagggaacagtggcaggagttggggcagcgccccacctcaggatctcacagcagccccccaggctgttcactcctacctaccttccttatcacctccactcccatgacaaatagtccccagtgacctggcagtagaaaggagactcagtctcctcaccctttgctactagagaagggagccccacttctcatcttcccacccccaaactcaagcggctcttcacatagagagctctggagacgccttcccatggtgaacaggtgcagctgcccaggagggcgggggtcaggagagggccgggcaccgtctgtcctgtgctgctatgatagaagatagcagcaggggctgaacaggaacctgagggcctttcccacccattctgcctcctacccacctctgtcttggggggcctacccttcccccatatcacttgacagagctgcttaccagttcccggagcctacaatgcagactttcttgctagccatggtgccgcgtctctgcctgagccggctcagtgccacactccctagctcctctgccggctaggagcatttaactccaccacacgtgggtgcagccaagccccgccctccaggggtgggtggggaggctggcgcccagggagatagagagtctggcagagccagggaaaggagagacaggggtacagacaggtgtggaacaggaatggggcagagactaggcccagctttttctcctgggctcatcggctgacagtgctggcaagcttcttcccttggccccagcccagcttcccaccatggtctcattttgaggtctgctaagaaaatagcccagataaggagcaggtgactgctctcccttgctcctttctgtcccccagcatgaaataaattgtatttagcttcagtagcagctaggggaatgcttttcagaggtaggctcctccatgaccccctatccccccgccaaccctgccacatatcctcacaggaccctgttccacagttctgtcctccagcaggcccacgctagctccactgcagggctggggtgggggatgtgggcccacttcccacctctaaagatgaggccacataagaggtaagggcctgctttgaggacagcccagctcaaaaaaggatgagagactccaggtgcctcaaaagacaagattgtcttggtcacccacagaggtcatcttggggactcatccatgggcctctcagatgatccccacccaaaaatgtgttctagggaaggtgggaaaggttaaagttagagagctctgagaattgcggtacacaattttgttgtagactctgggcttaagaggacaggagagaataggaggcaggcagagtgcacactgtccttgaaaggctttgagcctccttcaactcctcctctcaggggtttccaaggtactgccccaggggcttcatcaggtgaatggctagtttgcagaggccagaaaaggggaaggcaggcagtacccggggcagctgtgtccgtggggctttgtggtctcagatgctgtgattgggggtaagtttggtgtatgttttttggggaagggcgagaatggaaggagcaccctcagcagttcagggctctgcatcgcccacggccatctgtttgtctaagacgagggaagctctggtttccaggctgatctggagagtggagcaagaggctcctaacactgtgcaccttggcctagagggcagacaccactgtgtgctcatgtgctgacctcctggcttggcagacggctaggtgggtgttgccatccccctgggctgttgctggccagcaactggtaacaagcactgggctacaggggagtctgtgtgcaacccatgggtaggagtaagcaggcaggaggtcaagactggggagaaatggctttctaagttccggggactgcccaggaaaaaccaaccatattctccttccatggccagtaatttcccatagggaaacggacatgaaatcagtagttggctgtttttcttagcacaatgttatacctaatacagaaacagcctcccacagaccactcctttattgcactggcactgagatgaaggctccagtgccaggctgccagctgggagcactgattacgggtgatggaagagaaaggatgcttctgtccctggcacaaatgatgggagccccaaagaatggatgtttatgcataaaataacccccttgtttttgcctaaatgcttccctctctcattttgcccctacaatcattttagatagtgtggagactaagaatgtgctcatttacatgggaataaagagggtgcagagattcagaatcggctcatcacaggaagttatctgtatcactagagctcttttcccaagagcaaactgtagatttgcttgaaattaataatggttcatcagccattcattacacatgtaattagcctgggtaaaaacagatgccatttcaatgtccttgacatcaattttctccactcctagttatcggcccaaccactcctctctgctttcccttctcaagtctgataaaccccaagttccggagtaggaacagtggttggattttttggtgggtttgattacatatattgaacaggcaatactagaatgttcccatccaaacaggcaaaggataatttttaaactacaactttggaaagtggttgtactctgatcctatattccaaaccccattcttgcataatgacaaa

SEQ ID NO: 916255 - DNA, 4001 bp, Homo sapiens
ctgggctcaagtgatctgctggcctcagcctcccaaagtgcgaggattacaggcttaagccaccacacctggccacatcacactgtatcttaattgacaggtcatctatttgtcttccccaaaagactacagactctgggtaagttaaaggccataggtatcttagttacatgtacatgtttttacccagaataagtcaacagcttagaacaatgtgtttgttaaagactgaggccacacaacacctccacagactctagtgtttccacacttcttcttttttttttttgcgacagtacctctgtcacccaggctggagtgcagtggcacgatcaccactcaccacagcctcaacctcctgggttcaggtaatcctcccacttcagcttcccgagaagctgggactagaggtacctgccaccaggcctggctaatttttgcatttttttgtagagacagagtttcgccgtgttgccaaggctggtcccaaactcctgggctcaggcgatccgtccacctccatctcccaaagtgataggattacagacgtgagccaccacgcctggctatgtttcccacacatatgttatttgatccatatcttcaccattctcactgtatttgaatgttcctaacattcccttaatatttgtttacaagaaaaaattttatccctactgtaaactgaaaaccacttatatttgacataacgtgaaattagacataaaattatataaaatctttaaatgttctatttttagctaaatacaggtgcctattaaaagctctgagactaagaactgctctctgaaaagacctggggattaaagaagtgctgaagatacacactagcaccgagcacaacttctcctaaatgcgaagttgagaactgaaagagaaatgaaaagggaacaatttccctaacacattatctgatgctccttaatgtggggtccatgtaccacctaccacctaaaagcaccttaaataccaaaagtccatgtcccaagttctgagaaacagtaattaatgagaccccactttaccctcctgggagcgagacagggccggattctggagttgagacaaaactggatttatatttttttgcggggcaaagaacttaattaacctttctgtatctcgttttctgtaaaatgagaaaaatgagatctctctcacagggttgttgtagaaataagcgaggcgtttcatctgctgcctggggcttaagtatacaataaatattaacaactaccattatttccctttcaaaacaacaacaaaaaagaacgtgaagccagacagcagaaatgagttgcgtggggtctcagggttcccagtacacacacccgccggctcactccctcaggacccaatctcccgccttccacgaactcctacttttctctccttgtccccgcagatcctcaccttcccgctgcccgcggggcccatgaccagctgcgcataccgaggcatgttggctcccggagccgcccgccacactcccttagccttcgcgcgacgcccactgagctccgggaaagtgaagtgcgaaccaatcgcaatccacattctttctacgcctccagttctaccacacctcctactacggggcagcccgcgggccaaatcccgtgagaaacgcgtcctgagaaaaaaggggaggggcgagggagaggatttgcgcgtgcgcaaaagtagttgatggaaatcggccgttgggatgctgtctaagcttggatacctgagtaataacggacaacagataaagctccgcatccttgcgccacgtgcttcggtccgtggtttgcgtgcagacgtttgacctgtatggtgaccctcgcgatttgcaaatgtgctgaggatctggaatactgaagtggaaggcacctcttgttttggggagcatgtatatttccctcctgtgacgcactgcttccacagagaggtgcaaacgtgcaaacgctcagcgaccgcagcgctcctgcccctcccccaccgtaactccggggtcgcggatctgcccgccccgctctcccgaagctgttcgggcagtgtccgaacggcttcggaggggcgagaagccagcatccgagccgcctctccggaataccagcagcctgacgcacgcgtgctgtcgggggagggatgctgggacagctgctcccgcacacggctcgcggtctcggcgccgcggagatgcccggccagggtccggggtccgactggacggagcgtagctcttctgcagagccgcccgctgtggccgggaccgagggtggcggcggcgggtgaggttgggggccccggggtaagggtggcagcatggggcccccgggtcgtgaggcccccgggtcgtgagccccgtggaggagggctgcggccgacctctcgtctcgggggctggccccggtgccctcaagtgagaggcggggagcagttttgttgtggacagagggcagaggggaggactgcctcgcggttgagggagggtctctgagggaagcttcggaggagcgtttggtgcagtggccacgaggtgactgcgacagtcgcccgcgtgcatctctctgccccgagggggcgctgcgagccctgctgggacgtttgctgtctggcacaggactgtgtgtccaccgaaaggcgaggcgggagggacagaggaggaagatgtcccccggttcaactgggggcatccaggcccataaaccagttccttccctctagtgacatgagccaccttcctgtcaaacggggatttctttttctttttttttcttttctttcttgttttttgagagcgagacagtctcgctctgttgcctaggctggaatgcggtggtgcgatctcagctcactgcaacctcagcctcccaggttcaagtgattctcctgcctcagcctcccgagtagctgggattacaggcgcctgccaccacgcccggctaatttttgtatttttagtagagaggtggtttcaccatgttggctaggcttgtgtcgaacccctgacctcaagtgagccgcccgcctcggcctcccaaattgctgggattacggggtgaaccattgcgcccgacctcaaacgaggatttctaatcgccaatgagaccaatgactgaatatccgaggtgccttgatcttgacattttcttcacactgaagttccttttttcacaaatctatttcgttttgagcaggtttttacacctatttcctagatagtgaagacagcgagctgttgaagtcactgctggagactctacctcctcttcctctccctactttattccctaaaagcaagaactgcgatatgtttgccgttcagtacaacccgcagtcagggcccctgttgcacccatggccatcctttttgtttttttttttttgagacagagtctcgttctgttgcccaggctggagtgcagtggtgccatctcagctcactgcaagctccgcctcccgggttcacgccattctcctccctcagcctctggagtagctgggattacaagcgcctgccaccacgcccggctacttttttgtatttttagtagagacggggcttcaccgtgttagccaggatggtctcgatctcctgacctcgtgatccgcccgcatggccgtcctttttgtctctggtgctactgaagacttcttaaagatgggatggagtcttgggtttcttttctgttcttcacagtccttggccgactgcaggatcctggtgtatcaggagatacgtgaatttttttttttttttttattgagacagagtctccctctgtcacccaggctggagtgcagtgtcacgatctcagctaactgcaacctccgcctcctgtgttcaagcaattctcctgcctcagcctcccaagtagctgggactacaggtgtgcgccaccacgtacctggctaatttttgtatttttagtagagatgggcatgagcctgtaatcctggaaggttctattatgatccccactttatggatg

SEQ ID NO: 916256 - DNA, 4001 bp, Homo sapiens
tacaacccccagggcccaaaacagtgcctgggataaagaacgtactcaaggaatgtttctgatagtaagcatcaaaagcttataaagatacttgtttaatacaatcagcccaaaaattaaaatagactatagaaaaaacatccatcatgctgtcctctcagtgcctttacacatactgttgtctctgtctggaatgccctctccatacatcacacactgtatcttttttttttttgcaaagggtctcactgtcacccaggctggagtgcagtggcaccatcatagctcactgcagctttgacccaggctcaagcgattctccagccttagccccccgagtaggtgggactataggctctcgccaccatgcccagctaatttttgtatttttggtagagacagggcttcaccatggtgcccaggctgaccctgaactcctgggctcaagtgatctgctggcctcagcctcccaaagtgcgaggattacaggcttaagccaccacacctggccacatcacactgtatcttaattgacaggtcatctatttgtcttccccaaaagactacagactctgggtaagttaaaggccataggtatcttagttacatgtacatgtttttacccagaataagtcaacagcttagaacaatgtgtttgttaaagactgaggccacacaacacctccacagactctagtgtttccacacttcttcttttttttttttgcgacagtacctctgtcacccaggctggagtgcagtggcacgatcaccactcaccacagcctcaacctcctgggttcaggtaatcctcccacttcagcttcccgagaagctgggactagaggtacctgccaccaggcctggctaatttttgcatttttttgtagagacagagtttcgccgtgttgccaaggctggtcccaaactcctgggctcaggcgatccgtccacctccatctcccaaagtgataggattacagacgtgagccaccacgcctggctatgtttcccacacatatgttatttgatccatatcttcaccattctcactgtatttgaatgttcctaacattcccttaatatttgtttacaagaaaaaattttatccctactgtaaactgaaaaccacttatatttgacataacgtgaaattagacataaaattatataaaatctttaaatgttctatttttagctaaatacaggtgcctattaaaagctctgagactaagaactgctctctgaaaagacctggggattaaagaagtgctgaagatacacactagcaccgagcacaacttctcctaaatgcgaagttgagaactgaaagagaaatgaaaagggaacaatttccctaacacattatctgatgctccttaatgtggggtccatgtaccacctaccacctaaaagcaccttaaataccaaaagtccatgtcccaagttctgagaaacagtaattaatgagaccccactttaccctcctgggagcgagacagggccggattctggagttgagacaaaactggatttatatttttttgcggggcaaagaacttaattaacctttctgtatctcgttttctgtaaaatgagaaaaatgagatctctctcacagggttgttgtagaaataagcgaggcgtttcatctgctgcctggggcttaagtatacaataaatattaacaactaccattatttccctttcaaaacaacaacaaaaaagaacgtgaagccagacagcagaaatgagttgcgtggggtctcagggttcccagtacacacacccgccggctcactccctcaggacccaatctcccgccttccacgaactcctacttttctctccttgtccccgcagatcctcaccttcccgctgcccgcggggcccatgaccagctgcgcataccgaggcatgttggctcccggagccgcccgccacactcccttagccttcgcgcgacgcccactgagctccgggaaagtgaagtgcgaaccaatcgcaatccacattctttctacgcctccagttctaccacacctcctactacggggcagcccgcgggccaaatcccgtgagaaacgcgtcctgagaaaaaaggggaggggcgagggagaggatttgcgcgtgcgcaaaagtagttgatggaaatcggccgttgggatgctgtctaagcttggatacctgagtaataacggacaacagataaagctccgcatccttgcgccacgtgcttcggtccgtggtttgcgtgcagacgtttgacctgtatggtgaccctcgcgatttgcaaatgtgctgaggatctggaatactgaagtggaaggcacctcttgttttggggagcatgtatatttccctcctgtgacgcactgcttccacagagaggtgcaaacgtgcaaacgctcagcgaccgcagcgctcctgcccctcccccaccgtaactccggggtcgcggatctgcccgccccgctctcccgaagctgttcgggcagtgtccgaacggcttcggaggggcgagaagccagcatccgagccgcctctccggaataccagcagcctgacgcacgcgtgctgtcgggggagggatgctgggacagctgctcccgcacacggctcgcggtctcggcgccgcggagatgcccggccagggtccggggtccgactggacggagcgtagctcttctgcagagccgcccgctgtggccgggaccgagggtggcggcggcgggtgaggttgggggccccggggtaagggtggcagcatggggcccccgggtcgtgaggcccccgggtcgtgagccccgtggaggagggctgcggccgacctctcgtctcgggggctggccccggtgccctcaagtgagaggcggggagcagttttgttgtggacagagggcagaggggaggactgcctcgcggttgagggagggtctctgagggaagcttcggaggagcgtttggtgcagtggccacgaggtgactgcgacagtcgcccgcgtgcatctctctgccccgagggggcgctgcgagccctgctgggacgtttgctgtctggcacaggactgtgtgtccaccgaaaggcgaggcgggagggacagaggaggaagatgtcccccggttcaactgggggcatccaggcccataaaccagttccttccctctagtgacatgagccaccttcctgtcaaacggggatttctttttctttttttttcttttctttcttgttttttgagagcgagacagtctcgctctgttgcctaggctggaatgcggtggtgcgatctcagctcactgcaacctcagcctcccaggttcaagtgattctcctgcctcagcctcccgagtagctgggattacaggcgcctgccaccacgcccggctaatttttgtatttttagtagagaggtggtttcaccatgttggctaggcttgtgtcgaacccctgacctcaagtgagccgcccgcctcggcctcccaaattgctgggattacggggtgaaccattgcgcccgacctcaaacgaggatttctaatcgccaatgagaccaatgactgaatatccgaggtgccttgatcttgacattttcttcacactgaagttccttttttcacaaatctatttcgttttgagcaggtttttacacctatttcctagatagtgaagacagcgagctgttgaagtcactgctggagactctacctcctcttcctctccctactttattccctaaaagcaagaactgcgatatgtttgccgttcagtacaacccgcagtcagggcccctgttgcacccatggccatcctttttgtttttttttttttgagacagagtctcgttctgttgcccaggctggagtgcagtggtgccatctcagctcactgcaagctccgcctcccgggttcacgccattctcctccctcagcctctggagtagctgggattacaagcgcctgccaccacgcccggctacttttttgtatttttagtaga

SEQ ID NO: 916257 - DNA, 4001 bp, Homo sapiens
ctgaggcacaagaatcgcttgaacccgggaggcagaggtagcagagagccgagactgagatctcaccactcaactccagcctgggtgacagagtgagactttgtctcaaaaaataaaaacaaaaataatttttttaaaaaggctgatttcccatcagagacaggcagggccatacaatagcgctcgggggggtgcccagccaagctctggtggggcgggggcagaggctgtgctcacaacaggcttcccagcaggggttcaggcactagcagggtctcctccccacctcctgcaacttccagcagggagcaacagcccagtgactgcctgctgctcccagaaagcctcgtcttcccatccctgcccctggctgaccagaacgtgtgcccacactcttaacagcgaagggtgtgtgcctccctgtcttcccgagagaagccccgtcctgatgcttcctggttgggtgtcacaatggccaatggaatgtggctctggggctggagcaagggtggccctctatcccgagtcccactcatcggctgctccaggctaagctggtcagcactctgaggctggaggtcccgagaccctgctatgggccagagctccaactccccaccagtgaatctgccctgaagacatgagatgggtgtggtggctcacatctgtaatcccagcactctgggaggccaaggcgggcggatcacctgaaatcaggagttcgagaccagcctggccaacatagtgaaaccctgtctctactaaaaatacaaaaaaaaaaaaagctgggtgtagtggtgcacacctgtgatcccagctactcaggtggctgaggcaggagaattgcttgaacccgggaggcagaggttgcggccactgcactccagcctgggcaacagagcaagactccatctcaaaaagaaaaaaaggaagaaaggaagaaagagagaaagagagaaagaaagaggcagaaggcattcaaatgaagatcatatttccttaatcacaatgtttcatatgacccagctcaaggggcccagaaccacttctccatccaccgctcagccggtgaggggtagcagagctgcccagggtcacagtgtgtggtgaggcagtgaggtcggggaccaggagcccaacaagggccattcgctgatgcctcagagatgaacaagtgggctgttcctgagatacctgcactaggcagggggagagcggtgctcagagtgagaaggaaacactcttacctggatggtcctgcgatctggagtagacgccacgcacctgcgcacaaaagaccacagtgtgagacacactcagggaaagcctccggagaaaccaagcctgtcgccatcctggccacttggggacattacctgaaagttgtaataaaatagcagcagccaggagtaccagcagcacagccgcagcagcttttccatggctctctcggaggtcaaagctcggagccaagtgaaattcctgagggtctgtgagaacgggacctcttaaccttcacttccttggaaaagggacattttcacaggttccaggggagaaaatttctgtctccttaaagtttgtgaaacacagctgtcttggagacctaatgggtgtttcttcctcgtctcaaaacttgagattcttcagtgatcaataaacacgttgcgatgaccagagcagctgtggaatgcagggaggagaaacccaaacccgactcgcagtcctgggaaagcaatcccaggtcaccactgtgaccgcgacctgcgcccggggacgggaggctgtttgtcctgcggtattttctttttatttcaagagcctccgtttgtctcagtcaggtttggagcttcccttttctctgaagaaggttttgtgcgtggttttcccctggagcgcccgcctgctcctcgggcttgtcctgcggccgctctcgagctccttctggtctggctcaagttcacacctccgtcctgctctctgggtggagggggagtgagtgatgtaagtctctctcctcaaactttgttctgttctccttttctatttatatccccactgctgtgtccttcctgggtcctaactccagcctcttaacaacagctgaaatatttccaggatctcaggctcagaatcaaaccaaacagacatggtgtgtggtgtgtgtgcgtgtgcgtgtgtgtgttactgatgccttctggtcagcaccttcaaagtcggcataaatattaataaatacaaaatgcaaaacaaaccataaactctgtttagatctgagtcttgtttgcccccaaaagagaatgaagttgacagagggatggaaaagagaaagcagcacacccactgtgccctccatattaagcgctgaccacatttttctctctaatcctttcggacgtcagtgaaagctacggaattaattacaaggtacgctgcgcaattacaccatcccacatatacccccaccccagcaccaggaggatgttctcaatgggatagaaaagagtcagccccttcgccagacatgcctcagtttacccaagaccaaagtttatccgatctactccaaatacacgtggacacacagagacacacaccctagaattgcagtcacagctatatttgctatgtgatttaagtaatatttaccgcttcatactttctccaacattcaccagctgtgctcctaggcaaattacttgatctctcttagttttcgaattcctcatccacaaaatgggggttaatagttcctcctcctcagggctgtaacaataaattagaggacagatccaaggctcttcaggcagtacttggaaaatatgtggcactcagtaaatgctgctattttctattaagaaaaattatcactcagtaaatgttagctatgattattattagcaagtataacataacacccagtaaatgttagctgatacagttatctcaattgtcctgactttaaatgggaattaagaatcctgaatccaacatacttcctaaagaggataagaaaatgacttccaatctctgtgggacagaaaaaaagaaagtgctgtcaaaacgttaggtgattatttttaacttgtgcctgcagcctacaaccgctcagatcctctgatagcctgagcctctctgtggagctggagaagggttccagagagttccatctcctagcaatggagaaactgtgaactccaaaggccgggggctgtctgtaataacgacctttatcctgttgctcaggctggtcggcttcagggaaaactaatttacaacctttatctctgccatttcatcagctctccagtcccccactgcctctcgctggaagaggtgaagggagggacaggcagctgcaggtttttctcagctccagttttaacctggaagaattcaacagattgctgaatatgcggacctttcccatctccatgaccgaacaaagccagcatggtttcttttcatcataaaattgtcatcagataatgggagacaccccgattcaatgactgtaataaaaactagatagcaaagcaattcagcagagcttgccctgcaggcatctgcactcatcctcagactcactctgactctccatcccggactacagtctcgtgcctcatgctatttgcctgcgtcctgtctcaggccttgttcagaggcccagatgaagagcccgcctccatgtaaagcagcgtgtcctgaagcctggagatttgagacagggccttgagtggtccatgggcctggaaccaagcaactctgatgtctctgagcatctcattccatcacccaaacgtcggggtgttcggcacccaaacatcaccttgacagcaggtctccctccccctaaagccctcccctgctgtattttctcgatcccactaaccacgatccaatgtacttcatatcttagacgtttatttcatttattgtcagtctctccccaccgaggcgtaggccccatgagagcagagaccttctttctgcctgttcgc

SEQ ID NO: 916258 - DNA, 4001 bp, Homo sapiens
gccctgtcagcaggcaggctgcccccaggctcaccccagtgctcagcattgcatgatggacccagctgagggcagatgtagagggcaggggaggagactgagggtcagcagaggcaatcctcagctttcatactgggcggggccttccttaagcatccctgcaattgatggggcaggcaagctggctactttcccaactatgaggctggctggggggttctggtccccatgctgggacttccaggtctcttttgcctctggttcttgaccagtcaggaatcttctggatgccccagggatttgggggtggggctcagccccctggacaggctgcaagggaaagatgagatgtgggagggagagggcaaaggtagggcctgggctggtctccaatcagcctcctgtgccccctttcttgaaactataggcatgactgattactaaggccctgagggtcattcagaacattcctttgccttaactctgacagctaaacaccccacacagatgagagccgcactcttccagacctctagggaagaaggtattcccacctccctgtctcctttagcccttcctcctcccgctggaactcccaggttccttcttagaacatcccctgctcagcactactccacccctatcttcaagtccctaaatgtctcttcagaactactgatgggagacacaagactggtttcctcttgagggttcacagtgaactgggatatggcatcacagccttcctcccctacctgccggtctcctggatgcaggggtcttggtgcttagcccctacttccccaaacctgggtgatcaccctccagctacccatatctgggaaaatgggagaaaggagtctgggaccgaagggggtgctagggaacctgaaggcggggaaaccgctgacatcagaagcatccagaaatggaaagagggggaactagggagaaggaggagagtttgagcagaagagaaagagggggcaaagtggtagtatctgaaaatagcaggaaaagctcaaaccccctggagaggaggctttggagggaggagggactggaggagggagggagggagggagcagggaataggaggctgagaagaaaagccaaatgttcaataaggtgctgactccccgtggggagaccttgactcttcctccctggcccagagcctcagtttccctctcatgggaggaaggatggtcccagttttagtgcgtgatgctgagcttcagtgagccctgggaaggggggtaagggaatcgggtgaaaccctgaacagagtggggctgtaaggaagcacataatggctttagggtaagtggggtaaaaatggggcacagcagtgaaagggtctgtttcccatggaagcagctcagacccttgctttccccaagaggtcctggtccacccccacccttggcttccctccggagcccagtacaccctagttgccatggcaatggccagccagagggaggtggagggacttggccaagagcagcccccagtgtcctctcctacagccctggaccccttcccacccacctccacccaggcccagctggtgggctcaggatgaaagagatagggagtcagagagggaaggaggcaggaaagatgtgaaggacagagagagggaggtgaaggacagggagagatcagaggaaggtgggaagggggatctgggaggttccctggccgacggggtccctcgccctttggggtgaaggggtaaggtcaggcggctcctccctcctgtccccctccaggttctccagggcagaaacagcaggtggctggggaggaggggccggcctaggggagaggaggcagcttgagggggaaagggaggcaacacaggggacggggcaggcaggggtcgtcttacctctctccggctgcgcccagcactgccatggagaccgcactcccgacgcggctctctcgggctcccgctgcctgccggctccagctcgcccgccctcctccctccttccctctctccctccctcccttcccccgggcctccctcctccccctcagtcccggcctcccaggctcagcccacggctcactcggtctctgcccctctcactctccaggaccctctctcccggggtcgtcctgccagtgagcccaggccagagggaaggcaggacagctttgtggggggcgggggggggcgggaaacgagtgcagggtggggaactggacggtggtgactcggggaggaggggcaaggaaggcgctgagagggagggcggtgaggaggatggctgggaaccggcttcattggtgaaatggttcatgtcctgcccccaccccttcccgttttcaacacgaacacaagctccaagaggcagctggtgttgttggggactgaggagctagctgttcggggaggaggaagcgtgtgtcactgtgtgtatctgtgtgagggctgggccttgggtttgggagtgagggggcttgtggtgcacactggggctgcttgtggagttgggggtggttgtgcacaagctaaaaggatgtgggcgcatgcatgcacacagacacacacactctgcctcctcctcctggaacacaaacacatatgttggggatacaatttgcacacacatgttacagtttctcatagtcctttttctctgccacacacatacaccaggagagctcacacaaccctgagtctctcccccacggtatatcacacacatgtaattacagagtctcagcctcacacacacacaggcccacacagagccctgtgggttgtggaggtgggtagccagcctccacagaatttttccctctccagggaaacttcatctccttcctggggcacgcccagcaacctctcctctgggtccgaccccaaagaccagaagattcctggtccccagagaaggggtctctctctctctctctctctcacacacacacacacacacacacacacacacacacacacacgaagagcatctttatagtaagtttattgtatttttatttcagctcaggggagcaggggtggagagtgggcacaaatgcaaagtaagcaaatggggagccccagcagcaataggggggtcttcctggaagaggcaggctttaaagacaggaggagaaggaaatagggaaaaggagttgggactgagggaagtggtgaggaagggtaggaagagaggggatcctgagagaagtggatcaagaagatttgtaaccctgatttccctgtgtcctgaatggtctggaggagggtaagggagggtgtggggcaggcgcagagcctggcacaatcacctttgaggtcccttagagggttccctctcaggctagctaccccctctcccagcaaagctcgcttccaggaggttctgcacagggtcagtgactggtcactgggcattctctcctgcagtgcctgtgctcccagcttgcgctctgattagaagagccaaaggctttgtcctctggtaacagattctgccaccagcgggggatgaaggagggattttagacagggaggccttcatccctgctcgtaaattctctgagatggacccttcccatgggtgctgtgcttctgtgaacccaaaagtacacattgagtacccaccactagccactggtgagagccgtgtggcatttgtccctgcattcaagaggcagcagtggaacttgggacaagggacctgggttagtcccgactccagcacttgctagtccggcacttggtaatcaatcatctagcctctctgagctctggttctggtctataaactggagatgatcatcttagttctgtcactgccagccttgtaggatttttctaagtctcaaatagacagaggatgtgagacatcccttgaggccgtgtacatggggctgtgtccagaggggctgtttgtgcaaggtcaggatgtgagtctgtggtcccacccacatagggtgagaagcgggcagcatggggcaggaggtactggctgcca

SEQ ID NO: 916259 - DNA, 4001 bp, Homo sapiens
gtctctctctccacacctcagtattttaagatagattcaaaattgaccacgagtgctttgaccctcccctctacatccccccaaatctcccacctatactctcacctgtgccttttccttcactgttggaggagtctggcctctacctcagctgggtgtaagaggctgagtgggagagatgggggaagtatttggaagcaaatggtgtgcctgaaagctcaggcttggctcagggtggggggctgctgcagcaggctggctatcacccttggtgatgatgatggaatgctgggtggaacaggaggaagaggaggcgcatgtgcccgccttggtctggtccttaggaaggtaatggactacagcattcaggagccggccccggaagtgtgggctgagaaagttgtaaaggatggggttgatgacacagtgcagcatggagaagcagtcaatgacatcatagaagaagtagagcaggtggaccaggtggcagtggagggagatgtgggtcccatgcagtgtgagcagcagcagggtcacatgatagggcagccagcacatgacaaagacggccacgtaggcgcacagcagcaggcagtggcgccggctcttgggttgtcctggctgccgcagccggcaggctgtcagcacattgaagactgtgatgagagggaagggcagcaggaagcccaggatggtggtggacagggccaccgccagggcccaggtgctgtacgtttcaaaaggtgccatgaagaggcacatgggctcagggccctccaccagctggatgtggaccacctcaggcagcgggatgatggccgagaggacccagatgcctgcacacatggcccgccgcactcggtgctggtaacgctgccaggagggggaggcgctggtgagggtgacatagcggtcgacactgaggcacaccaggaagaagatgctgctatacatgttgacaaagtagaagtagtgagtgaagcggcaggagaagctgccccagagccaggtgtagtccagcgtgacctccagcatccacacgggcagagacaggacaatgcccaggtccgcgatggccatgttgaggatgtagaggttcatcagccctgcccggcctgagccgcgccagttgacgcatatcaccaggaggttctccaccagcccaaccacaaacatggccaggtagagggcaaagaggaccacgcgcttggtgctctggctgagctccacgtggcactcagacaaagtgtggttgaagaggtcaagcagctcggtccagttgtggatctctccaaggtcactggtaggcactgcggtgaccccctccgaggggccaggcccccagctgggtttcactgacattgggaccagcacacgcctattgggatgaagggagggttggaagggaaagcagacctcgagagccttgtgtcctcaaggtagaggccagagggagtcgggggctttggggaaagattctggggctaaggcaagaaagggaagtttagctttcaaactgtgaataaataatacacaactcacttgctagctctgacccaagagcagagatactttcttaaggggtttcagctggaagaggccaggactgttggtgtccaccaacatttctccccacccccagccagttccccctcaacaaccccctcaatccccccacacccaccattcctaggtggtctccaacctccacctctctcctggcacttcattcctcagcccttttgcacagatctttattgctctttttctgtcttgttatttggaccgtgagtgtggaacacacacacacacacgcacaccacacaatctgattcatccctaggaaaacctgtggatcatgcaggatagccagttgtctccaagccctgattcccatcttccctgggagagggcgacactcacctgagtttcccttgggagcccctcggtcctggagggagggccggcaggtccaggctatggggagctgtgaggaggctggggggcccttggctgtggggctggcttccctgctggcttcacggccgcccttctcatccgggaagtagctgtcactgctgaggctctgtagggagggatggggtttttcctgcattcccccaatccggttacaggggatgtcccagcaaaagacccggtgtgccagtggcggggaggtcatactgccagcattaaaatcccagctcctccctcacccgctgaatgaatttacctctttcctcagcctcagtgctctcctctgcaaagtggggtctattatctactaaaagggatgctttgagaattaaaggagctgttgagggagggaaagtgcttagctcaggtggggcctgtggcaaatgctttacgtatgtatgtattttcctctccctaagtcagcttggaatccctctctcccctgtcttgattcctactagagtgaaattggatgtgggggtataggggagggtcaaaataaatctgaacatcagttgggcttttaataactctggcccacccctgccattctccccagcccctcacagggctgtgagctccctgccttcatcttgtgattggaggtgagaatctgggaaagaaaagattgaatggctgggcatggtggctcacgcctgtaattccagcattttgagaggctgaggcaggagaatcgcttgagcccaggaggcggaggttgcagtgagctgagatcaggtcactgcactccagcctaggtgacagagttaataaaaaaaaataaaaataagattgaatgcggggtgtcaagggggctttgtcaaagcttcagggagattcctgagtagggagggagagagagaatggcgccctccccctgtggctctatacttctctgcgtgaagggtgtggtgggtggctggcaggggatgagcaggggatggggcgtggggtagggagagcagacttctctctcccgccaagctagagggtaagggactctaagccacgtgttatgggtaaacattttgtgtcagcagagcttcctgcccttcagagcgctttcacctcacttcatctcgttggattctggagatacccctgtggggaggatggatttcttcaccctctttgaggcccagagaagttgtctgttacacaagccacacttggcagatggcagagtggcctaggcctgagccaaaggtgtgtcggctggacgggattgagtatatattaagtcgaggtgaaattcccatagcataaaattaaccattttaaaatgtgtgatttaatggcatttagacatgcacattgtgcaaacaccacctctgtctacgtgctaaacatcttcattacccgcaaagaaaaccccataaccattaagcagtcaatcctattccccccaccaccaaccttctgcttcctgtccctgtggatttacctattctggatacttaatagaaagggaaccatatcatatgtgacattcagtgtctgtgtttttttttttccacttagcatgttttcaaggttcattcactttggagcatgcatccgtacttcatttcctttcatggctgagtaatattcccatatatatatatatatatatacacacacacacaccacattttctttatccactcaaagagaacattttttaaaagtttgctcactgattcttttattatggtaaaatatatgtaaggtttaccacgttaaccatttttaagtgtacaattcagtggcgctaagtgcatttacactgctgtgcaaccatcagcaccatttatctccatggaagggaatatttttcattttgtagttttgtagttttcttaaaccttccacttacatatcagatcactccaagatcacaaaatctatcatggccggtgcagtagctcacaccagtaatcccagcattttgggaggccgaagtgggaagactgcttgagcccaggagtttgagaccagcctgggcaacaagatgagacccccatctctacaaaaaataaaat

SEQ ID NO: 916260 - DNA, 4001 bp, Homo sapiens
cttttttttttttttttttttttttttttgagacggagtctcgctctgtcgcccaggctggagtgcagtggcgtgatctcggttcactgcaagctctgcctcccgggttcacgccattctcctgcctcagcctctggagtagctgggtctacaggtgcccaccaccacgcccggctaattttttgtatttttttttttttagtagagacggggtttcaccgtatttgccaggatggtctcgatctcctgacgttgtgatccgaccgcctcagcctcccaaagtgctgagattacaggcgtgagctaccgcgcctgacccggtagagtacctgtcttaaagctccctaaatacagacggacctacgatgcacagagcatccacaattcaactgataggtggcatgtactttacactaagttctatgctacctcattttgtcattacaataatcctatggcacaggcactattatccttattttataaattgagaaactgagattcagacaggacacacagagtgactggcagaccctaaagtcaaagcccaggtctgattcccaattgtacacactttatatgacatcatatcgagatgtcatgcctctcagagctggatgatcccactccctaaaacaagacacccaggcttcaaccctgaaatcctattccattgcctccatggatttttcctgcagcattttcctatgcacttcacacatacagcgcagctgccaggatatactttaggctgccaaaatgaaatgaagtcactttcttggtaagtgattaccatgcctggctctttactgaagtacttccattctatatattcacactgggatccttctccatcactgctagcttcaatcctgtggctttccatatttagtttttcttacagatgaagtgatactctttacctatcagccattcctttgttggagtaaaattacgtattccatcagcattcttctgccttgtactccagatagtatacaaagaatcaaattatagtagctaagtggcatagaattgctgccgatatcaagatggactctaatatctagtgaactgggaggctagaggctagaagtatgtacttctgtaaggtgtcagtgacacatctgagtaatgtggtagctaaatgccaccatttcattccatgaaatccacatttcattctggctaaagggtaaagctggtgagaggtgggaggggccaggaggctccatcggaaggaggcagacacttcaggtgttgggtggtacctttaagatgttgcggggccaaatccaatgccggtgcaggtgtcccatatatcctgagagacaaaaagaggtcagattggtcagatccctcgagacagttcccaaattcctgacttctgttaccgcgactgttcttcgcaattccacctcggcctgtgttcaggactgtggcttttagaatcttcctcattccattccattaggggcgtcccgatttccaccttatatacaccatgtactaaatgcatgccatttctgcctgtttacaaacatgcataagttcacactcttttaagaaaaatgtcctctactgtcaacttctttctagtctggcctcccaggtaggctacagagctactgccttcatttatctctcaaatcttcccatcttctccttcccactgtattaccttagctcacactcacatcctcttggtcaccagccaaaaaataaataaaactcctttgtcccttcagatttctctcttattctacaacctcattaatcggctctcccgctcccactcctttactacttcagtcgctgaaacctcccctcacagagttcacggccaatataaaaacggaaagaagggatgaccatacgagcttgtggacttttgcctgcaaaatctcatagaatgtggtgttgtgtacgtgaatccatcagatcaacgcgacggacactccccaagggccaaatcggaccgcctctcactaggcggaaagttttgaaacttttgcgcgctaaaaatgatgagccagacgcatgcgcaaacgtgcactcccggggtggcgcttctcctcaggcagatctcgcgtggtttggtgatggccggctagtatgaaggttttccgtggcgttgagatcccacccgcccttttttttttttttttttttttttttttttttttttgctgccccagtggattaggattagtgctgcagtcaaatgaaaaagatcaagacaaaaaattaggctaatataactagccgacaggctagcggcatttctctggggccgaggaattccacgaagaagatctctgcgaggcccagaaggccgcacaactacttcttcagaaacaaaattttttaaaaaagtaaaaatagaggaagtcagccagtttatcaccttggaaccagcgttttgtttggcttttccgcttttcactctacgaaaaagcccattggcggctacccaggttaccgtcctgttgccattgcgcctgcgcggcggtttgtttaccagtccaggcgaagcgctgtgtcgcggttctcgccgccccgagcgccttggtttgctcccttgacgtgtaattcgtaatgaaagtcatgttttcatttgggaacacggatcggaggtttaaaactggacagtttaagtgtcaacttcagaccaaagaaaataatggtagggaaaacactggacactcagaaatcggtgccgcgtcagagctgtcacggaagatgtttctaatgaacctgaggaaaacaatagcaccaccctaaccagaactaaaaagtggcaagcagccacagttaatgaaactcataggtggcatttagttacttatttagaatgtaggcctagttatggtaaaaatgcaaataagaccaaacctaaggtcctcttgctcgagcaaacctcaagcaaaacctacatgatttaagactgactcttgaagcgaagtaaaaaaaaaaaaaaaaaaaaaaaagcagccatgcaaaatttgaaacttggagacgactctagaagcattaacccaagaaagcacaagccaacaaacaaatttttgaaatggtttgaagagctcttcaaagtcagtttcaggtggcttagaagaggatgttgcttataaaatgagatctgatggaaacttgttttacagatatgactggattcgtttgaaaacaaaaaaaaaggcaggcaaagtgactttttaaaaagtatttttatggaaggatttctaatgatacattttaatgtgctcaaaaaacaaccttaaataactggtagattcagccaaacctggatcattgttatcttagagctggataagagcataaatgttaacaatttggcaattttattggactctgttatgtttttgaatggtgaatttgaagacttcaacttgtaacaagaaattttctaaaaggaaagtgggattttcaagacatatgaaattaagcagagaatatgtatggacatgtgaacagatggaaccaaattttgaaagctttgcatgtgtccagcatcggtcacagaaaatccttttatctcaagaaactagcctctggattttctcacgttcaatatgataaaactcagtaaatccagcagcttgaataccttttaacacaaatttgtaccaaaatgagaagtaactttaaaattccgctccattatctagaggtactctgacttggttaaggtaaggtgaaaatcggttttccaagccagtattgaactggcattttcatcatgaagaaaaaaaaaatgcagataaagtgaatgggtatcttgttcactttaatgattaagactaactcagaaagctggcttactttgtcaaggcaaacaaccagtattaaacaaactgaatactctcattgcacataatgagaaggcttgaatgaaaattaagtatgggagtggaagagctgataaagaacagtgacttctttgagactcctagttcatttacatgtgatgaaaattatag

SEQ ID NO: 916261 - DNA, 4001 bp, Homo sapiens
ttgggcagtctagggctgaaacattgatcaagtgatggagagacttgatttgggaggctggggagagattgttgtgaaaatgcccacatgtgttatttcacctattctcctattacctggccactttggtcctggaggagacagtcctgaattctggtgactagggtcacagttctaatggagcctatggaaactccggggccctctttttaaaatggagccatatgcttggcggaattggcggttcatggctgcatagagcacagggttgatgcaaccattgagccaggtgaggttggcagcaagcatgtggaccacccggggagcctggactctggcatccagaatgttgagcagcaagaaggggatgtagctcagggcaaagcagaggaacacagcaaaacacattcgagtcaccttcccaaattccgatgaagaatccggagctcttctggctcctttaattggctgggctttggcagatgcttctggagggcttttctctgccatctgcttagctctcttgctgttgatctggtctcccacttctgatgagtccccttccagggtctgggtggtggcagcactgactggctcagatgaaatcccctcactgggtcctcctgatgctaacctgctgtccagctcctggaaacgaccaggcatggcctcatcagtcctggccacatggttggagtggatgcttgcctgtcgcaacttgtattggtccagtgcctgtgctgctcgtttgacctggcggtggatgaggcaatagaagatgccaacactgctgagcccaagcacaaagtagatgcccatgaggatggtggtgtaaggccggcctcggatgcggtcaaagctgcaggtgcagactacaggtaccaggatataaataggccagaggggagcaaagctggccacgcccacaacccaggtgctcaccagtgccagcactatccccttggcactgaaaacttggggaaaaagcttagggtgggcaatgaggaggtagcgtcccagtgcgatgaggcagagggtcaggatggagacagaattggaggcaaaaaggaggagcccaaataccctgcagaaggtggcaccggtgcgccagtgcaggtggaggtaggtgtccacagagaagggctgaaggagcgtgcagtagaggagatcagccagtgtgaggttggctatgagcaggttgaatcgggtacggagcttgggctggatggccaaggccagtagggtgagcacattgcccacggtgcctgtcacagccaccaccaccccccagctaactgcaacataacgatagcccagcacagactcatggtagcaggagaagttggcgtcagagctgttccacatgatagaggctaaagaggcagagggtggaagaggaagagggaatcagaacctagcattcaacttagatctcttgaacagttctgggaccctggacatctaaactgttcctggacctcaccttaattcagtatcctcctgaaccattcccaggcctcttcatctcaagatccctaactctctccttaggttctcttagtcctttcccattctcaaatatttccccaagtttttatctaaatatctcttgcctaaatatcttagtcttattctgctccaaacctcagtcctcttctatatccatcccgctgctctcagtaaacccagtgccctccaacttttttaattccttccccatccccaaagacccccaggagtcccctctctctattcagcatcgtgtattcaggatcctctctgtattcagttccctctgctcctttccactacacacacatataggctttagtcatttctgtttgttaccacctgggagatgaggagaccaagaaggtaaaagtatacccacaacaaaagtgcttacctgagtttctcagccttcaattctttctataatggaagaagttcaactcacccaaagagcagtcctttctggtggacagttaggcttcaagcaggagacatcctgctcttatgtatcctattatagtccactgaaagaataagaaactcccccattacccaatcccagccacttccttcaccacctccggtcctactcattttgcttcggctagtgaaatctaggcttctctgttgaaagtcccccgctacttacctcagagtggtttcactcttcctttctccttcctgaaacccaaactctgttttcttcccctctttgcatggcagaactcatctgtaagatcattgccaagaattgctagggcacggagtcagagcatcagaacatttgggccactcctcaaagggccaaaagataagaccaagttccaggagcaactttaggtacccccagaagccttgggtttgtttcagaggagcactacctttcttgtctccacggcttagacatggttcaagtcagagggacccatgtgacaccctagcacatttgagaaaccaagtcagatgaagaaaagtggggaatgaggcatccagaattctggtttcattctcctcaagggatcagggtcctgttcaatcattcatttatccatttacccaacaacttagtactgagtgcctactatacaccagactctgatctagacactggggatacaagaacgtctgatatatggccttgtgcatagtctactaggggagacagatacataaatatgcaaatgcttaatcgattctccagagcaagggtgagtaaacttcaccctatgggccaaatctagtctgctgtttttgtatagcctgtgacccaatcatgttttttttccatttaaaaatggttatattttaggccaggtgcagtggctcacgcccattatcccaacattttgggaggccaaggagggcagatcacttgaggtcaggagttcgagaccagcctggccaacatggtaaaaccccgtctctactaaaaatacaaaaattagccaggcgtgatgggtgcgcctgtaatcccagctactagggaggctgaggcaagagaatcgcttgaacccgggaggcggaggttgcttgcagttagccaagatcacattgcaccactgcactccagcctggatgacagagcaagactccgtctcaaaaaataaaataataaataaataagtaagtaaaataaaaatggttatattttaaattgttatataagtgcctatgtaatatcctcagttttatctcttgattaacacagtttaaaatatttataatcaggccctttgagaaaaagtttgctgaggcttgctttaaaatactatataggcctggcttggaggctcatgcctgtaatcccaatgctttgggaggctgagctgggaggatgacttcaggtcaggagtttaagaccagcctgggcaacatagtgagaccctgtctttacaataaaaaaaaaaatagccagctgtggtgatgtgcacctgtagtcccagctactggggaggctgaggtgggaggatcatttgagtctgggaggtcaagactacagtgagaaagattgtgccactatactccagcctgggtgacacagcaggacgttgtctctgaaaaattagaaaaacaaactaacaggctgggcgcagtggctcatgcctctaatgccagcactttgggaggccgaggcaggtggatcatgaggtcaggtgttcgagactagcctggccaacatagtgaaaccccgtctctactaaaaatacaaaaaattagctgggcgtggtggcaggcgcctgtaatcccaggtacttgggaggctgaggcaggagaatcgcttgaacctaggaggtagaggttgcaatgagtcgagatggtgccactgcacctcagcccgggcgacagtgtgagactccgtctcaaaaacaaacaaacaaaaaacaaacaaaaaatacatcgctgggtgcagtggctcacacctgtaatcccagcactttggcaggccaaggcgggcagatcacttgaggtcaggagttcaagaccagcct

SEQ ID NO: 916262 - DNA, 4001 bp, Homo sapiens
aggtcccttgtttcccacgtagcgcctctcccggcccttccttcccctcattccttccctcacctagcagacaccggcatgcaaacctggagggtgtgtgccccctccgccctcacccctcccgtggtccctagcccattgtgtctgaagtagctgaagtgttccccttcaggaatgaacccacagcagtggctgattcggccgaacccttcaacaggtgtggtgtttacacaagcctctgaggagacaatcaggaatggaaagaagtcaggaatggaaagtccttcaaattccttgattctgagcaggtttcagctgttagctagcctttcccatggatgtttaaagctatctgtggccgggcgcgggggctcacacctgtaatcccagcactttgggaggctgaggcgggcagatcaccttaggtcgggagtttgagaccaacctgaccaacatggggaaaccccgtctctactaaaaatacaaaattaaccaggagtggtggtgcatgcctgtaatcccagctactcgggagtctgaggcaggagaatcgcttgaacccgggaggtggaggtcgcggtgagctgagatcgcaacattgtactccagcctgggcaacaagagtgaaactccatctcaaaaaataaaataaagctatttgccagccttccccatggatgtttaagggaccagatggaacagcatctatgctattcccaaatcctatccataaagtcggtagtggaaggtgcactctcagcgcacattcaactttcatctgtcccaggtttctgagcaactcaaggcacaccagagtggaactgaccgcccacacatcaagagaaaagggatgggcttctagatctaattcccaaaactcagaagggctttttgcagcatctgggtaaaatagtagctgtcaccgtgtcctccctcctgcccctgccccttgtttcccactccccctccactcccagtaccttcgggtcctctgagatctttctccctctattcttttcctgcagagtgatcccagagctgctcacctcctgcctggccggattccatctactcaaagtttgtagaatgtgtccgagcagaaactattaccctgattatctctttgctctctgcctctatcttagcctaggaaacccgcaaaggggaaaaaaaaaaaaaaaaatctgagttgttaaactagaggaactgtttcctagggaatttttttctcatagccaactgtattccattaccaggatttctctcctcttctatcccacccctcccaacgccccgctctccccagacgatttaaatccggaggccccagcgctctgggctcctggcgcctcacttaccctagtgccaaggcgttggccgtgaacttggtgctgcttcccgcgcgcaagagggcagcaggcgagctcctcagtgctgggggagaccttggacagctatcccgccctcgcactctgagcagttgttataaaggcggccctcgccggagggagggaacgagcgaggggtgagcagagggacaaggagggggagggtcgagggagaggacacgcctattccagttccacggcacttcatgctgttatgaaaataaagtccccgtgccagggaatgacccaaaaaccgtctgacgtcagaggcacagtcacccctggaagctgggcgggggtgaccacccggccctgcccagcgcatcggactcctccgagacgtgctcacgcgctggtcccagggcgccggctacgagaggggagccggagcagaccagctccttacgggccccgccagctgtcacctcccgggggagccacacccgcctccccgcaggcactcgggtccacccggggcaagggcccagcccgcgagattgcagcagctccgccgtcaagtccagcgggacaagccagccttcctccactttctttgaccttagcttagcctttctctccatcactctcccccagccactgccgtatgggaagccaggcttcagaaaaaggaggcagccaccttctcagggctccccagccaaagccacgtgaaagccaaggaaaacttcccccaccaggtccgtagttagctcagcagctccacctgtcagagtctagacaggcaccattagtgctgccctggggctgagagatcagtatctctcctttcctaactgcctctcctaaagcctcgacaatgcaggctgattgaacgggggcgccagatgaaattatgaaatgaaggaatttgctttggtgcctggtttcccctccctccactgcccactcctcttccaggatcaagccaatcggaccgaaactcgtctttgtttacgtgtggaacgatcctggagtggctgcccgcctgtgtcggggctcaagccaggttctaccccatgccacggggaggcaggagggactctgtttttaaagtggttatcagcgcgcttggtaaactaatctggattattctgcatatgaagaaatgggggaaggcccagggctccccagctttctcttcacttctccccacaccccaagtctccagagcctaaagtgcttttaaaatgtgacctactggagactgtgaccccaccattgttaggtttttatttcactcccaaaaaaccacaggcagtgccttgagtgttggaacactttgaggtatgcagcccaggggtctgtgagtccacccatttcacacctaagactcccaggggtgtgtgtggcagagtgggggtgggtactgagagactggtgggactgcaaatgacagtgctttatagtgtgtgccatccgctaagtcagggcttctctccggaccccagcgttctcgtctgttcaagaagttgaactagactaccattgtacaatagaactataattcaagccacaaacataagccacatttgttttttattttttgtgtgttttttcttttttagacaaggtctcgccgtcacccaggctggagtacaatggcacaatcggctcactgcagcctcaatcacccaggctcaagctatccttccacctcagcctcccaagcacccaggaccacatgtgtgcattaccacacctggctaatttttttgtttgtttcttgtttgagacactctcactttgtcacccaggctggggtgcagtgataccatcatggctcactgtaagcctttacctcccaggctcaagcagtcttcccgcctcagcctcccaagtaattctttttattatttatagagacaaggtctcgctgtgttgcacatgctggtctcaaactcctgggttcatgccatcctccagccttggccttccaaagtgctaggattacaggtgggagccaccacacctggcccacatatgtcatgttaaatttctagccacattaaaagaagtacaaagaaacaggaaaattaattttaataacactgtatattttttacccaaatatgatcccaaatatgatcatttcaacatgtaatcaatatttttaaaaatattaaggggctattttacttctttggtttccaactatatcctcaaaaacccagtgtgtcttttatatttaaagcacctgtcagtgtggaccagccacatttccattgctcaaaaagtgtgtgtggcttgtggctaccacactggatagtgaggactagttgtccctggtggctcttccagcacggagtctgaatcaccatgtctagggtgagtttcatgacatcgagcaaaagacgtcaagtctgaggatggtgaaagaacaaagatgatgtggttttggggatcctaccctatctctacaccccctccccaggaccacattcccattaggtcctcctaatgagaatgtgatgagtgtatttgatctttcctttgttcactgttctctggatggtatctgtctggcaggtccagggtgtgtgagacagagagcatgtgtggggatgcttgttctgaacctgtcttcagtcattgctcttcactttgctattggct

SEQ ID NO: 916263 - DNA, 4001 bp, Homo sapiens
tcaatggatgtatttatctgaacaggatttaatttgaatgcgcaactagccacagattacagctcaaaaaaagtgtatgtacttaaaaggaagcttatgtgaatttttttgagcctggtgaacattatgtgtgctgtacaatatataaaataacatcatcattacatattagaaataaaatgtgagaaatcagatgcctattaagacacaaaaattgatgtaaaactatgatattgggttttggataatagcccagatgtttcagaaaaggaattaatgagttttgacatatttccagataattaaaattagccactatttcccccaggttgttggggtccaagcatccttgttgccatggataatgtattttattccttaacaaagtggagtcaggtggcttgaatcaaaatatgacccagaaattattatgaaaatgtcacataagcaagttactttctttctcctaatgatcacacatctgagtctttactcagaattaggatataatggctcttcctctcgctttttgtaaaccttgaaggattttaaatagtaaatgttttgaaaagttgaaatccagaagtgattgggctttatggctttaatgaggtggtgagtcctgtgaatcagtttaagattacgtttgggcaaattagctttgagacaaatttttaaaatgtccatcactgctgccaggatcggctgttgcacttgaaggccaatacatctggacttaacattagatatcatgcaaaatcgcatggtccaggcctaatttagggccagttaactcattttatagtggatgcctttctttaaccagtgtgaacattcagagtcataccctctttatttagggcctttgattcatgtatgtcttggtctctccccataaagctctatgctttggaagaactcatttttcataaaaatttaaccttgattctgggagtctgcatttctatgcttgaactatgaagccacccaccccaaatctgaccattttcttttagtttcctcttggctcatcctactgcatgatttttctcctgcttctcctgtaggagcacctccctgctccctgaatcccccaggaatgtacctctggagagctcctggttctccacttggaagctgtgttggtaggctgtgacggggcaggcattgccttgtaaagggcactcctgtctacacgatctgtagagaatgcagagctcagggacgatgtacagcagcaggaaaacccatgcgttggtgaccagagcaatgcagacgaccgggtcgtcccactggggctgtcgctggaactgcgggttgcctctcaggagcatggagatccacaccacccagatgatgatggagaagagcacagtgataaagatgagccttccatgctgcttccagttctcacacgggccacagaaggtggctttggagacgaagaatgtgagggccatcaggaagaggacatagaccaggagtacaacaaagtccacattgagctggcagggtgtcatattcacaaacatcatacctctggtcatgatgagagtcacatactcagtggcaataatgatttgcaacagactgcaaccaatagcaatgcacagaattgtcgtccaggagaaggagacacaaccccgaaccagcttcactagattggaggcatgagctaagaggcatgagaaacagagagcaaagagaaccccaaagagaaagtagcgtacgggggcagtttgttgattgagctcgatgatgaaggcaaaagcgagtccgaagagccccaggacactcaggaggaagaggagctgggtggggaggacattccactggctgcagtcttggatctttcgcatgaggaagagaaatgctaagagtagcagaattgtgaccacgatgccaagtatggccagggactccagaatgatgccccatggcccctcggcgtcacagagaagaaaatagtctccagtggactcgatgcagtccttgtacatggtgacttatgggtgtggacctcaccagaatggttttctgatgccctgcagaaaaaggatgagacaaattgacaactctgcatctcttaggttggtgcaaaagtaattgtgctttttgctattaaaagtaatggcaagaaggctgggtgcggtggctcactcctgttatcccagcactttggaaggctgaggcgggccgatcacttgaggtcagcagttcaagaccagcctagccaacatggtgaaaccccatctctactaaaaatacaaagattagccgggtgtggtggtgcacacttgtaatctcagctactcgggaggctgaggcaggagaatcgcttgaacccaggagacagagtttacattgagccgagattgccccactgtactccagcctgggtgacagagtgagactctgtctcaaaaagcaaaaaacaaggcagggtacagtggctcatgcttgtaatcctagcactttaggaggccaaggtgggtggatcacttgaagtcaggagttcaagaccagcctggccaacatggtgaaaccccatctctactaaaaacacacataaaaaattagccgggcatgatggcatgcgcttatattcccaactacttgggaggctgaggcaggagaattgcttgaacccaggaggcagaggttgcagtgagccaagatcgcaccactgcactccagcctgggcgacagagtgagacgctgtctgaaaacaaaaaccgaaaaacaaaaaacacacaaacaaaaaaagtaacgtcaagaaccgcaactgctttcgcaccaacctaatacctacaagaatgcctattgggtggtccatgctgggcactgtaatttctctcattctgaaatgaagacacctgggcatatgaaataaatgtccttaccaaaattgttcctaggacactgtcaagagcctgagttacattttgtttgactcctgatacttatctaaatgctaagcttccctgggggaagaaattcagagatatatgcaaacatagtctaaggggatgggaaatgccatcacacatattaccccaaatttatagcagttttatataggatgtcagtaaaggaaatgagaaaggcaacctaaacccttcaaaactatcttggcttcatcctgctgggaaaagctgaacaggcttcacttgataatatgtccatttgtgtatgctaatttccaaggctttgaaagctaatacaaaatctttttcataaaaggaggtgtatgagaatgtttgcatgattgatggaattcagttatatcagactccagaacaaggactgccaacattaatggatcattggatcgttctagacactgatgcactgcttgaaggagacaggcagataaattactgggaataaaatttcccagtaattttaatgactgttccttctttcagttaattcaagtcaatccaatgcagcaggttgtagttaaacacctattgtgtgttcatcaaagaattgtacaaaatggtccctttctttaaatacctttttgaacagtttagtacgaaagtccatgtcttgactgaggtagcctaggaaaaagatcccacatattcatttgaaaaaaaaaaatcaattgcaattgaataccccttagctctacttcccttcagttatccccagaccagatggctggagtgacccaggtttacagctgagaacatggccccccaattccaacttaccttctccgtgtccactctggaagcttaggctgtagtgctggcaaagttgtaactgccaatgagtaagaaagagccaacctcagcttctttaatctctccccaaatgggcggaagaaccgtaggctctcactgaggttcctgcagtatctataaaaagaaccggaaggacagaaagacacacctattccagtttcacagcaacttttctacagagatttccttggtgagaataattctttttcattctactgctgaccagaggcaccttggccttaggga

SEQ ID NO: 916264 - DNA, 4001 bp, Homo sapiens
cacctgaggtcaggagttcgagaccagcctggccaacaaggcaaaaccccatctctactaaaaatacaaaaatgagctgggcttggtggccagtgcctgtaatcccagctactcgggaggctgaggcaggagaattgcttgaatctgggaggcagaggctgcagtgagctgagatcatgccattgcactccagcctgggcaacaagagcgaaactccatctcaaaaaaagtggcatttgggccatgaaggatctgcccagtgaagggatccatgctgtttttggggagtgagttcttgctctggtaggactggtttagttacctggcgagtgggttgctataaagcaagatcacccatgttttgtctcttttgcgtgtgcctactcaccactcttgcaggcgttcctgccatgagatgccatccatcatgtcagaacgcagcatgaggccctcacctgatgcggccacccagtcttgaacttcccagcctccagaaccatgagctaaataaacctcttttctttataattacccagtatcaggtattctgttatggtaacagaaaatggactaagatagctagcacgggctgctggtaagtgggaaggaggtaggggcttaggggcaaagatggtggaggggggattgattcatacagtttcaggctgcccttcctggaacctggggactctagatctgctcaatccagggatctcctgctgaagcataatttccttgttagaggaagtaacatattgctttgggaggcagaggcaagaggaggatcgcttgagcccaggagttcaaggttatagtgagttatgattacgccactgcactctagcctgggtgacagactgaggccctgtctcttaaaaaaaaaaaaagtttctaattttttaaaagggagtaacatcggttcctcagcactgggcccattttggggcaggattggcctgatccccaatatcaaacagacttaatggaatgttgcttcttccctggctcctgcccatgctgactgccagggttgctgggaggaatcagagcagcagcagcatcatccaccattaattaggccctggcagtgtgcccagggaatccccttgccgcactgtgatgtttggatgcattattaccctcattttgtagatggggctgtgcaagatcacacagtacatggcaaatttgcctagatccaaagcccagattctatccattcttctttctggccttctcaaagaaggaaaaggaagaggaattgatttcaggagagattgctcaccccctttgcttgggagtaaggtcatatccccttcccagacctgggtgtcctgggctcaggccccacctggtgtgagcccagccagctgggcagggctagactcatgaactcggcagacaaaggtcaccatttccacacgctgctcctcccggtggtgaaggccataagtctgtaatggacaaggggaccctcagcccagggttgggacaagtccgttcatccctcaggctggtcatccaacccccctgacccctgtgtgcagcttctcccacctggatctcaaagccgaaggtctggttatcctccttctccaacgtcagcactttcctgcaagagacacaggggtcaagacaattaggattaaaaggtgtagaagtcccatagcttgggcctccctggatattggcaactggtctagaacattccagcaggactctgtctccagtgacagctcagtctcatcacagattattggaatgtctttcccatacccaattgaaatcagcctcatggagccacagagaaccaatccagcctctagtggtgggagggaagcacagagaagggccggtcccctgaaggatgagccggctgagttttttagccccatcccagctttccagtgagccctacagtaccacttactgactagctaaggcccgaaattcagccacagcctggagcctcctctgttccacagctttggagagaggactggccccacccccagaggccagtcacgaggctcagcaagaccacagctgctcctcccagctatgctggggccagcccaccagatgtgggggctgggggaggggagcctcgaggccgccccttcccgcactgaaggcctgcccgctggacacaatggtctggagctgctccagatcctcgcctgctgggggagcccagagtttcctctgcccactcccacccccttccttcccgcccagccagaggcacagttaaagcagcctccaaaggccccttcaagtagctcagcctcggaaaggccctggagaccaggcttctccgcttccagcctgacccagagattcccccaaatgctgagcagcacctccccactccagctcgagcccctctcactctgaacagcaggcctttcccctctctgtactattggggcagggagcagggtggctgggagttccgcgtctaccccaatgttctagggttttttggaagggtcagcaaactttttctgcaaagggccaaatggtaaatactttaggctttctttgcaggccccttatgatctctgtcatatattgttatttgtttttatttttacaactctttaaaaattattagctcaagggccaaacaggccaatctggctagcaggtcagtttgctgatccattttagagaaagtcaagcccaaatcagggatgggacatgagtagagaagggaaactgtggggtcccagggcctggagtcagcacctacttctgcccacgctcagatccctcctaagagggctgccacaggctgggaccagaagaggactgacattctggaggcaggggcagccagccccaagcagctggacacagcctggctaaggtctgggcccgtggggtttgccaaggctaggagggctcaggggagcccaggaggcctgggttaggacgttccccatagactttgcctacaccccctcccaactcccacatccgttcatccagatctccccagggaggggtaactggcagggactgggggtgtgttgaagagcacctaatgactcaaaagtccctacctcctttctctgccacccccttcacacagccctcacccccacctgccctcactcccagcgggggagccatgtttaaaggctaggagaatgactaccctcgctaggctgagatgctgtcctggcaccccccaacccagcacctcacccctttggaccatggcaggggctgggtgttggtgactcaccgctgctgttcaggactctggctgagattcttccagcggaatcctgagccctgggcagtaagatggtcagaaggagcaggtaaggcgggactgtccttgagcagacactgagaggttaccctggacacagcgacccacttcctgtctgccccttcccagctccacatccacacctgttttggtgctggtggaactatttgccaagtgccactactggcaccactcctcaactttctctacaggccttaccttcatacctgggactgcagggacacaaccatcctcctgggttccagatccatgaacctctaagcccttgctggtttccacactggcagcaggtggggagatcattattctaaaatggtctccacccctagggcccatgtctgtagaggctcaggccatccagactcccaaagctgaggcaggggctcttccccagtgggattcagaggataggtgtcccctgggctcacctatcaaggtgctccgaggaccttctgccagttgggtctctccatctaatttctcagctacagacagtggcttgggagggctggggtcagggaccctgtcccgaagggctggcaatcccagccagaatgtggggtcagaggtgccaggtctcctaaggtacaggccgtttcaaggaccagttgtggatcccagctgcaggtgaccagctgtgcccagctatacctgggtctctctctccattgccatatattttgtgctttctgggaca

SEQ ID NO: 916265 - DNA, 4001 bp, Homo sapiens
agatccatgaacctctaagcccttgctggtttccacactggcagcaggtggggagatcattattctaaaatggtctccacccctagggcccatgtctgtagaggctcaggccatccagactcccaaagctgaggcaggggctcttccccagtgggattcagaggataggtgtcccctgggctcacctatcaaggtgctccgaggaccttctgccagttgggtctctccatctaatttctcagctacagacagtggcttgggagggctggggtcagggaccctgtcccgaagggctggcaatcccagccagaatgtggggtcagaggtgccaggtctcctaaggtacaggccgtttcaaggaccagttgtggatcccagctgcaggtgaccagctgtgcccagctatacctgggtctctctctccattgccatatattttgtgctttctgggacaaaacatcttagatgtcaaacttgtcagcaagtctcactaaaggaccgagactgggagttctttaggggtggtggtggggggtgtggaggaaggatgagagatgaaggttcctgtctcttcagggtccttgataaactaaagtagtctctcaccctccctaactttttggtcctgggaggaggtccagtcccagagcagcccttttctttggagcctgcacagcccagggcctttctgttctgtgcctttgctaaccctcccccaaagctgcccaaggcaaggaagagaaggttcagaaccagattggcctcaggggtggggacagttcccaaacggccagggaggaaggactgggcagcacagagagacccctttgtctttcaacatgattttcataaaatgcaaattctcaacaagctgttcattgtgtgggggctagctgggggccggggcgaaggagggcggctgggtgaggaaaggccaccaggcccctcttcttaacctggtgttgtgtaggttctgagcctcaggtctcctggggccagaggaagaggctggcagaggggactcagaggtgggcgcggcccgcatccttcctgccccgcgggcgccctgcgacccctcccactgcgtccggttccgacagaagtccagggagcagtggccctcgcgccccgtacgtcagacgtggggccaggcggcaggcccccagcccaggaatcggggagtcccctcggaagggtgtgctatccggagtcagcggctccccacgcacttcctcagagtgagaacgcacgcggcgcagccaccggcccgcttctcccaccgggggctctcggaccttcaacttgcctggggctgtctctgtccctcgggcgaggggctcctggggacccaggacacctggccacggggaggcggggcatggggggcagaaagccagatggagcgggtaggagaaggggggtgctgggaggagtcaaggagggagagagggggcgtgcatggggcgcggagttaagagccaccgagcctgggcgcggtgtgcaggcgagggccacggccttcgcagcagcggggaacgcggggagtcgaggcacccagcgggccggggaagaaggtgggggactccgcggacgccgaggagagggcactgcggagtcagcaggccctgtagggagtcggagaggggctgagcagatcctgaaggcgggcgggggacgcacctttcggcggggcagggtgcccccggacacggcgagcgcgcggtacagctcggcagggtgatagtcctccagcgccgcgtacagctcgtccgctgggggcccaggggtggcggctgcggcagggggtcccggggtcgggaccggagcggcgggcgcgacttccgagtcgggagtccgggcggcggggtccggggtggccgccgcctcctccttctgctgcagcttcctgagtcggcggagggtcatggctccggcgccggacgcccctcagagacggcgctggctcccctcggcggggctggcggcggctgggggatgccagccgggcgggccgcgggtcgcctccctttataggctccgagagcggggcggggttgggggcgggcggggagctgcctcgggtggcctcgcccccagcacggaggaccctccccgcgaggcgccgccgccctggagccccgcccacggcgctcgacggccggggaaactgcgggagctgggcgctcagtgggggaaaacgagccgcggacgcgaaggggcgggatgaggcccccggggcggggctcggggctcggggctgcgtgatacctggaggggtctgtgaagggacattgcgcaaggtttgaaatttagggacgaatagctctggcgattcatggagtggggcacggtaagaggtcactgtaagaagcctggggagtcggggaggtagggagagtcacggagatccaaggggctgcaggagactccagggcagggagagcggcagcggggctgcgcaggagtaggggtggaggcccgatggaggagggaggagactccctgaactcactgcgcagaagcccccagggagggagagggcccaggattttcccttgacgcagctgccccagaagagctgaaagaggctgccccctgttcgcacgtctaggaagaagggaagaggtggaaaccctgaaagcagtaggcttagttctggcctgtcccctccaaggggcttgagtgatccctgctggcaacacctttcctcagctcctgatgccggggtcagatcccccttcccaggagacagacgcttactgtggacttgactcaggaggttgggatgagcccaggctgagtgggagttcagggctggggggatggccatgctcagccgttctctgaccccatcttagggaccatcccccaggctgttaccatggctgccaggcggtaggagaggcgggaatggcccagccgaagtctctgtcgtcagtggtgcccgaataagaagtgagaggaggaagtggaaggcagcgtctggtgtctaaagagcggctagccaccacagggcgtcagcagcacaggctggggactccatgtcccaacacccatcggccaagaagcagaggcggcaatgcggtgcccttgtctgtcccctccctcctcccccagtcttcccaaatctgttatgccttcacagttaacatttattgagcacttagcatgtgctatgcacactgtttgttctgtgtgtccttttacatacatgcattaactcacttggtcttcataacaaccctacgaaataagcaccattatcctcccttacagatgaggaaactgaggcccagagaagataagtaatttgccctaagtcactcagcggcagagctgagattcaaagccaggcagcctggttccagagcctgcaatctaaccactctgtgatgttgtccaacatttaagccctgctgtgtgccaggtactggctgggcactggggttacagaggctcttggcctggtagggagtggtaccttgcacatgtgctgtgttagacacgtggcataaggagcacagaggggcaatggccacgtccacctgcgaggccaggaaagactttctgcctcctgcctgtctcagttcttgcgcctggctcagtcttcttctctagtctccttgactctgtgttctcctccccacccccagtcctctaggcccccatcccctacaagaggtgtgggtggaagagggtgcttttccgcccctcagtgattgcacaagtccagatggcaggatgcttgttgggtggggggccggggtggattgaggactgccaggagctaagaggtagctctcttagtgccttcttctccctcctcccacctcccgccttggcaccaccaagtggccatcagctgaggggccgagggggtgtcagtggggaaacatgggactctattgtgaagcattagcacagatggaccccaggaccgtctgttgcctgctcctgacagacagcatctgtggggggtgggagggggagacgcaaagcgg

SEQ ID NO: 916266 - DNA, 4001 bp, Homo sapiens
agagtactggtgttgtggcactggggatgcaaaaggggccctgtgccccatcaatgccctcctctccttgtccatctgtatgtatgaaagcattgcacatggagctgcctttctcacccatacctcttttctattttgaagtcaaattaagagttcatcctcctacttggagtggaagcagatggagaatgagttcaggtgtctctaaggtgagcacacaccagataacctcagtcatttgtagacgtggtgagaacatggttcaaagtgggatcccaccctctcactctgattacaccatggttacaaagtagcatttcagcagtaaaactcaaaagaatgaaacctagagaagggggatagtgaatttggattacatctatcctttctggacaatgaagaactatcatctactgtcatgttgagcgacaaagatctttcacctcttccccacatccctttggtattttggattatcaaagaattgttgttttaaaatgccagaaaaaaaaattgtgtgtgtgttggggtggtggtaatacttttaggaaaaataatgatgctaatgattctgctacatgtttttggagatctttatcccaacctgatccctgcatttagacgccttcagagttcagggacatatggtcagtggagcaaggaaaggagcagcccactcaccatcatggccctccaacccatgaatgatctgattctctcaagagttgtcttggattgcatgagtgactagctgaagagtcattagctaagtcttttccatttctcctgctatttctcttctcaagtacattaaaatactgcctaatcacatttcacatattgtaaaaattgatgaaagggaaaatgttaaagtattaattccatttttgagggtacaagactaatacatgcaaacagcacatctctttgtttaacacaaagactcacgtgtcgaattctgcaccccttccacatgcacagcattttagaactctgcaagatagccattttgcaagagtgtagaagtaacagtttgcttggaggatgtgtgggtataaatagatatgtagacagaaggagaaatttacagctcaaaaataatagcacaggaaaaaatacaaattaaaagcagaatattgacagaattcctcctttccgagcttaagatttaagtcgtttaacctgcagcatccttcaattccaggtgttctgagaccagcccgatccccacctagacctacccctctgcaataggcctcccgggatctctgggccccttgtcaaccctttagacagcaagtggatttcagggcaacaatcacagtaatctcaatcattatttttatctgttttaaagggcatagaaaggatgcctagaaaggtaaagacaggagacagggagagaggcatgaaggtgacaaggggaataaagccaacctgaaaaaaaaaaaaaaaaaggatttctagattcccataaaaatcggagctttagttctgggtgaataaaatgctatttaactggaaaatcacacaggtctcctggctggctatgtctatagatatagatacattcccctgatgccatccaacatcttttgtgcctgcatacatccacccccactgccccccaaaagcccaaaacctgttagatgagagaagaaaaagaaaaaacatgggagatttccttctttgtaataagccttttttcccaaaacagcattattttcatatcttgtgaccttttcttccaaaaagatccacttgagggactcgaagagatagataaaatgaggaatccctaccccaggtgaggaaaaaataaaatagaatttgccctaccttggtttgtagaagccaaacctctagacggacagattaagggagtgagcatgttgggaatgtccagtcccttcttctcgcttgcatatccacataagaaagacgaaggataaatgaacggaagataatttaaaatccaatttagcgtaaattttgttttaatcttgtgtcttgaagagatgcaaattcaaaaaaaaaaagatttaattcaaaggtaattcagggtatggagagcagctcacaatgcagaatccagagtaattattccgtgtgcatgtgaggttagtggctggaatagatttttaacgcttcttctggcaattacggtttttggtttttggagcgttagtggaggaggctctgtgtggagaagctgggggccggctccgtccctcggtggagcatggtcattcccaaagcgtccccttcctaagggggaaaaagaggcggtcagggcttgattcgcgtgtcccccggagggtgagaaaaatgcattccgaaaaagatatcaattcgttttaaggaaaggggggaggaaaccccgcatttcccacagagtgcacacgagaggaattgaaaacagctggtaccggtctataaataattcagaaaaggtctggctataccattcctgggacaggcacggatgagaggtgggaaagccaacctgaatggaagaggagagagggagggagcgagcgaaggagggaagtgggaaggaaggaggaagggggggagaagcggcaccatacagcaacacacactcacacacacgcagaaacacaattcccacttaactcgccagcgagtgcggcccccagccccatctgcattgctgctgacttgtctcgctcgctctccccatcgcctccagcagcagcgccgcctcccaccccgggcttgtgctgaatgggttctgattgtgcacggggtgcacactgggcatttcttggaaggggcacactgacgcgcgcacacacgcccccgacgcgcacgcgccccgcgcgcactcacactcacccccgcgcacactcacccccgcgcacactcacgctgccgccgcgctgaggtgcagcgcacggggcttcacctgcaacgtgtcgattggacggatgggctcggcgcgtgggtccggcccggggcgccgctgccctgcccctctgctaggtgaagggatgaaaccccccaaaagaccagagacagccctacccagtcacagcaccccctcccccacaaaaaaaaaaaacctttaaaaaagccacgtccaaattagcaagtgccgggttctgctggatttcagagctttacctcatgccagattcgttcacgatttcacggcttcgaccctttatctgcctgacacccccaaacccctacattcaaaggagagactccaaagcccatctttacgtaccggctccgagcgcctccgcggttgcagtctgcggagaggggtggccggtggctgggaatggagggttttcctttcctgcaaagcaggattaatgatccgtctcgggggttttgaagttcatgactcttctttgcaaggcaaaaggatatgcattcggacgccagcactactggatggtggtgatcaagaatcacccttgacgagcactctcgatagagcgaagccccgagatttcctagaggtgaagaagccggaggaagtggtttttgaaagggggtggggggaaccttcctttctcaaaaagaggtggggggtggagaggcaggagcccagattccagttggtgaggatcggagccgggggaagggaagcgggcgggggcaggctgtgcaagtcaaccgcgcggcagccggagagggagagcaggaggggaggaggggagcgtcagaaaaatgggtattaatcaccggggacggggggaggcgcggggaacgcaggttgcctggtctggatttgggtctcacactcaaaaacgtgccgcgcacacacacacagacacacacacaccccctacctcgcacaccctgactccggggggaggagaaacccacgaagctggggaagatactgcttctgctcccaggggcgggtgtgagcgcgcgtgtcctctttctccacaccccccaccccaccccacccccaagcccctgcaccccctcactcctcttgctaagactctggcggaggc

SEQ ID NO: 916267 - DNA, 4001 bp, Homo sapiens
gcagttatcaatactttcctcaattatctagatttttagcgactatcttagtaaacacttaaatctcctttcaatgcaggagatcaatgcttccataaaattcagaaaactgagaaagttaaaaatatttgtaagaactataaattgcttgggttcactctcttccttgtatgtagtacttataaaagaactgatacagatgaatagaaaatactgattgtttcatgtttatgatgtaagaagaccatcaacttctcaacatcaagataagtaaatgccaaaatcaggtcagaaaagaacttttcagaataagggcctgcctttaaaagtctcagccaaaaccgtaacagaaaggatagtctcttagtcatgatttataaacagaaattgtacgtctgtaccaattgtagaggataaagtcaaaacagaatttacagcctcctgctaatagcctaatttaaaatgtataatcttccctacatttcccccaaagtaccttttaaaggactcactctgctatccaaacaacttgcaaatgcattcggtaagttggtctacagtatttattctctttcctgttattgactcaagatctatttctcatgatttgctttgtgctcattcttctgccagataaaatattaattgcatttttagctgcactgctggtgatcaaagaattctgatatgtcaagctaaactgacagaaatagcatccattaacatatttataggttcagagcttctagaacataattatatccattaattactcaacagtactctatattacaggctgaaaaagaaaggcatttgcaactaaatacttttactcagaatgaagtttttttttaaataataaattttctctaaggaaggttctatctaaaggaaataaggcaagagagctcacatatctatatggacacaaggcaggatttttaaggcatccatttactaactttgcaatagaatgctcacaaagtaaacgagatggcacatccagaatggtttcaaataaaataataccttaaatattacagagaaatttaattactattttagagttctaagagtgacaatctgaagctggtaattcttgatgataagattccgagcaatgatttttactttcaaataaacttctagtattacataggaccaaagcatttggaattacatacttttctgaacatgcaattctaacacataaagaaattaaagctgtccagggaaaaagctcttaagatgttggaaagtcatagaacaaacaattattctgtggatccaccagctgtgcgagtcctgaatctgccagctgcatttagtatatgtatcatagaaaggacagtaacacacacttgactccttttggccagttaatcagcatgcaaaatgacggtttcccacaataacttcagcaccggacccaaacacattctcttttcagcaaagaatgaagtcattaaaaaaaaaatcacacaagctgctttcataatttcagcacgaacacaaccgagatgtaaggacagaaagcaaagccgagtctacctgtacatatgtatctatacatatttcactgagttctttgttgcctgacaataaattgcaaaggcagtcatatttgaaagtaaaaaccattaaactgtgtttataggatactgcaacagactcgctgagggaataacaaggaaagcacgatacctttagtaagtcgcctcagaatttgacaacggcatttaaaagagacagctatcattcttgctcactgctttctgtggcaaagtgtactcaaggctctctgctctggtggctgcagcagcagcagcatatgaattccttgcgcacataccaggagaaaggtagtcccagtggggagtgacaaagcttaattcctcttggctgatgcagaggtccgctacatgtcatctggcaaatctgtgtcattcactactactaccacccctgcctgccacagcctcctcccccttcacaatcacaatggcttagaaagtaatgccgtttcgatagcaacaaagcaccaaattgtacaaagcagggacgacactgtgtgaggagccattccataaatctaacgctaagcactgaacagtgcattctgtttaaggcaaaaggcgatgtatccagtcagttcagccaccatcagcccctttccttctcagcatcaagtcagtgtcctttatatgtctcatttaatgggaaatgcaagtgaaatgcttacactcttactttaggaagaaatgcatgggtcatgtactatgttctttaaacaacaaccaaaaaaaaaaaaaaaaaaaaggaaagaaaaagagggagggccgtttatatttgggattgaggaaagaatcacagttctgcctatagcggggaagcagctctaggacagagacctctttggtacttcctgaacctatgagagttaaggcagtgtctgtttatagagggaatacaagaaagggttagggctaggcagacaatcaggcagatggagtcccagcccctttaatcacccttccaaaaaaggacttggctggaaagcaacacagtcaagactgtttctaaagataccagaaataaaggcaaacaaggccaagtatttctatttttaatatactttattatactatttcccaaacaaccatcccccaaaccattcttctcattatgcaaataaaacggtcttgcgacatagcagatatttgtgagtatctgctccaatggagtgaagagcaaattaacaaacccttcacaatccattcacaaagtgataagaaggcggagcacacctcctcatctgccagcagcagcctgctcgccatatagtcaatacgaactaacatttggtagggaattttaatcaaaatccagaattctcccacaggagttaacataaacattcaggacaaaaaattagacagttggccaggaagtttaagaaaaaaaaaatcaattagtcaaaatgaaaagatatatcactgtctaaactacttgattaatatttctaggactttatgaattattcatacagttttattctctactcttcaggctgtgaaaaaactttcaagctggtttttaaaataacttccaacattccaaatttagtggtaaaactttcttttcttcattcataaattcaatatgaactcaaacaatttcaatccactgctattgaaatgcatatgctttgtattttgagtccaatagaaaaataatttgtgtgtgaaaaacatctgaatatcataagcatctactttaaaggtttttgaaaagaacagaattcttttaccaaggatggtctagctaaagcaaccactaatcaatagaaaatactatattaaatggactgcagtgcaaaatcaaatttttataattgttctgattagcataaatctttctttgaatttcaacccatattatgttcatctctattaggttatccctagaaatagtttagcctccttgatatttttttgctttaaatagaaatataccttagtactagagaactgagttactagctaaagtgagataaatacttacagttagctctttccaagattcttctccaaatctaacatatttcctaaaatccaggcactcagaatacgcagctgtcaattactattagtagaatcttgcctgtggaacaccaccaccccagcccagtctattcaaatacaactcaaaaccatacaggaatctcttgccttctgctattttgcagactcaaatccaatttgctttttccttatgactaaaatgatcaaatattttccccttttcctaatatgcttattttttttgttttgttttaaaagctctatcctctggtcccaagaaaggtcttcagaactactaaaatgtcctatttctttggcaggggaaataacccatcatggagctctttgaaaggtttctgagagcccaaactaggggattgttttttctctctttgaatactgtggctgccaatccat

SEQ ID NO: 916268 - DNA, 4001 bp, Homo sapiens
gagctgctggagtccaaagtcaggcatttccctgcctctgcccggtaaagctatgggtcccaggctcccgttctaagggaaggggatgtctgcgtctcattgggaagaccccagggcgggacttcaccacccagacccctcagcagatccgagttctatttacgacccaatgcacgactgcactgaggattttggccaagttacttaacctcccagagggttaaatttaccctcaggggtaaatgagggcaaagagttgtccttcttagttctgtgaaaatcgaaaacaggtagaagaagagtgcctctaagcagaaacgaaggggaagtgcacctgtgctaccagcagacaccttgctagacccttcagacatcttccttaatcctcacaaccagcctgaaagggacgtggcatccccattctacaagtgagggttccgattcggagggtttgacttgctcaaggccacaaagctagtaaatggtaaagtcaacactggcaatctttgaggactgttcgcctgactcatcaccaggctgccactcagtaaaagccaaggcacagtcacctttaacaaaatgtacagattgcaggccagatttatgggacctcctgcagattgaggcaatggattaagtgtactttatacttctcaggtacatattagcaaccagacgctcccatattccctctgtgtctctcctggaaaaccactgataaagaacaataataaaatttattctaagccatgactggctttttctgtcatgttcacatccacttctttgtcatctattcacttggggctgcttctgaattagggaagctgcctgaacccacactccgatggctcttcagaaccaccagctcagctctgcagtcccagaagtgcctcttaagttatcctgttctttcctttgagatcctaacttccagctggtcaacaacataccacattgctccctgtgttggagtgtatgtacgtgtgtgtgtgtttgtgtatgtgctagtttgctggctaattgcaagcttcatttttctctcctgagaaaggcaagatatctgagaatgaacaccatttgtttttttaagtaatccttagagctgaaagttgggaggctggtcgtttctgaatgtaggtcaaatgctaaacaagccgcaacttctctgcagagtgtgagagtcttcctggtctggaaggatccctgaagattctgctggattctctgagacgagaaagagcttgactgtgtgttgtccttcccagttccagatcagagctgccttccagcaggaccttggggatgccccactgttctctggcatagagcttgatgtctgctctttcagctcactggggtgacacacagctctattgttgccaccgctactgggcctttaccaggctccagattttggcaacgggaataatgcagatgaaaggaaaaaaggagaggcatagggagccctgggaacagaaaggagaaggaagatgatgagacaagggaagaagaaatggaagttttaatgaaggaagatgaaaaggtaataggccaaggtatggacataccagttttatctatgaaaactgggctgagtgacacattttcattccattttgtagaaccctatagtgcatttccaagctctttactgtgaccatgtgaaatacatgaaattgatgagttagtgtaacctgtgttacaaatccagcagtaaagatatgtgtatgagatgttcatgagatttcaaaatcactgtacctacctcctgggtgaggcaaacattttgagtcagttgagagggatcgctcattcactcttgcagcgggaaggcagagaagtttcagtttatcttctgttctgtctcaatcagttgggtagaatgagtgtttagcgtgaggatgaatcaggtcccctcttgccagcagaggggtaaggtggtgtgtggtggattggagaggatgtcctgagggccagacaccagccagggcggggttgggtgacccgtggggtttattctgtgatgtcacaacggcagtcaggggtctccctgttgctccctcagcctcctcccataaggattggggggggtcatgctgggtacctaccagtggctggatgtcttctgaggtcgtccagatcagtgcttatcttattgtgcataagattcacctggggaacttagtcaagtgcagatcctgacttagtcaagtgcagagtctgggatggctctcacgtgagtccagccagaccacactgagttgtgagactctagaccagtgctgtcaaagcaaaatgcaatgtgggcagcatatgtcatttaaaattttctggtagccacattaaaaaaagtaaattggacacacatactgtgatacagcaatcatatgttatacaatactatgtttaaaatgtagccctccccacacaataaagttgggtttaatgaaaaatattttatactactttcattttaaaattaaaatttagtgaattcaaattacataaaattagaaattcagttgctcagttgcactatccatatcataagggctccacagccacacatggcaagtagctactgtattggatggcacaactcaaggccattccctgaaaaggtaacaatgtacagaaattaccattctaaagggctagtatctggaaacccagcaaacattcactaacatcattttaatgaatacataattagtgtttggggactgttaatatggaggcataactctcggagactggaagagggcctcatccaggattccagctaacagtctggatggggccctctgccctgtgaaacctgtcacactcagtcctcctctgagcttttgccagggttcccctcactgggatcccttccttctccttgctgccctgcctaaatcttacacaacctcagggcacatgattccagtctcactaccttgtggctctagccctccttactccccatttcctctttgctcatacagcatgcctgctttgcttttggtgtgttagtctgtttctctcgtgaaattctaagctgcttgaggacagaatctggttttttacttctatcgtgcttaatatagtgccaagggcatagtagctgctcaagaaatatttattattttatttaatgacctaaactacctaaggaagtatctaagagagaacatcggatctcgaagtgccaataacttccccaatggaacaacatgccttatttttggcacatcttaaattgatcaagatgtccgttataagttaatttataaatttaatacaaataaccatgagtattttaaaagaccaacacaagttgatattaaagtttatatgggaaaaaaatacacaagactagctaggaaaaccctgaaaaggaagagctctgaggtggtgctagccctaattgatataaagcatactacaaagcctctatgattaaaacaacatggcacatgtatacatatgtaacaaacccgcacgttgtgcacatgtacgctagaacttaaagtatattaaaaaaaacaaaaaaaccaaaaaaaaacaatgtggtactggtgcatgactagacaaacaggccaatggaagagaacagaaagtctagagataaacacagctatgtatagacttccagtataggacaaaggtgatatctgtaatcactggggcacagatgatttttttaagaaatgttgttgggataaactagatagccatttagaaaaatataaattatatttatttaaaaatcatatacaagaataaactctagatggactagagatctgaattttaaaaatgagattatggccggatgcttaatcccagcacgtcaggaggccgaggcaggaggataacttgagcccaggagttcaagaccagcctgggcaacacagtgaaaccttattgctacgaaaagtacaaaaattagctgggcgaggttgtgagcgcttgtagtcccagctacttgggagaccgaggtgggaggattg

SEQ ID NO: 916269 - DNA, 4001 bp, Homo sapiens
gcccctactctccatgtcattttcagcctaagagaagaggaggcaagctaaaatatgactggtattagacggccaactttgctgagtggtggcttggagccagatttaattggacttagagaagtaatttggcaagtctctcactttgtgttagagcagtttatacagttatattaatgcacatggaacagaaaagaagcccatggttagttgctgacagacgcttcttaaagtaaaccttcttgagctttccaggggatccttcatatcagaattaatcacacttaaatctgcttatcttaagagccataaataaaaccatagctaaatggacaggtccataaatttccctcccttatcacacccagcttactgtttctacatttaagagagaactttacctgagaaatgaaacaatttgttcttcagaatttccagggactaagacagtgcatatcacaaaatgcttattatttatggcaataagaaatacacaaagatcatatgtatgtaaaaccaatatgtaaaacatgataaagacaacttctgaaaagcaatctgctaatatgattttacttttaaaggcactcaacaaattaactctgccaagaattgtcagttcttgcaagactctgggtgaccttgactaaggacaaaaaatccgcagcatctgggaggaggaaagattttctgttggtagacactgaagtcgcgtgttgcccagttcccctttcctaaaatgttttcatcttggttttagttatgaaaatcctatgggttttagtcatcattctcttactgtgagtcatcctttctaataattcttacattgcttgaataagaaatggacttccaggtaaaacatcttcactaactatttggtgtaaagactgacctaaagacttaggcaattctaacttttgtgacctcagcattcatttttcaacaatcattttcattctggtttggaaatttgtctattatcacatcagattttaaccccacactcaatccatttcaagttatacttgcaagatttttactccacattcaatccacttcaagttatatatatttgcaagttattctcggggttattcagaaataagaaagaataacgaaccccatactaagatacacccactttgtggcaccaaggtgacaaccaatttaaggaagaggcaatttgagaaacaaagaataaaaaagagcttggactgaagctcaaagaggttccttccagaaggagtgtccaccagggagagacacaaggaacctcattcaaaaatcatcttcttgatatcgaatgatcatctcattcaagaattttcaagaattatctccaacacctatagtaccatgccctttgtcacatactttactcctttccccaaacatgccttttcctgctagggtcgggatacctcttgaattggaagaacaaatctaattttgcaatggtttccataaagtgatcctgaagaagtaatggccataagaacaactctatctttgtgtatgcaacagatcccatgccaaggtgactctttactcgctagaaaagggacagagtggtttctctaacacttgggcccttagatcattaggaagtgcgtaggcgccaatgtataatcagtaacccttacatcagcatatattaacagagtaacccagaattagcataggctaggaaggacaacagatcgatgaggcaggtgcacttcttaaaagagccaggtacaaaatagctgtagactgcatcctttgagcaataggaggggaagccggttaccttggccatggtcagcgtcttgcagcttgtctggaagaaccgaaggatgccatctgcactccaagtccctttggtttaatgttgcaagaatgcaaactgtcttcctaccctcctccctctcctcctacccctccccttctatctcatattctttggagtgcctcatgattaaatgctgccttacagggaacacgggcatttaataattgacaaggcaatcagggcccagctgttctgggagattacaccagagagcttgccaatggggatctgggattaagcacaaagaagcaaggacctgcaatttgcagaggaaattttctttaaaaagtaaatgatggtttagtttccactgcctgccattccctaggtaactggtgtgaatggattgggcttggatttatgacagacgaagatatggcaggtcaccatcactgcagaagtttaccttccctcgagtagggtttcctatccctttgaagaaactctattctctgcaatgtcggggcctcatggagccatgaacaggaaatagcttccttgttccatgggtggtctccaccttccagttagaacattagaataagtactattgccgggcgtggtggatcacgcctgtaatcccagcactttgggaggcctaggtgggcggatcacaaggtcaggagattgagaccatcctggctaacatgctgaaatcccgtctctactaaaaacacaaaaaaattagccgggcctggtggcgggtgcctgtagtcccagctactcgggaggctgaggcaggagaatggtgtgaacctggaaggcagagcttgcagtgagccgagactgcgccactgcactccagcctgggtgacagagtgagactctgtctcaaaaaaaaaaaaaaaaaaaagaataagtactattaagtatctccctctacacatggaatgctgagtgagaatgttggctggggatgtggcaaagatgcagatagaataggattggagataaatgaattccaggatctggaatgccatggctatttaccattcctctcccaaccttcaggcaaaggaatgacaatattttatatttcaaaaaagagtttctaaaatgctgaaaaagtaatctaagaaaccagtaaggggtcgtttgcatatgttcttgccaccagtcagccagaagtacaagttgttctttctctcctcaaaattgtacaaatagctgggcgcgatggttcatgcctgcaatcccagcactttgggaggctgaggcaggtggatcacttgaggtcaggagttcgagaccagcttggtcaacatagtgacaccctgtctctacttaaaaatacaaaaaaattagccaggcattgtggcaggcacctgtaatcccaactacttgggaggctgagcaggagaatctcttgaacctgggagatggaggttgcagtgagccgagattgtgccactgcactccaacctgggccacagaacgagactccatctttaaaaaaaaaaagtgcaaattaattgggacaccaatgttgaaagagattctgccgctgtttgtgagtccctaaaccctgcatggactttcatcctccaagcctttgctgatgctcttccttctgcctggactgccttcaatctctttttacctggtgaattgcctgcctttcaacgaaattagtctaaaaagtcatccactctttgaaaatgtttcttttctccctaggacagacagctccctcctcatgatccttgtcacactatatcttgcaacacttattttttttttttaattttaatagagacagggtctcactatgttgtccaggctggtctcgaactcctgggctcaagcaatcctcccaccttggcctcccaaagtgctgggattacaggcgtgagccactgcacccggccttctcacaacactttctgtattccattataactactgcatttgtctgaaatgtaacttcctcaaaggtctcactttcattttagagcagtcgttctcagttctgatgaactgagttcagaacaatctttggaagtttggaaaatatgccgattcctggacccaccctgagatttcatagtagttctgggtgaggcccaggaattggtaattttagaaagttcttaatatatacccagggaattcatgtaaaatggcacctgttcaactcattttgggcttacatttaataaaaccctct

SEQ ID NO: 916270 - DNA, 4001 bp, Homo sapiens
ctaggataaaataatgtgtgtaaatcagaactggtgtagtggctcacgcctgtaatcccaacactttgggaggtcgaggcaggaagattgcttcagcccaggagtttgagaccagcctgggcaaaacagtgagaccttatctctaccttttttttttttttttttttgcgacggagacttgctctgtcgcccaagctggagtgcagtggcacgatcttggctcactgcaacctctgcctcctgggttcaagcaattttcctgcctcagcctcctgagtagctgggattataggtgtgcgccaccttgtccggttaatttttttgtattttgagcagagacggggtttcaccatgttggccaggctggtctcgaactcccgacctcaagtgatccacccaccttggccttccaaaatgctgggattacaggcgtgagccactgtgcccagccactttttttcttttttaatagaaaaacaaaacaaaaaaatgtgtaaatcacacaacaaagcacctaggacagaagcacttaatacaactgtgtctgccagacagaaaaagcgttgcctgtaaagaaaggtgtgcatctatacacatgcaatgaccctgtgaatttccttctttagttcgctacctcatttgtagacaggagcaatgccaggcctgcctccctcacagggttgtggtatggtttcacatcaattaagagaggatggacaattattacagttcctgaaaggactcccctatctctattcttgctccccacagtccattttccacacaacagccacagtgatcttttaaaattgcaaaccagatcataacactttctggcttaaaactctacaatgtctttgtattgcacctaaaaataaaggccaacttctctatcacggccaataaggccctgcatgacctgaaactggctggttctctgatctcatccctctagcctccttttaaatcttcaagacatctgactctgtatgtggtagtttaatgtatgaatgagtctccccaccatcctctacccgcaagctctccatttctcccttctcagtgtaacttggtggctcaatctgccacagggcccatgcacttaaagtgcacttcccccagaacttcacataatcattcaagtcggtttcaatatcctgcacttttcctaggcccctatctaaaacagctcctcctcaatcctagtcacaatgtactattgtaactaggaccgtactgttacatcatcttcatagctcttttcatcctttgaaaaataatttattttttaattttttattgacgaggtcatgccctgtcggccatgctgggtgcagtactgccataatagctcactgaagcctcgaattcctgggctcaagtgattctcccgcctcagcctcccgcgtagctgggaccacagacacgcgctaccacgcccggctaatatttcattttttttgtagagatggggtctggctgtgttgcccaggcaggtctcgaactcccggcttcaagcgattctccctcctcggcctcccaaagtgctgggattacaggcctaatccaccggggtgcgacccggccgaaattatttttatttattgtcatctgtttcacccagtagactgtaacctccactaaggcccctgtctgtcacgatctctgctaaaatccagaaaataatgcctgtacacaggaggcgatccaaaactatttactgaatgaatgactgaatgccttggctactcctctaaagaccaaacggattctatccagcccaaaagacacattccatctggccagtcgtagccggaccgagacagccgagccccggagtcgaagtcccgccctgcagggtcctcaccgtctgaaaccatggctgtcccagcacctcagcgcagagcaagtggtggtcaggggagcgtctcaaatcctgcgcagcccaacgtccggcgccgccaagtgacgcacgaggtgctgtgactcgtgccagccccctaatctgcggaagtggagtgcggggagtgcgccggaagaggggtacggaagtgcgccggaagtggggtgcggaggtgtgcagcgcgctgtcagactggctcgcaggcggcgcggccggcggacccgttcgagacagcgcgggcggctcgggtcccctggggctccgcagcaggaggacgccatggacgacaagggtaaatcaagacaggccagggctgctaggctacagcagcgccgttcaggggtccccccaacctctcacatccaggctgagctcccgaagagatttcttttgaatttcaggctgctccgctggttgtgtttccagagtcacaactaaatccctcgcgctgctcttgttttcagggatgcgccctggcagtatctgcaggcatccctcccacacatacgctccttcccagtgccagtctccttcctgccttgttggatctgtcattaaaattagaatgaataaggcatatttgatgtgctcatctagtatggttattaagtgaaaaacaagggcaaactaatacacttttcatgtaaagaaataaaggggagtgggtggaactccatgtataatatttgtaacatatatgtgtatgtgaatagacatgtattagcatagactgtctggaggggtgcaggagaaattggcaagatggttgactctgggatcctctcagattttaggaccaaagaggctgaagagagaatgacttttcatcatcatttactcgggcttaatttttaggccttgcacaccagtagcttttttttttttttttttgagacggagtctcgctctgtcacccaggctggagtgcagtggcgcagtctcggctcactgcaagctccgcctcccgggttcacgccattctcctgcctcagcctcccaagtagctgggactacaggcgcccgccactacgcccggctaattttttgtatttttagtagagacggggtttcaccgttttagccgggatggtctcgatctcctgacctcgtgatccgcccgcctcggactcccaaagtgctgggattacaggcgtgagccaccgcgcccggccaccagtagctttttcaaaataaaaaagagctcttgcaaacagcaaagtggtattttctctattcccatcaacatttattgcatccctgaaaccaaataccctaaaaagaaagtattttttaaattgtttgcttcttaaagtcaacagtcattaacaagctctcttgccttataggctgctaaatgaattaggtgaatcacttttttccctttttccagagttaattgaatactttaagtctcagatgaaagaagatcctgacatggcctcagcagtggctgccatccggacgttgctggagttcttgaagagagataaaggtatatagagagtcatctgttaacactctgggacttaggatagtcttttttttcttttctttttttttttttttaaagagacggagcctcactctgtcacccaggctggagtgcagtggcgagatcttggctcactgcaacctccgcctcctgggttcaagcaattctcctgccttggcctcctgagtagctgggattataggtgtgcaccaccttgtccggctaatttttttgtattttagagacagggtttcaccatgttacccaggctggtctcgaactcctgagcttaggcaatctgcccgctttggcctcccaaagtgctaggattacaggtgtgagccactgtgcccggccgtttgttttttttgagacagagttttgctcttgtctcccaggctggagtgcaatggcacaatctcggctcactgcaacctctgcctctcaagttcaagcgattctcctgcctcagccttctgagtagctgggattacaggcatgcaccaccacgcctggcaaaatttttttttttttttttgagacggagtctcgctctgtcacccgggctggagtgcagtggtgccatcttggctcactgcaggctcc

SEQ ID NO: 916271 - DNA, 4001 bp, Homo sapiens
tcactgtttagcatctattagggtttgacactattaatataatagtgattataatataaatatccatataatatttaacattagagggggcaagtcaagaccacaagaatactgtcatttaaacttatgcatgagggctgggcgtggtcgctcacacctgtaatcctagcactctgggaggctgaggcaggaggatcacttgaagccaggagtttgagactagcctggcaacaaagcaagactacgtctctacaaaaaacaaaacaacccccccccaaaaacaaacaaacaaacaaacaaaaaaacaaacttagccaggcatgggggctcatgcctgtagtcccagctactcaggaggcaaaggcaggcagatcacttaagtccaggagctatgaggttcgtgccattgcacttggcctggacaatggagtgagatcctgtctttaaaaaaacaaaaaaccccttatacataaacacagaaataatgttctattataaagctttcctcctgggttcttaaaaatacagataggcaggttaccagtcttgttcctctctaggacctggaaatgctggaagtctttgacagacagtatacactcaacccttccaatatgcttggaaacactagttcaccattttcatgacttttcttaaacatgatcaggaagggccacactaacattgtccctttttctagtgaggtttcacctcctctcatcccaatcttcagtgctaaagtggcaatactttaagcttctccaattaatactcattccctctatgcactaagggaaaacctctcaatgttaggactcaagaactgtccatattatggataacagagtcacaagagaacaaatctgtaacaggaatgtgaaacattaaaagagaaatggtttcacagtttgaatccttttctattagaaatctcttctattgagcactgagactaaatacatttattattgtgggaaaaacctgaatttatataaaaccatccccatacgaaacttctgaaaattgtctgtctctagagcatgctctcctttggcccctcacacaattctacactcctcaccacccctccccccattctgtgacataagcagcgttagaacctatgataggaaatacaagtgatcagctagaactctagtttttttgctactgagcccatttgttaatgacaatcattagtgaatttgtcttaaaaatatttttcatatttatgtttggatcaagaaatccccaccgtctttttgtatatatttcacttatacatagttacttcatactttttcattaaaaataagagttttggaaggaagaaccaagtatgtttcttgattttaagtgatgagcaccagattcagcagcttgtaggaagccaacctattcttcccggacaaaaggacgaattacagtacactaggggcactggaattcacagtaccatcacttagccgtgtctgttttaagtatcttccgcatcaaactgttaacgggattctttaccttttccctactactagatcacggtgaaatagacaagctacgccggaagcaatcaagtttagggtatggatgtagtcggcggctactggttaaacgcttaacagaattccggccttagtaaaagaatcatttttcttcctttaaacaacaacaacaacaacaaaatcacagtagacttaatcaatgagactaaataagagaaagtgggggaggtggttaacttaaaaaaaacatagaaaaggcgccaaggaggccctcgagtgggcaatgcagcgaaacaggttggtagccaaaatagctgcattgagagcccacaaggctgaaggctaccagcagaaaagcgaaatgaggatattagaaggtgaaggtatcccggtacgcaaaataggaattgcttagaggcgccccggggtgcctttccttacctcggtggacacacaccttcctcacagtcaccttcctcccacgcaagccccagcaacggccacttccggcgcctaacgttgggaggtggggcgaggggccggcacttcctgtgactgggagtctcggttctggctgagtgtggggcagggtggatcagctgtggagttcacctgtgagcccctagggtcagctccctgatgaccctttcccacgaggatctcctccttgggcaccccatctttggggccatcctcccctggcccccagaacaacagtggccttgagagggtagaactcgcatttctttccctgggttttgtggcggccatcttagaaaaggcagatgagcacttagaaatgggcacctgcgattacctcaggagttcaagaccagcctggccaacatggtgaaacctcgtctctactaaaaatacaaaaattagctgggtgtggtggcgggcgcctgtaatcccagctacttgggaggctgaggcaggagaattgcttgaacccgggaggcggaggctgcagtgagccgagattgcaccactgcactccagcctgggcggcagagtgagactccgtctcaggaaaaaaaaaaaaaaaaaaaaaaaaatggcgcctgagggaatgggactgatggaactggttagaggtggggagctgcctagaaagaagccttgtttgtggaagttgtctagatagaaaggtaatttagattttgagggaagagaagaggaattataaaggagatacgcagtgcagccacaaaacaatcaccaaggacaggaattttgtgtctggctgttcttgtttagaatgtgttgtaaaatcccaaaattcaaaaggcactaactatctgagaatgcttggtaggatgatggttgttgctgcctgatgaaagcgagttttagagttggggagagagctcaatgaagagttggagaggacaagaaggccggaaggttacaacttgttaagggaaaaccaaacgtagtgtgaggctttgttctggggaaaaaaagtgtaagctgcagttcttgtccccagagtgcttagaaaaacgactcccaaagtggatgaaaggtttaatagcagtacaaaaaatgccaaaaaaagtggtagagactgtaaattcctgtaaggaaaaaaattaatggggcctgaaatgacctgggaaggcattatagagaaaagggacttgtagcctttgaaggttagacaaaaaaaggaaggtgttgacactacaagtagatctggtggtaatatttttcaaaaccaagaagtaaaagatatgacaaaacattctgtgctgttcaagatgtaggaggcagtctgggtgattagtctgggcagtgaaatattgggatttctacagcatttcagtggtgtagagcccaaataggacttgagaggactaccctgacaaaaactgaatgtagctttagtaaaaaggatcagtggggcattttctttttcttcttttttttttttgagatggagtctcgctctgtcgcccatgcaggagagcagtggcatgatctcggctcactgcaacctccgcctcctgggttcaagtgattctcctgcctcagcctcctgagaagctggaactacaggcaggcactaccacacccagcttttttttttttttttttaagtagagacgggggtttcaccatgttggccaggctggtctcaaactcctgacctcaggtgatctgcctgcctcggcctcccaaagtgctgagattacaggtgtgatccactgcgccgggcaagggatgttttcgttttacatgattaatttgtgagcgtttattgttgttactccctccgcaccccctccccccgacctttttttcctactagaagagagtttgctccacagccatcagttcagattaagacactaaaaagaaccaagtgttgatggaagccaggctcaagccattgtaggctagtggttcttaatcttgtctacaccttagaatcatcaggggagcttttaagacataccatgccaacttcccatcccacaccaattaatgtgaaag

SEQ ID NO: 916272 - DNA, 4001 bp, Homo sapiens
ttgtaccacactgcctcggtaaataaggggacttcactaaataacctccttgttccattatggctctagatcaaatccgttcacttatgtgtgaatctagtttcagaattggagagatgttgtgtgtgcacagaagtaacttattattcatatctgaacagctgccctacttccacagaattttaaatagagaaaattaagacataccatccttaaaaccacaaataaccattaagatgcattaaatactcattgactcaataagtctatttctggtaatctaatctcagggaatgcagaaaatgaaaatgttcattgaagtattatgaaaatagtaatgagaaatttaaaacaaatgaaatatcctacatcagagaattattttatatatatcttatcatatatatcccccaaattaggtaatttatatccagtggatataatacatactggatattataatatctggcggatattatatatcaattcacatgatgactagaaaggccatgacgctctaggaaagtcacttgtgcaataatgtgaagtgaaccagaaggatccaaaactgtttctatgccatagtgatcaccaaccacgttcttaaaaacaggaagctaagaagcacatgaaaacagactggaaacatccaggtggctgggaatcatggctgctttttttccccctttattttacacatttcatgtaatgttataaaatttatttttataactaaaaggtacaatgaagaactgcaacaatgaatttgattgcaaatgttttatattaactatgtctagtaatcacagccacaggaaatgtaaagagtgaacagaccaccccctctctactaaaaatacaaaaaattagccaggcatggtggtgggcacctgtagtcccagctactcggggggctgaggcaggagaatggcgtgaacctgggaggcagagcttgcagtgagccgagatcgtgccactgcactccagcctgggtgacagagtgagactccatctcaaaaaaaaaaaaaaaaaaaagagtgaacaggccagagacaaatgtctttctctggataaaaggcccagagaaagatttggtgtctatgtgaaattgactgtcttaattcatcttcttgattagtatccctgtgaaatcttaggtctagaccaaatcttacctctgagtacagaaggaaacataatgccttcctggaaccgggcaataaactgagtttatttttatttattttctttttgaagagatggagtcttgctatgttgcccaggctggtcttgaactcccgggctcagtgtccctccttccttggcctcctaaattgctgagattacagacgtgagccaccacatctggcctaaacccagttttaactgggacgtttcactgccgtgaacactttacatttcctgagtcagggctagtcccagagcaaggtgaagtgtgagtgagcacagcataatagggttcaaattcttctctctaaggagctactgtcatgaaatagaaaggggtttagggacagtccttagagaaagttgtgtgatcaaagaacacaaggtctttgcttagcaacattttgtccccagaggtagtaacagagtggaggaagattctattaacattttcttaccagcattttgcagacgtcctctcactatttccagcccctcattcaccgcatcttccaagtttttcaggggctctgcaaaggctgagttgcccatcatcaggacgctgatttcatagctgccattgtggcagttctgactcacctgggaactaaaggacagccacccgggctggaagagcagtgaccacaaagccaagtccaacagcaacgtcttcatgaccccaatcacgttagaaccatactccttgtgcccacttgctttgctctgttgggctcctagggaggcagggaatccagatggacagcctctagtggagtccctcagcccactcttccccacgcttctctctggtcatgcccaactggtcacatgggccgtggaacacagcctgcttgccagtaattagcagctacgttatggcaggagataaaccaaagttcactttgtgtttgcacccagaaaggtcagagctataaacagagagattagctgggcctcacccaataaaaatgcaataatttgtgatgcatcactgggaagagggaaaagagaaagagggcaatacatcatatatgtaacaaactttgtgaagtggaaaataaaggtcaaagggctttaggaaaacacagctacaattgactattagtgcttaagttttagctgcacattgaaacgaaatccttaactttatatatatatataaagtatatatatatatatatataaagtgtatatatatatatatatatatatatataaagtgtatatatatatatatatatatatatatataaagtgtatatatatatatatatatatatatatatataaagtgtatatatatatatactttaagttctgggatacatgtgcagaacgtgcaggtttgttacgtaggtatgcacatgccatggtggtttgctgcacccatcaacccgccatctacgttaggcatttctcctaatgctatccctcccctagccccccaccccccaacaggccctggtgtatgattttcccctccctgtgtccatgtgttctcattgttcaactcccacttacaagtgagaacatgcggtatttggttttctgttcttgtgttagtttgctgagaatgatggtttccagcttcatccatgtccctgcaaaggacatgcactcatcctttttatggctgcatagtattctatggtgtatatgtgccacattttctttatccagtctattattgatgggcatttgggttggttccaagtctttactattgtgaacagtgctgcaataaacatatgtgtgcatgtgtctttatagtagagtgatttataatcctttgggtatatacccagtgataggattgctgggtcaaatggtatttctggttttagatccttgaggaattgccacactgtctttcacaatagttggactaatttacactcccaccaacagggtagaagcgtttctatttctccacatcctctccagcatctgttgtttcctgacttttttaatgattgccattctaactggcatgagatggtatctcattgtgattttgatttgcgtttctctaatgaccagtgatgatgagctttttttcatgtttcttggctgcgtaaatgtcttcttttgagaattgtctgttcatatcctttgcccacttcttgatggggttatttgttttcttcttgtaaatttgattaagttctttgtagattctgaatattagccctttgccagatggatagattgcaaaagttttctcccattctgtaggttaagcagcaactacttattaagatttgactatgtgttgagcattggcaaggcactgaagatatagccatgaacaacatagatacattaatgtcctcatggaacatgcattctaatgggagaaggcaaacattaaataattatgtttattttctatttttattttttaattttaatatttttttaatttttatttaattttttttttgagatggagtcttgctctgtcgcccaggctggagtgcagtggcgcaatctcggctcactgcaagctccacctcctgggttcacgccattctcctgccttagcctcccaagtagctgggactacaggcgcccgccaccacgcctggctaattttgtttttgtatttttagtagagatggggtttcaccatgttagcctggatggtctcgatctcctgaccttgtgatccgcccacctcagcctctcaaagtgctgggattacaggtgtgagccaccgcgcctggcattaattttaatttttaagggtatgtagtagttgtatatttttatgggataaacaaatatatgaataactaaattcagcaatgaaa

SEQ ID NO: 916273 - DNA, 4001 bp, Homo sapiens
tatagttctaacttagatgtacgcctcatttaaaataaagagtaatgctactcaaaggacctaaaaaagtacagtatttcggttgactcaatcctgacacataaaacttaacgtttcagtaatgattatattggatgtttattaaaactgaggctattttcgaaaatttcaaataattttattaaaattagctggtcaagcaaacaaaatttgtaaatttctgtcacaaaataaaatatctaagaccaaggcactaaaaatgtgatgttaacatcagtctaatttcattcaatatttaattaaaatgttgcttccttacaattctaccccatataaaaataattccttttccataattgcaaatgcttcacaataacatactaggccataaacagtttagcttcaacctgtcatttttcacgagctcattcaagtcttcagtgactgctttctcccaggacagacaactgagggtcctgatgtaggaattaccctgactgtaatcaaatctcagggtaaaaacatgacaagtccgctttccacgctgctcctctgcccaaactttcccctttcattctgggaatgaccatcgactctcaaaatgatgttaaacaacagcccacaactgatctatactccctcttccgacaaaccctatacttctctatatcaaagcagcatttgccaagtcttggtagggagcacttcaggtcattcccagagagatgcccatacataaggtggaagtgtccatgttgcaaggcagtgcaaacgctcagatttcaagcattcataatgcgttgacagaaacattttttttctatttaaatctcatgttgattcccactctggcagtgattacgtcctaagtcattacgtcgctttttaaataccaatttgtcaagaaaggtaactccatcccatccaacaacagacttgagcacgccaagtatcgctcatttttcttaatttgctctaagtttcttaataaactgagtgtttccaaaagaaaatttcacaacccgcacaaatgccatttccaaatttaactaaccatggctaatacttagaagtgtaagcgttaacacaggaaaatcagcatgagggacaaaatacacacacatatacactcacacacacacacacaatccttaaacactgaactagggcgccagcctcatgtttaaatatctcaacttgaactccactgaaacaagaggaaattctcactagccaggcagcagtaaggcttttgtggacacctcttattttcaaagaaccctctttttaaaaagttgaaaattaatttctaactgctttaaagggcgcatgactgggtcaaaagataaacacagaaagtgtaggacactctcaggcgggagcagcgcaggtttagccccggccggaggggaaggagggaaatgagtgaggggtcagagacaggaggaaagacgcgggagacgcggcacccaccggcgagcagcccgggctaggccgagcccgcgcccagcgccccgcgcccgccgcgtcccccacaccgggaactgcccgtacctgtccgacacgccgggatgcgctgcggggcccgcgacgccggcgcctctcacggcgccgcgtccgccgcccgcgagccaggaagccaccgcggcctgcggcttcccgccaccgccgcccgttccttcttccagggacacggcgagctggctgaaagcgtaaaggagcgagcagaagccgcaggccacacacagcaccacgacgcgcaggtagcgccgcatcgccccggccgcgctcctccttcgccgccgccgccgcgcccgccccgacgaactggagcggagggaggggcaccgcgcagccgcgggcgcaacaagttcctcacccgcagccgccgccgccgccttgcgcccgctcccttccttccctccccgcccaccacctaggcgagcgcagtcgcggctccggagccgaaggactacccgcccggaagcctggacaccgcctctgccgccgcgcgctcaagggtcagcggcagcgacgcaaccccgcccctcccccgggcgggagggctggacgcgccggcgcagttcgcgtgggagggacgcagggctggcgcgcagagggtggtgtgagtgcgcggaacgcggcgcgcctgagggctatagctagcgcaggccgacgcgcaggtgaatgggagccctgtgggtctcgaccgccgagagagggggagcgaaagcctcagggctctggaggcagttgacctaaattctaattatggtccttccacatggtagtttgtgacattgggcaacctaaattctctgagcatgtttcttcgtccctaaaatggagctactatcctcatcatggggtggttgtaaagattaaactgtttaacgctcgaaaaccgcctaacacttagaagacacttgactaggccagtttcctctccatcctcccccagcctctaagtttctgtgatactataatgtgcacgagccattttcaccccgataagctcattgcttcgtgtgtttggtatgcggaccttacctcttgcctcccagcagacagtgagttcctgtaaggcagggctcttccctttgacctttttgacctccctcacaactcattattttcatgtgcaaaacaattagtattctctccacagagcttctttcttccccagttcttctccctcttcttctgtgtttccactacgttcattcattgaccatttataaagcatcacttgtgccaagctctgtgtgagtacctaggggtataaagaggcctaagtggagcgtgggtgggacagcggatacttgtaaataagcgcaacgcagtgataacagacttaagatccaggcctgtaagggtgtgggcatacacacaaaggaacaatcagttctatctgtgagtatggtcaagagagacttcatagcaaaggtggcgctagagtcttgagtcgggtaagggaagtaattccaggctgaaggatcaataaacaggctcttgtgtagggaactgttgagaagtttgataccaccagctaagtgaatgcaagagagggtatgatgagcgataagcgcgtagaaggggccagatatttgagtgctttgtttagcacaccaaggagtttgaatttaatctgcaagacattagtgaaccattgaagggtttttaaatagggaagtaacatgatcacaattgcattttagagagcagattctggctgtagtgtggaggctgaaacagagagaggagagattggaggcagaaagcagcaccagtgccaaaaagtgagggaagggatacttaaaaatacacacacacacgaacacacattcatggggaaaaatcatgcgtttaactgctgaaattgcatctggggcgttgaaaagtttggccatgagatacaaggtggggaaatgctgcgcaaaatagtagcagtctccatttggatccttggctccctataccaaaaaagtagtggttctgtgaccatgataaagtcactaaacaaatttaaggttcaacttcctccccttcttgctttacctgataaaaaatgaacattagcatgctatcaagatgtgtaaagagaatgagaacatacatttatgcattcaataaacatttattgaacatattctacatgccagacaaggggctctgatgcagagtattcagaaataaaaggagtgtactgctctcaaagggaaaacaggcaaatagaaaccacaagtatactaaattaatacttccactacaccttacacttcttagagaaatgaagataaacttaacgaagtatccagaatgataggaaaagcattgataagaatgaaaataccttttgagagaaagctgaaagatatggtaccaagaaactagagtaagagctagtactcaaaaaatgtttaatttaaaagatactaactataactcttctctatttcaacaaagaaactaaacgtagtaataattaagaataactcctt

SEQ ID NO: 916274 - DNA, 4001 bp, Homo sapiens
taaatgatgagaaaagaggaaagcagaaggggctctgctcaggtgcaggaacttgtgcagagatcttctggactgattcccagtgctaacaagtcccttccagttttatccaccaataagctatgtccttgagctcctgcccactctctagagaaaacttttatttcaaggcatactccgggattcacatgtgatagagatggttctgttcccaggaactttgggcatatttaaaaactggactggaaaaatttgtgactagaaaaaggacattaaaaacacatgctcatttcaggataaagatctctgaggaaaagaatacaaaataatttaaaaagaaacaacagaaacaggtacacataaaatacttcacttctctgtaataaggtttctgtcctcctagattctttctcactaaactacagagaataagaccgtgctttgttctcttatatgcattctgtccacttctacataggcaaaattgacttttaattttgattttatgaatgcatacacacgagaactttgaacagttagtataaggtgaattctgatttttcagaatgcatgccatatataatgcatttaattttgagattatgctggctctgattagccaaaagaaggaagtaatatatcacattctggttattatttcagatcctttagattactgtaatagacatgaaatagtaaacacaaaatgaaaaataaatgtgttatatatcacaacacatgacataatttcagatcgtttaaatcacacaagtcatcactgccatttacccagcaatcagttggcttgattcttcaagatcttgaggaactcagccttcaaaaccatgactttttctttgctaatgttccttcaatagtcttgacacttttaaactagagagtataaacccacaaggaattgttttataattttacagatgtctttattttcaaaatcatttacattgtggttctctaccttgccttctcttacccagcacagatgaggttatacctcactcgcaaattgttttatcaatttgattttctttattttataattcctacataagcatagcattgaagaaaaaaattactttcattctgaaaggagcacagtattttgccttttgagaagctcctgaattaaaacattaattccaagctaattgtgaatatgaaacattcttaagcatttcatataattactaacagaatgtagagttgaggtttccaactggttctaatcacatatacatcttcctaaaataaaatgtttaattatactattttgctgagaaaaattttaaaacaaaaaatgtaaatattaactttttatttctatgttgtcataatatggattttaaattttaatttaaatgcacattccatggcaatggctaatattttcaactttctccctcttcaacacatacacaagtctgtattcatagcctgttgtaatagacaaggttaaatgtagcctaaatatatattccgtttaaatgctttcctcactcactagcaattggttatcactagagagttatctgtgaaatcttactctacattcctcagtcacctagtgaaggtgtactgatccaccttcaggagcagtacaaacctttattggtcacttcccaagcaacttcaaagagcagtaactcctccacaggaagttcttcgacttcccactggggaagcccacccagggatgttacagagagggatcggcctcgaagcattcttcttacagtcctccgagactcctttgaattcctgtttcaattagttgtaatcccaggagaagagaacttacaggcacaaaagttagagttggtagagttaccaggctttggtagcttctcttgggaataaactagtagcatgaaatcttatgtgcttcccacagaattcctggtggaaggaggaattcttcctcctctttctcgtctttctgggcaggtattgtgaggacggtatctgccctgtcagtatctacccaaacaatccagagctgtcaacagaaaaaccctctgattcaggacataggtaagcacttcctgggataggcagggcatgacccaagttcagccttttagcccttgtccttttgaccagactcctagattcatacagttaccaatgcttatttcatcatttccaaagtgatacaatattggcaactcccctcattaagtttgcaggcctccttagattacatgtagactgattgggacatatttttatgctttaaatccctttggatttcctaaatattcttctttcttttgattcctatttctagagcttttaaaaaatattcctagttattttattctacacttacaaattgaattttggtgatagccagagatcttgagcccccttttctcaattacttttcttaaaactttccctataaaaaagcataaatttgagtatgtctttgggtgtaacatgaaaaaaaacataattttgactggtcaataatcatcagtcaataattttaatgaggtagtaaaaataaatctttgtcatgtttgtacatttccttcaaatattatcaaattgataaagaataattcagtcaatgtaaatgttcaaacatgggaagaaaaatcatcaggatcagactgcagataaatggcatatgtttgcttttcccttgtgtttctatgtttgtaaatatatatgttccaatttatttacacacccatacacatatatcctatattgtacctacagagagttggtgcattcacaagcaagcttaattttgagccatctttacagatgtagctaaaatcaatatttttacattattattctctaaagcagcagaactgaagctcatacaaaatatcctttaagttagaattacaatcagaattgtaatttgttacttgataatactattttagcaccttttattaggttttaaattattttctatatacttggtcttatagacttacacttattttaatgactcaagatgggcagaaccacatttcattatattacattaataaatctatgtaagccaaatagattaaatatgtcagcttgatgtggtagtacacacctgttgttccagctactcaggaggctgagggggatgaatcacttgagcccaggagtttaaggccaacctgaacaaccactctcttaaaaaataaaataaaataaaaaattaattaaaacaaaaataaataaatgtcatctatgattttgtgacacagttgattcttatctttgtccagaaaagtacatttaagtacatagtttgttatccatttgtttgcgttgtgagaaaaagattatatggctaataaaaaaaatcaagtactaaaatagaaaacatatgatcccaaatgatcaaaatgattgtctcctttataaaatggtttgcttatgttcacataacctctgagagtcctgcaagtgcacattccagtaaaaccaaatctaaggacatgttgacaggagtgagaatgggatgacagtgatagagtttcacgtttgcagttttctgttccaggagccttgagattggttcatccagtgtcacacaggctacaggagcacaatgatccatattctccagcttacatgataaggctgaattatttatttgcaatctgttccaggtatcaactgcttagttgtgagttaggcacttgtggcatcacttatctgctgtgtaaacttgagccaatttcttacctaagtttttgttttcttgataaaatggggatgagataatctatataagtcacttaacattgtgcctggtactatgccaaccactttagtaatcttagccttttttataacacatatgatggtttagtaaaagctttccctaatggcagaggttaccattgaaaaggaaaggggtaaaaagaaggctttacttttctttcatttttttgaagttgtaccacctgtatatattacctgatcaaatgcctagagaaaacatttttttcagaaaa

SEQ ID NO: 916275 - DNA, 4001 bp, Homo sapiens
tgatgtttaagtccccttttcattttactgacatttaaatcacctagaaatcatcttagctcaatcccaacattttactgagaagaaaaccaagaccatgaatggttaagaaataactcagcaaaggtcagactagcagaactttgactagaatcttggtcttactacatagtggtccagcagttttctgctatagcacattaccactccatcgggaattaattatacacatatttaactctcagtgatgagtacctatcctatgccaggccctatgctggatgctttcatacacttatttaactgaggattgacataagaatatcttttaaattaaaataggttatcaattcaaggcaaaaactacaaactcattataatcaattttgggaggactttgtcctaaaaggaatttcaggtaagaacactttgaatcagtgggaccactcaacttaaagactgtctactcttttcccaacatgccttcctccccagaactcaatttggatttgctagagtatctaacaatacttcaacacttgttaagctgctggttttcctctgttttctctccttctaaaagacatttctctgagttctgcagcaggaacagaatctcagctaatttactgtcttcactgaacgttaccaccacccaccccttcccttccaggtgcggcaaagaggaaacagacacaaggtggtctagaggtccatttcatttcaatgagtgtgacagccgctcttcttggggcctatgggggaaaggcattggtccgtggtgggagtgaagctgctcccacaagatgcattcccaactggatcaggaagaccttcagatttaggggaggtctttgtggaagtctttagtggagtcttcccctgcccgctagatgtccggtcggttttagcccgcgttggctactggatggtccgctgtgcgggcttcttgggctcctgcttctcttccctgggcttggagcttcgcctcttgtccttccctgacctcggcgtggtgtcttccttcacggcctgtcctcgcccctcgtctgccgctgtcgctcccgcttcctccttggctctggcacacggcggctccttggctctcggccttgccctcctggtcctcctcgccctggcattggccttggctttcgccctcgcgttccgtctccacacttctctggccttcctggccgccttgcgaaggggctggcggcgcctccgggagctccggggcgcggctggggtcctccagggagcgcgcgtgccctcctcttgcctcgcgcgtcccggctttctcctgggcttgggaaccttccagaccctgaagtagccggcggcgtcgctgccgctgacccggaggagcgtggccttggcctgccccctgggcgcttcgtggcggccgctcttcctgcgcacttcgtagccggcgtttcggagctccttcttgagagctgccagagtcagccctttgtgagtggagatggcctggagcaccaactgggacactctgagcacggagcttgagcagcccctcgatggtcccccgacagttttttccgctggcagctgagtggctgagtgtcctcgggattcgccactgggcccaggcgcctcagccatggccccactcccgcctctgcggggccaccggctttgggcctcaccagtcaaggcctgttccatagctgaggtagactgggccacgtcacaaaggcaggcctggcagagattttcaggtcctaattatggggctggcatatctcacccggggaggggcccttttcacttataataaccaatcaaatgccacttccttctaggtctaaaccaatccaagtcttcagcgcctgtccacccccaacagtcacctacctatagagtctccagggttttgttcccaaatcaaacttactgatctcgatctccaccgctttctttagtcggctattttgtgtgtgtatgtggtcctgcaaaccatctacccacagttccttaaggtgagcgaagctgctcccaactatccaaaacaagcaacacactgcctgtagaaagtacacggggtagtccatgaaacacaacccagattagaaactcccacctttaattccaccagtcaggtatctgaagtcatgtctccctaattctacacagtggattctgtgcaagagcatgaagtaaaaaaggaaccaattgtgtgatccctctaccctaaacactgattcccacacctgggaaatttagatgacgcattcaactgtactgaaacaatctagatttcacatcgcctgaggatactggtctaatcattattctttgaacatactgtgtttttttccatctcatcccctctcttggatttctcatcctctttgtctgcccagataagtcctgctcatctttcaaggtactgctacattatccttcttcactgaagactccccaaactctttcaaatgatttcttgcctcttaactaccacaaccaccaaaattacttctgcaatcttatatggctttttctttattttaaatgaatttggcattagagggtataatgtgacacaatattttttaaaaagaaaaaaactcgtacttggagctggaagatatggatgcatatcctagctctttaggagccatatgacattaacaaatcccttaatatcagtggtgtggctgtcagatggatgtgccggccatctgacttcttatctaacatcacattcccttcctaccaacatcacagaattattgcaaaatttcagaagaggtagatgaacaagggctacctaaatataaggaataaatttactttactttgaatgtttctgtcttgtatttccaactaaataaagatatcctcaagagctatagtctttgaacttctatgtcccatgctgcacctaacaatatgcttcattatacacagcgggcatttaattgagcctgcttacatcattcctctctggtgaggagagtttctctagattcagaaagaaacttccagaagatcaggagaaaggagcagagtgaatttcaaagggttggaaatgaagggggccaagtaaggattagcttatcaaggacctattttggacacagtttagttgggaataatttaaagtattattctaagaatacttcaaattgccaagcatatcatacttttccagagggcaatcacatacattcatcagtcacaggctagacagtgacagtttcttttaaaaatcaaagctccaggaagtagcttagaccagtgctttttttttttttttttgagacagagtcttgctcagcccaggctatgtaatggcacaatcttggctcactgtaacctccacctcctgggttcaagcaattcctgtgtctcaccctcccaagaagctgggattacaagcatgtgccaccacatccagctaattttttttttttttttttgagacaaagtctcactctgttgcccaggctggagtgcagtggtgcaatctcggctcactgcaacctccgcctcctgggttcaagtgattctcgtgcctcagcctcccaagtagctaggattacaggttcctgctaccatgcccagctaatcttagtatttttagtggagatggggtttcaccaggctggttggccaagctggtctcagactcctgacctcaggtgatccacccaccttggcctcccaaagtgctgggattacaggcgtgagccactgcgcctggcccttatttatttatatattggtagagacgaggttttgccatgttggccaggctggtctcgaactcctggcctcaagcaatccacccacctcagcctcacaaactgctgggattataggcatgagccactgcgcccagccagaccagtgcttcttaaacttcaatgtgcatatttaataccctgggatactcataaagtgcaattcataggtctgaagatagggctagaggttttaccttctaagaagcttccaggtagttctatctggtt

SEQ ID NO: 916276 - DNA, 4001 bp, Homo sapiens
ggaaccaataaaaataaagtgagctccgagagagtggaaatctggttggcctcattcacagctctactcctatcactttgtacagagcctggcatagacagctgttcaataaatactggggacaaaataaagtccatgtgggaaaatgggccagccgctaccaaggatgaagacatacaatatatacatatatttttggggaagacttcaattccgactcacaggaaagatgaatccaaagatgtgaaatctgtactgggatcttttttgtggggtctgtgagccaggatgaaatttgctgaggatgaaataaataggagtgtcaattaagggcagaagatgattactagtgttaacttttcaatgtggattcctggtctgaaatgtgtttccccctgcacttacatatttggtcctatctttccttacatgtttattaaagcaatattgtgccattaggcaatgcaactcccaaagacattactggaatgaggtcattgcttcaggctagtgggagaatataagagagttcaaacaggttatttgttgggtaagaacccctaaaagcaagaggtttttgttttgtttgaaagcaaagtcaaaccgattctcaaagtgaatatgatatgatgaagacaggatcattatgaagctagaaacttgacaacatcactttaaaagctcaagcatatgtaacccacgactaaaggcgctgcaatgttatgcaatatgactgtcaggggaacgaatttccaacctcatgactcacttattgaacgtttccttcattaaaaaaaaaatatgaacataaaagtgctatataaagatatctgatatccaaagcatgaaagcacagcagctactaggctaggaagaatctcaagttgacatcgtgccatcagagccacccttccaagacggaaagttactccactttttgaaaaatatggccgcagacacttcctgccccgagctcagctcgatccgacggtatcttcccagaacttggtcctgagtgctcacaaactggcaggagagcgaaggctctgtgaaagggaagtaaaaataattccgaaggaggcctcaccgcaccgactctgcctcccctttgccctactgacagcgaggtggcttccaccctgcccacctccaggccaccctcccctgacgcctcgagggtgacctgcggactaaagccgtccagagtggctcaagcccacccaccagtgcctgctccaggggtttcccggtcgcccccctcccctggggccatccgacatgtccccgcgactacacagctctctcgaccaaacgattttcaccaactttattggctcccgccgggaccctcgccgcccacctccccgctagatgtcaccggccctccatgacatccagcacattcaaaagcattgcgggacgaccatgaaaagggcctttgctgggggagccagctccctgagggcggcgtcagggtcatttgctcttcgtcttctgactctccgtcttcttgggcagcagcacggcctggatgttgggcaggacgccgccctgagcgatggtcactttgcccagcagcttgtttaactcctcgtcgttgcggatggcgagctgcaggtggcggggaattatcctggtcttcttgttgtcacgcgcggcgttgccagccagctccaggatctccgccgtaaggtactccaacaccgccgccaggtacaccggcgccccggcgcccactcgctccgcgtagttccctttgcgcagcagtctgtgcactcggcccaccgggaactgcaggcccgcgcgggaggagcgggatttggcctttgctcgcactttgccgccctgtttcccgcgaccggacatgatcacctctcgcctacaactccagagacggagacaaaccgctctcggcgtccggtaccggaatgcaacgtaccgcacccgaactgcctctacaaactctttacggccgcgcggcagcccctttccattggctctggtgaccaatgacaggcaggctccgctcccaactagcgctctggaagagagaccgcctcctccagctctctccaatcaatagagcaatctccgaatcctcatttacatagccgctcacataaataacgaggccagccggctcagtctttggggacccagatgaatttagcggttacgggttttccacgaccacgctcgcttccaagcacataaactcgtaggaaataagaaaacatggttggaaacagaaaacaatccagaagaagagctacaggggttgtccgtagacgttgctatgctaagtggatgttctcatataatacaccgtactactcaggtaggtttctgtctccgcagcccgtgctgcttaggcgaaacaacagcctgtccgcggaattctgcctgcccaggacagggtccgtggactgtttcttatacaagcgccttgcctccagctagctacccaacagtgtagagaccaccctggtctccccgcagggtcctgcggctcacagccagccaatcgttcacttttgagtctgaagctagagtgatgaccagacgtgaatgcttcctgtgctgacgggaggaacaagctcgcctagccaaaatatcttttgtctttgaggctatgggcctgcaaagagccactaggttttattggagaggccaaagtcttggccttggcttgctccccgcaagccagggcgccacagatcagcggatcgggtcctctgcgaagacgtggaggtcccccgggtctctttgtaaatgagtccagagactaaagtcagaatggcagcttattcttatatacctgaattgtggacccatgctttttgaaacaaaaagagtgtttcaagtgttttgttttaattaaaaattactttctcctaattcatcgaggtcatttcatttttacctgaacattttcagtaacacagttaacaccgatacgtgatgtaatgttgaacgcttgctttttaaaataaacattttatgtggattcatttacatttaaagtaaagcaaatttaccttctcactatccgaataaagatttgacttcattgaaataacattttcaaatatttatgtatatgtcattactgcctagaacaatgatgaacccatactggggactcaataaatgtcttcagagctattgtcatggtttaggcggtctttccggagccagtctgcctcagcctaaatcctggctttaccactgagcagtgacctttgataagttatttgactcctctacctgtatcaaagtgttttgaaaattaaatacgttagtaagcatccaataactcttagatataccaaataaatgggcatacaaatctctgatgcagtttttaacgagatgttcctggaatgagttctgtaaactagcttaaatttttgcctgtatcttggggaattttcaagagtttttaaaagtattactattttagacacgattttttttcttttattccaataagcaagagatttctaatttgaaaatgttctagtcttgatttcttagaaagcttaactataagtaagtcaaccgattttaccattacaataattttttttttttttttttgagacggagtctcgctctgtcgcccaggctggagtgcagtggcgcgatctcggctcactgcaagctccgtctcccgggttcacgccattctcctgcctcagcctcccgagtagctgggactacaggcgcccgccaccacgcccggctaatttttatgtatttttagtagagatggggtttcaccatgttagtcaggatggtctcgatctcctgacctcgtaatccgccctcctcggcctcccagagcgctgggattacaggcgtgagccaccgcgcccggccccattacaataattcttatctcttcaagatctgatagacttttcctcttccctctgagtcaaatattaaaatcatgagtgaagttcgaccattcaggactttttccagccattcaagac

SEQ ID NO: 916277 - DNA, 4001 bp, Homo sapiens
ggcgcccaccaccacatccagctaatttttgtatttttaatagagacgggatttcaccatgttatagttcaaatacttttttaaaaattagatgtgctagttctgtactaacttgtctttttttgcaagttaaaatgctagtcagttctcaaatttgtctgtgaattttgcaggatagagtataaaattccttaaatcctaattccaagctctttacaatgtgggccctacatccctaaagttttctcctttgcgtaaatactacacttgagacaaactaattgttttcccccaacataaactttatagttctcttctgttgcatttctactctccaatatttctgattcttttcctctctttttttttttttggataaacaagtttatttgtaaatttagtcaacatacataattgacctaaaaacttcaataagataaattttaaaaccacttggaaggccatctctataaaaatgattttcccaggacagtaaccagatgtaacctaacctaacaccatcttaaccggcagaggttcagtgggctagagctttgtgctcctcccctacaccaagtttttataatacaaatgccacaagaaaaagaacttcagtactgtttcctcttagcagaggagaaaactcaacctagttatgagaccaaccacacaacacaatgaaaagctgcactagttcagaatattagttaacagatgatgctggtgtgaataactcatatttttttctagagcccttataaataaaatcccccagttagtgtttccattatcagctagagggttagttaacatgtggtagaatgaggatttatgcaaggtataaatgcacatagcattttactactatgagaacaagtgcagtcagaagaaaaccaactggactctaaattacacacaccttaatgacaagactccccaccacttgtgaatgtaaaacatttaatttgaaaatgttgacactacaatatataaaatagctattataaatgcacatattgtattctatagctgccaggtttaattttttttttttaaaggaaactataagttacactgtggttaaggtttgtatcttcacccttgaaaaagcctacattctatcacagtgatgtatggtcagacttaacagccccaattgttaaacacttggatcaagtcataaccagttttattgcaaaaggaccctgttgtacacatttatcaattctagtaccttaatagctacccaacaagtcattaacatacagaaacatgcatcatgagaagcaagaaatatcacgcatccgttttgcatattaacaacttgtcactcctgagcaacagtgctgacatcactgaggtctgtaaacagtcacttttcgcattcatcctgagtgaaagatggaatgacttaagtacaaatgcaacatataaacaatttcttacaaaaaaagtcaccaattaaaccaaagtattttacagaatttactacaaaatgccataaaaactgccttcacttaagctctctctccccgtatccggcgagccaactggatgtctttgggcatgatggtgactctcttagcgtggatggcacacaggttagtatcttccaacagacccaccaggtacgcttcgctagcctcctgcagcgcaccgacggctgcgctctgaaacctcaggtcagtgttgaaatcctgcgcgatctccctcaccaacctctggaagggcagcttccggatgagcagctcggtcgacttctgataacgacgaatctctcgaagcgccacggtcccaggcctgtagcgatgaggcttcaccccgcaggtagagggggtgcttttcctggcagctttcgtggccagctgtttgcggggggctttcccaccggtggatttacgagcagtctgcttggttcgggccattttctttcacccaacgccgaagttttaggccacttctccgacctccgcgctgcttccgctgcccgaggaagagccgcagtcgcgagcgaagaaccgacactggtccaacgaacgaccaaaccgctctgcgccctcctctcttttatctgcatcccttccattcttcaaagcccatttcggtgtttcgttttttgttgttgttttgttttttgagacggagtctcgctttgttgcccaggctggagtgcagtggcgtgatttcggttcactacaacctccacctcccaggttcgagcgattctcctgcctcagcctccagagtagctgggattacaggcgcctgccaccacacctggttaatttttgtatttttagtagagacggagtttcaccatgttggccaggctggtctcaaactcctgacctcaggtgatccgcccgccgcagcctcccaaattactgggattacaggtgtgagccactgcacccggcctttcaaagctcatttcaatcccacctccgtcacaaagcattcttcagccaccttcgttttcatcctttttttctctgcactctttctacccttatcatttacttgacactatgcaaattctacatgtatatgtatttctcatttatttttagtaattatcttttttcttattataaaagtaatacttgtccaatttaaaatacaaaaaatatagagaaacaaactgaaatgtggaatcacatgtgataaacacacacacaagttggctgaatatctgttactcttggaatggggaaagaatcatctagtcatctgccaagaggtataaacctaaagtttagaaacagaaatctgacttttaaatgttacagttctatatgatatttgttccatggagtaaatcataaagtttctctctctctctctcttttttttttttttttttgttttttgggagatggagtttcactgtcctcacccaggctggagtgcaatggcacgatctcgtctcgctgaaacctccacctcccaggttcaagcaattctcctgtctcagcctcccaagtagctgggattacaggtgcctgccaccacacctggctaatttttgtatttttagtagagacgggggttttaccattttcgccaggctggtctcgaactcctgacgtgaagtgatccacccacttcagcctcccaaagtgctgggattacaggagtgagccaccgtgcctggccacaaagtatctcttttgtcaggtgagttttttaacttctagaaatatgccacaaagtgagccaggtgtggtggctccgcctgtaatggtagcactgggaggccgaggcaggtggatcacgaggtcaggagtttgagacgagcctggccaacatggcaaaacctgtctctactaaaaatacaaaaattagccaagcgtggtggcatacgcctgtagtcccagctactcgggaggctgaggcaggagacttgcttgaacctaggaggcaaatgttgcaatgagcccagattgcactactgcactccagccagggtaacagagtgagactttgcctccaaaaataaaaaaataaaataacgaaaagctattggattgaccattgatactttccacatctgaagaaatctaccttattttcaaaagggcaaaaaaaggaagggttccccgccccaggttaaaatatagtaaaatctctgagtaattcataacaaataaagcaccttcacactaccataaatctctacactgtgttccaatctgttgagtgcctgaatccaatgacagctttggacgtccccttcccccataatctctgtgcagaccctcaacctcaccccagatgcctttggagttttcattctttattataagcaattgatagtttctcagacttttatatacagcgtaaagaaaatccgtacccagccgggcggtggctcacgcctgtaatcccagcactttgggaggccgaggcgggcggatcacgaggtcaggagatggagaccatcctggctaacacggtgaaacgccgtctctactaaaaatacaaaaaaaaataggtgggca

SEQ ID NO: 916278 - DNA, 4001 bp, Homo sapiens
cactacagagctggataaagccctgtggttggttggtttgtttgttttgaggcagagtctccagcccaggctggagtgcagtggtacaaacatggctcactgcaacctctgcctcctgggttcaagcaattctcgtgcctcaggctcctgagtagctggtattacaggtgcacgccaccatacctggctaatttttgtacttttagtagagatggggtttcaccatgttggccaggctggtttcaaactgatgacctcaagtgaactgcccacctcggccacccaaagtgctgggactacagacatgagtcactgctcccggccagccctgttctaattgacagtgttttctcagaagttttcctggctttcctccctcttaaataaggggccttaattttctgaagaaaaagaaagtggtttgaagcttaccttttcaggctcccggtacttgctgtatctgtatccaggtaaaggaacatatagggtggtgtggaaaaacccccagccccaccatctgcaggagccacccccagagcagaccaaagagcctgtgggaaaggatacagataaactccttctggttgagatggaatgaagtcaggagacatggcatcaccctctataactaaaacaatgcacgggagactcgttacagatcacattgtacagccatgttccccctgttaaaccaaggaacggcccatcattggcccatgaattctatagaaatggctgctttaaaactgcttcagatggtttcatgtggtcttagcatctttatgtaggaggagagcaaaaagcagaaaggtaggtgtcagggcagagaccaggggtttagatgaaagttcaagacagaattccacttccatccccattcccagctttattttcttcaaaatctgaactgatgctatgctgccggcctccagtctgggggtgggggtggattctttcgaaaggcaaaataacctcaaaatgattcagtcactgcaaagggattcagacctgcagccttgagtaccagtctagtctttgttacttactagctgctggagtctgggtaagttacctcctctctgatttctcctccatcagaggtggaggagaatcctacccatctcacagggttgtgtgaggacttaagatccccagaggcgtggcatgtgcctgcacagggccagcctcggcaagcctgacctctgctcatcattttccctgaggtgggggttcaatgctgcaaagactaagccaggccaaaccgcacccgttcgcggccctctcctgcagccactcacccacttccacgaactcgttgttctctagggccacctcgagccggtcctcgttgtccagcaggcccaggcccttgcaccggcgcacaaggaagtgcgcgtcatccacggaggtgaagccaccattgtcgggcttattcttgatatagcgcctcacggcctcccggcccagccagcccacagtgagctgcgcgtcctggcagggcactgccagccattccccacgtacgtgcaccgtgtatctgggcatggctccgctgcagcctgaggtcctcagctggtcacaggaggggagagctttatgcaggagtggctaccggggtgtggtcagctggaaggatgagaatagactttcaaaccactccccctccttcacctttactcattcatgcattggacaaatatttattgaggtacctgctgtccctttggtttttgtagccgagcaggggcaggagcaggggatgcagacgggtgagcctcctgtccactttccatccagacctgctgccagaaaggcctggggtctcccaccctgggaggtgctgttcttgtccctgatggcacctacctgctgctggccccctttcttcagggtccccaatttctctctcttccctcgtttctgtctgtgttctctgccattaagggcagcttataaacaccatgttcctgtctttatctgagattactcaactgtaaaacgtgttctgtgggccaactgtgacactgggagtgtggcaatcgtcactcatttgtttattccacaaacatgtattgagcaactacttcctgtcaccagtaaggttttctgaagctttctttccaccagggaagactgcaaaggccagagatcattttcacaactaaaggtcgtcatctgggcaaatgaaccactctgacttggagattaggggctcagacagccgtggatgagagtccagctctactacttattagccttgattaggtgagtattaccctgtatttccttatcagaaggcctaggggctaactgcctccttccagtatgtgcaggatttacctgtgatcaaatcctggctctgccatttgctaagtgtatgacttgtgggcaagtgatttgacttctctgggcctcagttgcctcatctgtaaaatgaagataatggtaatgatgatagtatatatgtcaaagggctattgggaggatgaagtcagttcatatatgtaaagccctcaacacaacacctggcatagtggaaatattatagaagtgtctgtgattactagtatctggacaccaatactccatgtaactataatgctttataaatgttctgtatgaatcataaagctataaagttccataaatgctctttcatcttggcacatggatatccctcacccaattaagcttcttcaccacagataactgctccctgcacccgccttattaccattggtattaaggaactctggatagcatgattacggcatcaaagatatgcagatgctattttgactaagcagcactttcatcgtaagccaatttttagagatttgattattgcactagaaaaatcctgaaaagtctgtttccactaaatcagacttctgttgggaagagagacatggttgctcaagaaaaacacctatactcatacccagagtccctctcatctgctgacagcttcccaggaagcgtacaaatagctacccttccttgagccttattgaaacttgctcttcagatacccacaccatgactgcaccctggaatttgtcatgacctgaatttgacacacttaagaaatcaccctggaatctgtcacgacctgaatttgacacacttaagaaatctgaaattccaatattccaccttctgaccacaaccttccagctgcccttttactctagtcactgccagccttggacctgacctccagtcagtctcttcatccctccacttcccaccagcatcctcacttactatcctaggaagctggtccctagtcgctcactggaccactctttcttaagcactctgagattcctttgcatccctaaacttatgtctacacttggaataacacccatccccttagtcatcacaaaaaacagccatctcttggaaggattgcttaagcctaggcagtcaatgctgcaatgagttatgattataccactgtactccagcctgggtgagagcaagaccctgtttaaaattaaaagaaactgtcatatctgttcacccaggcagaagacactgatagagaaagtcctgtgatcacatagtttgatggtattgcccttttattccatccagcccacagtgactttccaaaactttgacccctctgccaggaccttctcgacatccacctctaattctcagaaggagaccttacttcctacatctgtgagaaaactgaggactgcacatgtgaaccaccttaaccttctgccccacccccccccattcattccttgactcatttaacaaatattttttcaacacctgttatgtaacaagctctatgcgaggtgctggggatgaaataaataacaaacacgctctacattcatgaggcttactgtctggtgatggataaagctgtataaagatgactaataagaggtctaactatcttcatgctgcaaaacaacccaaactactgcatgctccagttgactgtcactgccgagaccagcttctgagtaatt

SEQ ID NO: 916279 - DNA, 4001 bp, Homo sapiens
ataggaaatgctgctaactgccccatagcccctaagagagtgaacatgccccattcaaacacatatacccatttacttagccatttaaaatgacacaggggaggccaggcacggtggctcacgcctgtgatcccaccactttgggaggccaaggcaggcggatcacctgaggtcaggagctcgagaccagcctggccaacatggcaaaaccctgtctctactaaaaatacaaaaattagccgggtgtgttggctggcgcctctaatcccagctactcgggaggctgaggcaggagaattgcttgaacccgggaggcagaggttgcagtgagccgagactgtgccactgcactccagcctgggacacagagtgagactctgtctcaaaacaaaaacaaacaacgaaaattacacaagggctgtgcagttcctagcccccctcccaacacacacatgctccactccatgcacattctgtcccctgccattgtgatcagataagaaaatgcagccaactcacttcaatcaactggaacctccccaaaaggtatagttgtgtgaatttcatttccgacagaatgagaaggatgcagttcatgtgcgagaagccgtcttgcaataagaaaggggggtggcattttcaaagcccccgaccccttagcacgagttaattctaagtcaccactctatcttcctcagtgttgttggtctgcttgttcagtgccactcaacaatgtggggatcccattgcccatcagactggctttggaaactatttgccacactgatgcaactcctgcgaccgaggttcgaaattggcatctcttccggcctttgtgtttttgagtgtcctggctgcttgggtttcagactgcagattttgagcttgttgtagaatttgggaaaggaggggcttgaaaaataatacaccaggggatccagcatgctgttcatgtaggtgaagctgagggttatgtgcagggccccatggacagagggatcgcaggcactcgagggcaccgtccagaggaaatagagtctagcagacacgctgggcaggtagcatgtgatgaacacaattgccaccaccatgatgaaccgggtcgccttcttcatccgagcctgtctggccagctgctgcctccgcctcaggctccaaacaatcttgaaggagcaaaataagatgatgccgaggggcataaagaactccagctggaacatgatgtcatgccagccattggccgactccatgatgaagctctcacaggagacggccgtctcttgcacgcagagatggttctccagcaaaagatacactgttcccaggatgaccagggcccacagggtgcagacgatgccagccgccacccgggtggagatagtgttcaccgcgtggtgggggtggaccactttgaaatacctgtccgcagccaccaccgtaaggaacacgatgctcccggccctgttcatggccaacgtgaagagccccactcggcagggaatgtccccaaaagcccagtgtctacgtctgaggtaatagtctgtccgaaaaggcaggcagatcataaggaggaaatcagccacggccaaattgaaaaggtaaacagtgctgggcttccaggtcttcatgtggaagcagaaaccacacagggcgaccccattgcctagtgcgcccagcacaaaggccacaatgagcagcggcggcatcacctgggagatggtgtccccctcgatgcggcagcacgacccgttgtacatggcggggacagagcaagtgtccgggtgcagagcagcccagggagtccccacaatggcacagatgcttatctgagcgttagcactcacccagctgctgcgtgtctgacttcatcacccaggatgcgggtcctgtgtgtgtgggttggatgctgccacagcagcgagaagagaaacttcagccaggaaatgagagacccagggaggtcctttctctggagcccgtctcacaagccgcctgcctctgggagaggccaagcctggagccggatgaagcttggaaatgcatgcaattttgcaaaagtggtcatttctgagaggcggtagggtgggggggtccgatgagattgatgccgtagaggagcgattgggtccagcgccagagtaattttcattttcagcttcgctgttcctcctcggactccgtgctggagagcacacaaagctgcccagaaggcaagaagaaagcttgtttgtcctccctcctggtggagaaatccaaacatttcctggagtggttctgggctcctgcctttgctttcctcccgtaacctttgcctgactgccttgtcctctccctcatcccacggggcactcccatgcggtgccagagaggggaggctttgctctgcagctcctccgggccatttcctgtgccgaaaaataccgcgctcaaaaattggaggagtctgcggagagaaaagttctaatcacgatacttgatggatgttagaaaaattctttgacgggagtcacctttcccccgctctattcccacctccctgccctttacatccttccgtgaaccaaagtggccagttgcacaaccaccaagaccatgaaatagatctgaagcccacttctcatatgtctgtctccacaaaacggcctctttgggagccggtttccccctctgctgggaagcagagcctagaacttttacaaagatttggccctgagtttccattggctgttgaatgagccaaacaccatgagatgtacgtttttaatttcaattatgtgctgagcccatcaattaaaactgccccctgggggcggaagaggattggaggagttgattaaggagtccatctctaaagcaatcatgagtaacattagactgcacaaaaaattggagtctttgctaaaatttcctgtcctttggctttaaggattattaatctgccctgtgcctttcagcttccagtttagaaaatggggtggaggccgggcgcggtggctcacgcttgtaatccaagcactttggtaggcccaggcgggcggatcaccaggtcaggagatggagaccatcctggctaacacggtaaaaccccgtctctactaaaaatacaaaaaaatgagccaggcgtggtggcgggcgcctgtagtcccagctactcgggaggctgaggcaggagaatggcgtgaacccgggaggcagagcttgcagggagccaagattgcgccactgcactccagtctgggtgacagaaccagactccgtctaaaacaaacaaacaaacaaacaaacaaaacaacaagaaaaagaaaaagaaaaaagaaagaaagaagaaaatggggtggaggccagtcgcggtggctcacatctataatcccagcactttgggaggccgaggcaggtggatgacttgaggtcaggagtacaagaccagccttgccaacatggtgaaaccccatctctactaaaaatatacaaaaatcagtcaggtgttgtggcatgtgtctgtaatcccagttactcaggaggctgaggcaggagaatcacttgaacccgggaggtggaggttgcagtgagccgagatcgtgccaatgaactccagcctgggtgacagaaagaaactctgtctcaaaaaaaaaaaatggggcggaaaagagggggtgcattgaaagaatgtgtctgtcttctagatgcacactgaagctaaattcttcccactggatgctggactccaaatctgtccacccacattctcccctgcctcgccctagcacagaccgcagtcacttcccacctgaactgttgaaacagtttcctaactggtttcccttcctctcatctatttcctgtaagtcatcttctacacaataatctgatttttctgaagcacagatattatcatataccttttttcacttaaaaatcttcactagctcccttcaatctgccaaggggctagaatgatggcctgtggaccatatctggtttaaaaaccagcctggcttggc

SEQ ID NO: 916280 - DNA, 4001 bp, Homo sapiens
ccaggaggaacgtgcacccctctaactgtggggcagaggcacatttcccttttaatgttaaaagcaaacagaggtgggaaacagctttctatcctgaagccgttttaactgcccaacccttagattactataaacaagagaggaatggattgcattagtcgctggttgaaagcagcaatgccatttcctttcccataataacactgtttagctcagtcccttctggggctaatcccctattacacccaccggaaacacagatattaaccaaagcgtgtgagtctcttccctgagtccatttctgctaaagcttgtctgaaagatgaattggtccacggaagccaggtgacctactggcttgtttaatgatgcctgggctccctccaggagcaacacaattccctccaatctcagctctccttatccctgctagagctcacaagcaggctagatatcaccccaggagctgagccccctccagtctgaggcagatgtgggaagaaggccaacaagtcacaagtagatctctggctccaactctgctcagcagaaatgcctacaatttgcccatcttcagtcctgcgagcgtcagagatgaagcaaaagtttcagatgcctagaagctttactctctattcctccaggattcctgcggtcacaccttgcaaccagtctcccactcatctgccaccgtttccctaaatcgcattctctgaatctggaagttccaggaaaccttaggccgagtccagtgacattactcgatgcaacagcccaactgtttctccagagatcctggttcttggtgacaatgtcccttcttggcatggttatttaaggagaggttgggcccagataagaggggctccatggctcaccggagttggccattaacgcctctggagcgcctctggttttgttggggtcccctgtgagctcgacgctcgtgctgcggttattatctggctcacctgtcatcttcctctggaggcagcggttgatcaaagtggagaagaagttgggaaaggatgggctggagaagtagtacaccacggggtccagcatgctgttcatgtaggtgaagctgagagtgataaagaacgccaggtccaccgagcggtacacttcacaattctgcgtgcccgaagtgtgcaggagccagaagatgcggatccgcacaaccacgctgggaaggaagcagatgacaaagacgatggccaccaccatgatgaaggtgatggctctcttgatcttggcatgccggtccatttgtctctgccgcaggctccagataattctggctgagcagaacaggatgatgcccaggggcaggaagaactccaggaggaacatggcttcgtgccactggaaggtatggcagatgctgaagctgctgcacaaatttgcaccgccattctggatcggcatcttcttcttcaggaggtggactgtcaggccaatagtgatgccccacagaaggcaagagatgatggctgctgtccgattggagatcttgttcagggcgtggtggggatggaccacccggaaatacctgtctaccgccaccaccgtgaggaagatgatgctgccctggcggttcatagccaacatgaagagcatcagccggcaagggatgtccccaaacttccagtcccaacgcctcacatagttgtccatcaggaagggcaggcagatgatcagtagaaagtcagccactgccaggttgaacaggaaaatccggctggatttccaggacttgaggtggaaacagaaaatccacagggcaaggccattgcccagaagcccgaagataaactccagccccaacaccggcggcaacaccttgacaatgaagtcatctcggaacacacagcagttcttcttgtctatttccagaaagtgatcctgcagatggtgccgattcatgagtgcggctagtgagtccgatggagcgcctcgcctagtgaatgctccagcaaggaggtgtgtgtctgtgtggtgaacgtgtggttccacgcctgcctttatgtcatgtcagggtgttgaaatagatgactgaatggttaccaggaaactacgaaatctctaaaaaaaaaaaaaaaaaaaaaagccagcaaggctcttatgcaacctgctgtttgcataaacaagtaataagaatcccctgggcagacgggaacccacaaaatgtcttaaatgtaaaggataagtttaggcaagccgactgtcattcgaaaatcagtgaaacatgaaggacatccctttggaaggctgggtgcttgtatgccaactgagtactcaacgttgcagaattaattcaccgtcatctgcttggctgacataattaacaaaacaacaacaatagcaataacaatttttggtgccaaacagtgaggttttccagaaacactaagaattagcatgaaaaattaacaggcatatgacataaacagtagcagacatatgatttcttttggaaatgctgagaagacagtagttgcctgtttgatgaggacagactggttgaatttgaccacttttcctatgctacctttctgtacaaacatggagtgcttttccatatcagaactctgccattcatctccagttaggaaaaaaaaaatagcctgctggagagtgtaatatttcataagacatttgaaaacttgagcccagtttcagtggcatgttaacataagttgggttttttgtttgtttatattagattttgatatgcttctgtgctcaagtgatttatttttaagtatgtgatttcttttttttgcaaactttgaattaatgagaaaaaggattcatgaggctagtcgtaagctgtagcaaatcgggtgtactttgtgctacaaatttgtttttctgtgtcgctctgcatgaagaggggtaccttaggatagagcatggggttagtaccccataagctgtctgttctagacagcccaggaaactggtcagtaagaaagttggttgcaggtccctgaaacaaacaaaaaactggatgaggtctctaacttgttttatgtccttgggaccttaggatgtgattttttttttttgagacagagtctcactctgtcacccaggctggagaacggtggaacaatctcagctcactgcaacctccgcctcccaggttcaagcaattcttctgcctcagcctcctgagtatctgggactacaggcgtgcgccaccacgcccagctaattttttgtatttttagtaaagacgaggtttcactgtgttggccaggctggtctcaaactcctgaccttgtgatccgtctgcctcggcctcccaaagtgctgggattacaggcgtgagccaccgcgcctggccgtgattttttttaatgaactttattttttggggcagtgttagattcacagcaaaatggagcagaaagtacggacggtcctgtgcactctgtctccacacacgcaaaacctcccccactaagtatgtgatattttcaaagcccccatttttgtaaaattaaacttagagtgacaggacctaagaggacatggaaccccgccttgtagcgggacaccattgcacacattgtttctctgcttgtcagtgcgattgggtgtcatcctatagaatgttttctccctttaatattttggtcttatgaattcttccatgcaggaggtttctaaattgtgttccttctactttgagttataaaatgtaaatttcttcctttttttttttttttctgttttttcttttgagatggagtttcgctctgtcgcccaggctggagtgcagtggcatgatcttggctcactgcaacctctgcctcccgggttcatgccattctcctgcctcagcctcccaagtagctgagactacaggtgcaagccaccatgcctggctaatttttgtatttttagtagagatggatttcaccattttggccaggctggtcttgaactcctgacttcaagtgatcctcccgccttggcatcccaaaatgctg

SEQ ID NO: 916281 - DNA, 4001 bp, Homo sapiens
tgggaaacagctttctatcctgaagccgttttaactgttcaacccttagattactataaacaagagaggaatggattgcattagtcgctggttgaaagcagcaatgccatttcctttcccataataacactgtttagctcagtcccttctggggctaatcccctattacacccaccggaaacacagatactaaccaaagcatgtgagtctcttccctgagtccatttctgctaaagattgtctgaaagatgaattggtccacggaagccaggtgacctactggcttgtttaatgatgcctgggcttcctccaggaacaacacaattccctccaatctcagctctccttatccctgctagagctcacaagcaggctagatatcaccccaggagctgagccccctccagtctgaggcagatgtgggaagaaggccaacaagtcacaagtagatctctggctccaactctgctcagcagaaacgcctacaatttgcccatcttcagtcctgcgagcgtcagagatgaagcaagtttcagatgcctagaagctttactctctgttcctccaggattcctgcggtcacaccttgcaaccagtctcccactcatctgccacagtttccctaaatcagattctctgaatctggaagttccaggaaatcttaggccgagtccagtgacattactcgatgcaacagcccaactgtttctccagagatgctggttcttggtgacaatgtcccttcttggaatggttatttgaggttgggcccagataagaggggctccatggctcaccggagttggcgattaacgcctctggagcgcctctggttttgttggggtcccctgtgagctcgacgctcgtgctgcggttattatctggctcacctgttatcttcctctggaggcagcggttgatcaaagtggagaagaagttgggaaaggatgggctggagaagtagtacaccacggggtccagcatgctgttcatgtaggtgaagctgagagtgataaagaacgccaggtccaccgagcggtacacttcacaattctgcgtgcccgaagtgtgcaggagccagaagatgtggatccgcacaaccacgctgggaaggaagcagatgacaaagacgatggccaccaccatgatgaaggtgatggctctcttgatcttggcatgccggtccatttgtctctgccgcaggctccagataattctggctgagcagaacaggatgatgcccaggggcaggaagaactccaggaggaacatagcttcgtgccaccggaaggtatggcagatgctgaagctgatgcacacatttgcagtgccattctggatcagcaacttcttcttcaggaggtggactgttaggccaacagtgatgccccacagaaggcaagagatgatggctgctgtccaattggagatcttgttcagggcgtggtggggatggaccacccggaaatacctgtctaccgccaccaccgtgaggaatatgatgctgccctggcggttcatggcaaacatgaagagcaccagccggcaagggatgtccccaaacttccagtctgaacgccgcacatagtagtccatcacgaacggcaggcagatgatcagtagaaagtcagctactgccaggttgaacaggaaaatccggctggatttccaggacttgaggtggaaacagaaaatccacagggcaaggccattgcccagaagcccaaagataaactccagccccaacaccggcggcaacaccttggcaatgaagtcatctcggaacacacagcagttcttcttgtctatttccagaaagtgatcctgcagatggtgccgattcatgagtgcagctagtgagtccgatggagcgcctcgcctagtgaatgctccagcaaagtggcgtgtgtctgtatggtgaacgtgtggttccgtgcctgcctttatgtcatgtcagggtgttgaaatagatgactgaatggttatcaggaaactacgaaatctctaaaaaaaaaaaaaaaaaagccagcaaggctcttatgcaacctgctgtttgcataaacaaataataaaaatcccctgggcatacaggaacccaccaaatgtcttaaatgtaaaggataagtttaggcaagctgactgtcattcgaaaatcagtgaaacatgaaggacatccctttggaaggctgggtgcttgtatgccaactgagtactcaacgttgcagaattaattcaccgtcatctgcttggctgacataattaacaaaacaacaacaatagcaataataatttttggtgccaaacagtgaggttttccagaaacactaagaattagcatgaaaaattaacaggcatatgacataaacagtagcaggcatatgatttcttttggaaatgctgagaagacagtagttgcctgtttgatgaggacagactggttgaatttgaccacttttcctatgctacctttctgtacaaacatggagtgcttttccatatcagaactctgccattcatctccagttaggaaaaaaaaaaaagcctgctggagagtgtaatatttcataagatgtttgaaaacttgagcccagtttcagtggcatgttaaaataagttgggttttttgtttgtttatattagattttgatatgcttctgtgctcaagtgatttaagtatgtgatttcttttttttgcaaactttgaattaatgagaaaaggattcatgaggctagttgtaagctgtagcaaatcgggtgtactttgtgctacaaatttgtttttctgtgtcgctctgcatgaagaggggtaccttaggatagagcatggggttagtaccccataagctgtctgttctagacagcccaggaaactggtcagtaagaaagttggttgcaggtccctgaaacaaacaaaaaactggatgaggtctctaacttgttttatgtccttgggaccttaggatgtgattttttttttttgagacagagtctcactctgtcacccaggctggagaacggtggaacaatctcagctcactgcaacctccgcctcccaggttcaagcaattcttctgcctcagcctcctgagtatctgggactacaggcgtgcgccaccacgcccagctaattttttgtatttttagtaaagacgaggtttcactgtgttggccaggctggtctcgaactcctgaccttgtgatccacccgcctcggtctcccaaagtgctgtgattacaggcgtgagccactgcgcctggccgtgattttttttttttaatgaactttattttttagggcagttttagattcacagcaaaattgagcagaaagtacggacggtcctgtgcactctgtctccacacacgcaaaacctcccccactaagtatgtgatatttttaaagcccccatttttgtaaaattaaacttagagtgacaggacctaagaggacatggaaccctgccttgtagcgggacaccattgcacacattgtttctctgcttgtcagtgcgattgggtgtcatcctatagaatgttttctccctttaatattttggtcttatgaattcttccatgcaggagacttctaaactatgttgcttctactttgagttatataatgtaaatttcttcctttttttttttttttcttttgagatggagtttcactctatcgcccaggctggagtgcagtggctcactgcaacctctgcctcctgggttccagtcattctcctgcctcagcctcccaagtagctgagactacaggtgcccgccaccgtgcctggctaatttttgtattttttaatagagatggatttcaccattttggccaggctggtcttgaactcctgacttcaagtgatcctcccgccttggcatcccaaagtgctgggcttacaggtgtgaaccatcactgccggccataagatgtcaatttatttctttagctgcaaacgcaggttcaataataggagcttatagagtcttcaagtaaacta

SEQ ID NO: 916282 - DNA, 4001 bp, Homo sapiens
gaataatagtttacttgaataatacattacttgaataatattaaaatgtgttaaacaatgttagtaatgttgcaatcttttgaaaaattatgaacaatatcattattaaagcctcagaatgaaacaatattaaatacacttacttgtaactcatataactcattgctgtatcttccatattcaaccattcccccaaatactaatattctggtaccatcacagacaaatccatgggcagcacagcctggagggatatctcctctaacagctggcagaaaccactgattcgtagctagttgccaaaataaaatgaaaaccgattataacaaacaacggttatcatatactatcagcaaatatatatcatcaatatcagtgggtctcaactggggatgattctgccccccagaagacatttggtaatgtctggtgacatttttagttgtcacaactggagggggctgttactggcatctagtaggtagaggcagggatgctgccaaacatcttacaatgtacagggcaatacagggcagcttcccccaacctcaacaaagaattacctggcccaaaaggtcgagagtgctgctgttgaaaaaccctgatctgtatcatttaattcttacaaaacgccctgctgggtgagtataaaaatctctattttacaactgaaaattgtgaggcttaaaaaggtttggtaactttagcgctgatcctgggcaaccggcagagcaagattcaaatcaggtctaatttgttccaaagccagggattttacactaagaccaaagtgtcagtaactttttaccttcatatgctggggcgctgggaggaggagagggtgaaaaaaataaaacttctcagactccactattttgttaaccttcaaattattcctgtgattaagttgtttgatcaaagaaaagttatcggtcatgaagtagacccaaaattccatcactgtctttacaccaaacagatttcttgtgacagcctgagcatttacaaggggaaaaaaaaattaaatccagtttcctttctattccacagaggtcctcaaagataggggctccctgcccaggggcacttgtgatctgcagtggtgctcaagttatgacagtcctctttccgagggccagtccagaagggcgtccacaccgagtatgcagacacaaggccgcctcaccacgtccccgccgctttagagcgcggctcacggaggggctcttgaccgttacctgccaaacaccgggttgtatttgaggcgagagtgccagaaggcctctcgttttccctcctcaccccctagatggtcttcctcctaaggaaggaaggcaggcaaagacgggaaaggccctaaggaactttggtttggagtgggttttgttttttgacagaggcgagatttcggggagtggcccaggcggttggacatggtcttctgtcgcctgcgtccgcctgtcgggctggggtgggggcgtccgggatcccccgcctgaaggccggtgcgccccgctcggggtccgttgcgccccaagggccccggagatcctgagctgcggtccgggacagagctgccggacccgggctgcccggctgagccgcgctccccgccgcccgcccaaggaagcagtgaccgggcggtgacagctgtcagggccgcggccgccgcctcgcctcccctccccctccgcagctccagcaggcggggccgacgagccgccgccgcgcctacccgtgttgtagacgtgcagctcatccgcgatgccctcatttccccctccaaagatgatcatcagctcccggatggccaccgctcggtgtccgtgccgggcgcgggggaccggccccgtgaaggaagaaactcgcctccagttgaggaggctgggagccgccatcttcccaacccccgcccctctgcccacaatgcaccgctcccgcctcaaccggctgctccctggggagggcggggacccgcctccagctgtgctggggtcacgtggccgcgggcgccggcggccaggctggaggcccgcgggcagtggagagacgctggggaaggggggtcctgacaggggagccccgcccccaccccaggcgacttggccagcggccacccggagcaacgcaccttagggtggaaggacgcttcccactgaccacgtctcccatccccacccagagcctcccgttcggtattttgggaagaagccacagcatcttcctttacgtccactttaattgagcatctaggatgtgtgggcgaggcagtctcacaagcaacgtgagagaagctcgggtagaggttcgaagagctgggagcgcagggcggggacctcgcacgggagggtgcgggcgggagcctgcctcgcgagcccgggccacggcggctgctcccgaccgtgactgggacccgggcagggaaggtcgctacaaagcctgccgggcgaaccgaaggcagctttgtgcggagccatgccaggaagcttgggaaccgtgagccacaagaggtatttttggtttgtttggcttaagcagaggagagatggttttctaggtttctgtttcattgctagctaacaagtgagggctgtccacagcctggcatgccctaagtgcctcatgtgtattaactcatgtaatccatccagcaatccagtgtggtggctcctgttatctccctttcatggacggggaaatgaggcacagtgcagtaaggtaattttctgatggacacaaaggagaggtgttgaaaaaaaagactggggccaggattccaacacagggcttctgattccagaacccccaagcccttatatcatataccatactgcctctgatagcagtcatatccaaccattataccatactgcctctggtagcagtcatacgcaactctttatttttatttatttattttagatagggtctggctctgttgccggaatgcagtggcgcgatcagagctcactgcaagctcgagctcctgggctccagtgatcctcctgccttggcctcccaaagtgctggaactacaggcatgagccaccgcacccagccaatgcaacacttaataaggcctagctgccctgtgatttggtcctacacataatcacacaagtccattaggaataaaactgcactgcatatgggattcatgccaaatgagtagattttagccactcttgccacagagacacaaaaagggttggtggtaactatatgagatgatggatatgttaatatgcttcactatagtaaccttgtgactgcctgtttcagctgtccccaacctttttggcactagggaccggtttcatggaagacaatttttccacggacttggcaggggagtgggtggtatggacttggcaaggggatgggggctatggttttggcatgaaactgttccacctcagatcatcaggcataagattctcatagggagtacacaatttagatccctcctatgggcagttcacagtagggttcgagctcctatgagaatctaatgcgcggttgatctgacaggaggcagagctcaggaaggtcatgggggttccgaacaggccgaggactggttgctggggactggggacccctggtctatatgatatcaacttcatattgtatatcttaaatatccacaatacaagttattttttaaaattttaattgaaaaaggactgggcatggtgactcacacctgtaatcccagcacttttggaggctgagacagaaggatccactgatcccaggagtttgagaccagctcggtcaagatggtgagatcccatctctatttttattaaagagagataaataagagatacaagtccagtggaagaaaaaattgaaagcaatttaaatccctacctcagattctcaagaggtactcaaaggagaacacagacactgtatagtaaatttcctaaaactcttttttcctcttattttaccattttcaatttctcttatatgcctcattcacccaactccct

SEQ ID NO: 916283 - DNA, 4001 bp, Homo sapiens
gggggtggataatagcacagtaccttcattctcctctccatagtcaacctcttctgctctgctctgagaagtgtgcttggaattttctccccattttactgatggggaaactgaacttcagtgtcaaagtggagtgaacagcttagacatgcaaacttccctgccccaaaacccactgtaagacccggtggccacagagacacccgccgaataagggacacagaggcctctggagaacactgcaccaggaccattccaggtgcaacatcaggaggcagctctgagcttgcctctgagcctggccctgctgggcaaggagggacatcaggggactaaaggcagaggaccagtcccaataggtccaagacctggttccagtctaggttcactgggctgggtaccactcactgggactactctgtgccttagtttccctcagaaatgactgcagagaagaagaaaatgacttaataacccatgggtagcggcagcctagcagcctatggagtcctgggagggggaaagggccgccaaagcgtctcattggagggcagggacctgagtcacagtctcctgccagccctatagctgaataggggtcctgaggaaggtcccacaggtccagatgcaagtccagggaacaggctgagaagttgatcttgagctcccagcagggccgctgagggccgatgccccattctcaccctagaaagcggcaggcagagctgggcctcaggcagatgttgcctaggggagtgggcagggagcgttggcagcgagacagccagtgtccagatgcagggggaggcctttgggtgcgcaagacagccagcggggagaaggagtgaggagcagccgtggctggggaggtcagacccaaacgggcagccacagcgggaagcaatgggggtggggcactgggtggcctgcgggccccagagggctctctcctggcccacaggcctagaaactctggtcgtgggaacccagcccatccgccaaatttgccgcctgctctcacactccccaacaccaacagaccccaggcctggggggtgcacatcctgtcccccacccctcacacagcctgcggcgccccgcttcccgcgccgctgccggcattgacctccacagctcaccagggcacaggtgtctcttcaccctgatgggtgagcaaggatggggggcaatgctcagagaaacctcccagccagagacccctccaagggacctctttccccgccgaaggatctgagtagggccctgcccggctccacgggatgggggcgctgatgtccagccccacaaagcccagccccaactcagtgggtcctgccctttgccctcgcgcttccaaaccttccgccccggagcaccgccccctcgccgggccaccgcggccgtccctccctccccggtccctcggctcgtcctccccgggaacaggggtgatgggacgtggggcccgcacaccggcggccggggcctccaactccctcccttgggcctgtagctgccccggggcgggcggatgtgggcgccccgcgggaggcccgagccctccggcccccggaaccagctccgacccggagcctgccagagccccgcggagccgggcgggacaggcgcggtcggggggcgcaagccgggctgggcccgcggggctggcgggagcccgagccggagccggagccggagccggggccagggccggaggccgagcctgggcgggcgacgctgggtgccgcgcgcagggcggggcggggggcggccgcccagtactcaccagcgccggggctgtgcatccaggggccggggccctcagagcggggggctcatggcggggcggggggctggggcgccggcctcacatccccccagtcgccggaggctgcagagcgactgtgagacggcgagaggaagggagggggccgggagggggagggccctggcagcccggccggccgggtaggatgacaatggaaggaaatgctttatctgagtctgagagcgggccaagggggaggggagggagggggcaggcgctcgcggccctgggacacaccaccccggcagacactgcaccgcgcggcgcacaggcgggccgcagacaccgcgcgcggccagatcgcggcggggcgcggcgcactgccggggaggcagcgccgaacccggaacgccggccgcggctccgagccccagccgccgcgaggcgctccgagccgtgcacaattcccggaaacccagctacctgggcgcacgcaccctcgcatacacaacgtacacgagcacgcatccatgtttacaaggggcagaatcatttacacagcacacactggggcttcggggtggacccccgtgcacacactacatacccgtacagcccacaagcacgcagccacacgcgggcacagtgggacacgcgtggtgtcccatgtcccatacaaggaatcccagacggacaccccccaccacacacacacacacataagcacgacttgcctcaggaaagttccaggatctgatttgaatcactgcccagccctcccccactggcacccccacacacacaccatgcctgctgaggggaacggaagggtccagcctgttcctattaaaagaaaaagggtgtgggggtggtgcagattttgaaagttttctttttttaaagaaatttctcaagggacttccttccctcctctcctcttcctctcttcctcccattcctctccctccacaacccccctctttccccctcccggtccctatgagtcaaacttcagcaatgtgcccagtgtcccccagtgcattacagcggatcacagaaatgttccagtctgtgagtcggaatgcagccgcctccagccctccctcagctaataaactcagctcagggccggctttaggcagtggccctccctgcctctccctccgcttttagctggagagaaggtcagattcaggggtcaggggctaaggacctcgccattgtgcttcctgggctagccggtcagccgtgtctgcctccagcaatctggagctgctcctaggaaggggagaggtccaccacgcaggaacactgggctctctgcagcgtgaggcgccaccattgtaaaccaaggagcagcttcccctgaccccattctatctcccgcaatcctaagaaaccccaagaatccagagaaggaaaaattgaggcagccccagaggtggagtcatgtctgattggaagcaagagcccacagtggcctaggagggcttggccatgctggcggtgaacttcaaaccatagattctattcccttccctcaggcacagctcgggactcactatctgttgctaccggcatattcagcgtgggacttcttacttcagcccctttccttgtcccagttctccttcggcaggcagatccaacccctctgcgcttgttaacttaccctcccaaaagcctttcctggcattcaagtcctcctacaacctggcaccacactccatacacatccctgcccagtgcctcctggtacttagggctcagtagtgttagtcactattattactatcattatttctgccagactgggctgctagctgcttcccatcctgtcctcacgcttccacactcccttgccttcgctcatcatgctgcctccaaaagaaatgtcctcccagcccctttctccttctgttgaaatctttccaatcctcaagacccactccctatctagtgggagggagggagggagggaaggaaggaaggaaggaaggaaggactggaagaaaaagaaagtggcataccactttctccgggaggctttcccggattcccatagccaagaggaattcttccctgaactgtgtggtctttatacattgaccttcgcccacctagtctacttgtctcaactctcttccttccaagagcattcaagagtggatatccctgagtccagctactgccttggtcatgggtgcatttcttgtagtgtcttgcacagaat

SEQ ID NO: 916284 - DNA, 4001 bp, Homo sapiens
tttgtcgaattatttttaaattgggtgatttcgctaagaatctggatgtatggttttccttaagaatttggcaacactgtttcatatatcactgcatagcaacaagtggctggaactgccgtttagagatggggacctgagttcactctctgatttgcctcagtccccactatgccttatagcctaaaacagccagcttcatccatttccattacctgcctggttgctgcaggtattcaaatgtgggacctctgatcagggctaaactgttcattctacatagagctggggaaacggagataagaacaggtgaaaggtctttggttgtcaaagagttcagattagagtctaattgagggctttcgtgatatgaagatcattgtactaggtatcagaacttggcccccaggcaatacagtcctttcacaaatgaggcatcgtattgggagctctgtatacagctgcactgtttaaactacctgtccaccaggagattataatctagcagcactctccttgttttcaggggtgcagtccagttagcccatgttagcactgatataaatttgggggaagacagcaattatgctcttctcactcattctgtattctaggtacccaactccagaggatctaactggccaaaagcaatggtacagctctgggcctttgtgcatgctcttctctgttgtgtgcactcctacacatccctgaggccccagctcaggacactccactgaggtccccatcatagccccctggcagaattgactgcctctgtgctccctgcgtagcgcatttatatctattctgcacagatcttgttcttttacacagtagtcccccttatctatagtagataccttccaagccccccagtggatacctgaaacggtggacaaaactgaaccctgtatctactacgttttttcctatacatacatacctatgatatagtttaactttatcaattaggcacagtaagagatgaacaacaataataaaataacagcaattataacaatatgccagcattgctaagcttgcactttggggccattactaagtaaaataagggttacttcaataccgccacggtcgatccgatcaccaagctagctactaagtgactaagggcggctactagagataggaggctgaccttggacaaaggggcattccggtcccaggaatcaagatttcatcctgctacgcagaatggccggaaacttaaaacttaggacttctgtatttctggaattttccatttaatagttatggacaagagctgaccacaggtaactgaaatcgcggataaagggggctactatccgcagttctctagtacttgggagtttcttgcgacactcatttctgcaaccgagtgtctctcaacaaatcaaactgttcggaatgtttggaatattttaaacgaaagaatgcattcaacaggcagtgcccaactccccaagttgggattctctccttggatcagtctctcctgtttacccccctcctctcaccaccggctgcagggggacctctcactcctttccttcccagtccaaatgctgggcggtggagagccgcactcgcgacagacaccagaacgcaccttcgatagcacattcctgccccacctgcccctcagcacccgctgcagccccgacgagggtgggggtgggaggcagcaatccttcaggtcctcggcagccctgcgggcctaccttgtcccctttgcttaggacctgccaaggccacgtctctacgcttccgaacagcgagttcttgatcatgcccaacatgttgtagccgagacgctcccgacgcacgggaggacgtgaggtggcgggggcgacggagcaccacgggcagcgaccaccggcggcagggcggcagggcggcagggcggcagggcggcagggtggcagggcggcaaggcggcgggacggcgaggcggcgaggcgagaggcggggctagaggcaggggccagagggcgtggctagagggcggggcggcaattcagcccggcggtgaggcaagggggcgggacggcgaggtgaaggggcggagagagagggcggggcggcgaggcgagggggcggagagagggcgggtcagtgatgcgaagggcgggcagcagggcagcagtgcagcagtgcagcagtgcggtgaggcgagggtgcgaggcggctaagcaagggatgggcccgccgtggcgagccgctgggccgtgttccgcctcctttcgggctttccgcgggtgtctggggagggaacccggccgcgggcctcaggccgtccccctccgcagaccccttctcttattctgagtctaacctatccgctggggccctggaaagcgattctcgcctggagtggctttaggcagcggtggtggggaacgtcctctctcaggtgcctgggctccaacctccgagccccgggttgctcacgcttctccggtcctctacccgaaggctcgatcccgctggtacagcggcggccaggctccctgtcttggtagctgtccctctacccccgccccatgacctcttctagaccattgaaagagcatccaaaccactttcctgctgccactctttcctaccatccctctaaatcacagtttccaggtgacttttctaagcatggcttttctcgttcactcctgttcaaaaatcttctcaccaattttgtcaccatttactcagctgagtgcctgctttctgtcaagtattttaccaataaatctctactccacaccaccgacaagaaatattttggagccatttaaaaaggaggaaacggaagcttctgccgctgcctgatcctccattgctccgagccgcgcgggtgcagcgggctgtggagccgcgggccgagccccgccggagcgcccgagagcccgcgcgtcccgggcgtccgtcggggtccgaggtccctccctcagggagtccccgctcggcagcgctctcgcgtttcacgcagcggccggggatctgggacaggcggggccccgaggccgagcctggcgctgcccagcggccggtgcaggcctcaagctgggccgggcggaggggaaccggcgagttgaagccccggggccgaaagccggagcctgtggcggccgcgggggtggggaggggggtggggcggcttcttgggcagcgccacacggcggcgcagtgatggatgttaacagcagcggccacccggacctctacgggcgcctctgctctttcctcctgccggaggtggggggcaggctgcccgacctgagccccgacggtggcgccgaaccggtcgcggtctccgggacgccgcatctgctgagcgggggcccccgaggtgacggccagcccggcgcccacctgggacgcaaccccgggcaatgcctccggccgcggggagcaaatcaagaaagggccgagaaagttgtgatcggctctgtcctgacgctcatctctctgcgatcgcgggcaactgcctggtggtatctccgtgtgcttcgtcaagaagctccgccagccctccaactacctgatcgtgtccatggcgctggccaacctctcggtggccatggcggtcatgcccttcatcagtgtcaccgacctcatcgggggcaagtggatctttggacactttttctgtaacgtcttctccatgaatgtcatgtgctgcacggcctggatcttgaccttgtacgtgatcagcatcgacaggtaccttgggatcatgaagcctctcacgtaccctatgaggcagaaggggaaatgcatgacgaagatgattctttctgtctgccttctttccgcctttgtcactttacctaccatttttggtcgggctcagaatgtaaacgatgataaggtgtgcttggtcagtcaagactttggctacacgatttactccaccgcagtggcatcctaatccccatgtgcgtcatgcttttcatgtactaacagatttacaaggccgccaggaaaagcgcggccta

SEQ ID NO: 916285 - DNA, 4001 bp, Homo sapiens
cataaatgacatatatgtataaattttggttctgtgaacttggattagtctttaagaaacaaagagcataggcacggcatagtggctcacgcctgtaatctcagcactttgggaagccaaggcaggcagatcacttgaggtcaggagttcgagaccagcctggccaacatggtgaaaccctgtctctactaaaaatacaaaaattagccaggcatggtggcgcgtgcctgtaatcccagcaactcgggaggcagaggcaggagaatcgtttgaatccgggaggcagaggctgcagtgggctgagatcgcgccactgcactccagcctgggcgacagagcaagactcggtctcgggggaaaaaaaagaaaagaaagaaacaaagagcatccactttccacctttcacacacaacacagccaattaaatcaaaagattccactatcatagcataataccccttgagttttcaggcagataagacactcagacacaccttgcttgttatagaacaggcccaaatgagacacaataaaacgatgattccatgttaggaattccctaccaaccatatcctcctctttttggtgactagattgtaaaataagtcaattaagagttcataacggaagtgctgaagcaaccgcaaatccagacacaaaaatacagtggaacgtattcgcatctcaagcacgtccaaatgtctcggccaatgtgatccgatcactgccgtttccagaaacacacagtaatggcttttaattcatttctataaatgttcgttgtgcgtaaagccaaactgcacgcaaaaccgcaaaacacaaaagatccctcgcatgccgtttatagccagaagataggccatcctctctgcgccctaccccagaaagctctccttacggcagtaaaaatttgatgacaccccatgctacctacacatcaaaatgtcatcccacaaagtggaaggggagcagtgtcagcatccgttggcctccatgaaacgacactgccagtattcccacctctaggcaaacacgaacccaagtgaagtcgatggaaagttcccaccaaccaggcatatttggttcccttctgcccccaaggccaagcagctcaactgatgagatctgctgttgcacctgccacggctctgaacccgggatgcttggcgacccccggggcacacaaaaaggccctgcggcctaacgcgccagtgacccttccccgagagtgcatggagggccgctggagcatccctctcgctgtccacagcgcccgcttccctgacaaaggccccgtgtcaatccatccgagacacaacacagagaagttgctggattgcccatcgcggacccgcagctgccactaccctctcccggaaaaaaaccaaaccaaaccaaacaaaaaaaacagaactagggaagaaaaggatgggagggtacacagcgtgaaaatcaaaatgttcccaaagctaagcaacctgggtgtgccctggaagtgggtcctgggggcccgtgggggaggggagggagggcccgggtggtggcggtggctcctctggggcatgaaggccgagccaggcgctagcctaataaaatgccgggtgtcggaacgctcaaaagaaaaccacaaatgaaatcccctgcgggcgccaggccccgaggagggagggagggagagcggggcgggcggtccgcagacctgcggccgcggccccacctgcccgccccgcgcccacacacacctgccccggcagccgccgggaggcgaggccgcggctgaggcgaggagggggcccgacccgggggtgccgggcgagtgggtcagtccgatggcgggggccgggggccgcctcgctcacctccaggtcggtgtccgcggcctctggggccccgaggatctcgctgggcagctcggccaggtcggtgacccggatcagcccgtcgtgcaggaagatggtctcttccttcaccgagagccactgcgccgagtcagcggccgccgccgccgccgccgccgcggccgccgacgagcccatggccccggctgaaggcttggcgctgaggagcagacgcccggccgggggaaacggagcaggagccgccgcgatcaccagtccatggcagcggccgccgcgcccgccagcggcgccccacttgctgcctcgcccgtgcaactccgccctaggcggtccgagtcgccatacccccgaccccggcccgggagaccccggccctgccgccgccgccgccgccgccgccgccgccgccctcaggagcaggatccgcctctgccgctcggcaaccaactgtcagtgagacgccatgttgggggcggggctcccggcatgcctcgcggagcggacaatacaggccccgcccgccgctccgcccaccgctccgcggacgaggccacccgggtggcctggacgtccgcctagcccttcgctgccgcctgccctcggcctgacctccgccggccccttctccccctggccattcagggtagccctggctttgcagcgcgccagggaagaggacgccgcttcccccgtcctgtccctactcaggtgtgcaccccttgctcgggcccgcgcccccaccctgggcagagcatagagatcactccttgttttcacgtttaaatgagatgcaagcaaaaggctggcgcagaataggcgctgcacacttgttcataagcacttggtagaatcacatagtagatgattaatattgactgaaaagtctagtacccagtaagcactcaaaacctggtgaaaataaagcgtctgtccacaatgcttggtgctcaatgcccgacacttaatatgtgctccatgagtggcaattctaattattgctatgttcgttccatcagtgttccacactaattgacatacaccttaaaaatatgctcactaggccgggtgcggtggctcacacctgtaatcccagcacggaggtcaaggcagaaggactgcttgagcccagaagtttgaggccagcctgggcaacatagggagaccccatctctacaaaaaataaaaattagcggggcagggtggcaagcgtctgtagtcctgctactcgggaggctgaggcaagaggatctcttgaactcaggaggtggaggctgcagtgagctattatcttgccactgcactccagcccgggcgacagagggagaccccatccctccctccccaccaaaaatatatatatgcccaccagtgccattttataaaaacaagaaaggaaaactatatgtataaagaacaatgcatgaacaaatacacaccagatgtttaaggtgagttgccatgggagtgtggggctggtctggaactactgagatgagattgttctctattacttgtatatttttatcacttaaaaaataataaaacaggccgggcacagtggcttacacctgtaatcccagcactttgggaggccaaggtgggcagatcacctgaggtcaggagttcgagaccagcctggtcaacatgatgaaaccctgtctctgctaaaaaaaatacacaaattagccaggaatggttgcacatgcctgtagtcccagatactcaggaggctgaggcaggagaatagctggaacccaggaggcggaggttgcagtgagccgagatcatgccactgcactccagcctgggcaacagagcaagactccatctcaataataataataataataataataacaataacaataacaggagaacattaaggtgcataccctttgatccagcaattcaactttgaggaagttgtctgaaggaaataatcagactcgtagtcaaggatggatatacagggttgtgtagctcaatattgtttacaaaaggaaaaacttatcaatctagatgtccaacaatatggggctggttaactaaaatatgatatatccataagatggaatattatggccgggcacagtggctcacgtgggtaatcccaacactttgggaggccaaggctggcagatc

SEQ ID NO: 916286 - DNA, 4001 bp, Homo sapiens
tccactacactgtaaatactaaaacaggacactgtttcgtttgtctttgtattccaaaacgcaagcacagtacacagcaggtgtctgctgttcctcttctaaaatcagtcccctctctgctactcttgacttcagccaatactggccttcatgcagtttctttaaaatgccatggcccttcactcaagttattccatctgccttaactgatctcccctttactgtttactacatttactacagacctcagcttaactatcacttacttagaaaagtcttccctgaatctcatgtataaaacctctcaaagcactatttagcattccttctaagcatttagtaacattatagttacttctgtgattaaagaatgtttgtttaatacactagagggtaagcttcattaagactgcaaccttgttattttatttctctaggttttcccagcaccaaacatgctagccagttgatgatactttagaatgacgactaagccctccacaaatacttgaaacttttctgcctaaatctgcgctgtccacccacgtggctatttaaattaaaatgtaataaaacttaaaatttctctcctcagttacactagctggatttcaagttctaaacagctacatatggctagtggctattataccagacagtgcagatataaaacactgccatgatcatggaaagttctactgaacagcaccggtcggcacattaaaatattttaagtctcagtcacaaagtatacataacaggtataacttatagcacaggaaactacctcatagcacaggaaactacttatacaaggtttacccgaaccacaaggttactaacaccaattaacaatcatctgtgcactgaggtgttccttgtgtttcgtttttctttttcttttctttccttttcgttttttgagatggagtttcattcttgttgcccaggccggagtgcaatggtgtgatctcagctcactgcaacccccacctcctgggttcaagcaattctcctgcctcggcctcccaagtagctaggattacaggtgtgcgacatcacgcccggctaattttgtagttttgttgttgttgttgttgttttactagagacaggtttcaccatgttggtcaggctggtctcgaactcctgacctcaagtgatccacctgcctcggcctcccaaagtgcgtgagccaccgcgcccggactgttttgtttttccaagaagctgaggaagaaccacgtatttgactccaggcaatataggataataattacaagttctcattctatagaacttgaggataagtggtcagaaggaaaaataaaagttccgattctgggtggaaatagagactcaacatccactgtttccttaagcgtaaaactaccttacattaaaggtacattaaattaaaggacgaccattaaaatgagaataattttaaaaaaaaaaaaaaaaaaaaagggcaacccgctcgggtccccttccacactgtagaagctttgttctttcgctctttgcaataaatcttgctgctgctcaaaaaaagaaaaaaaaaaaaaaaccacatagtatgtgtccagttaaagtcactgctattattatagtcataattttacccttggtaggatgaagcagctagaccactgataagctaaatctgttagcacgactgggtgccttgctcagggcaaagccagaatgggaagcgctactttggaccctccaaccccatcccccgggcagacgccttcctcaccgcggaggcacccggggaggctgccagcctttacgcccccactgcagagctcctcggcgtcgatgaacacggactcttcatcctcctccacgtcgtcgtttaggtagtcgtcgtcctcctccaccagatccctgggtgggagcagaggtccctgaagttggcgcaggtacggactcgacctggccatgcttctcctgaactcaacccaaacaactcgggaaaaccctggctaactgcatggtcatgatcagccaatcagttctacgactgtaaggccatcaacttccgggaacggcctggcggccgccagcgtacataaaacctgaaaggcagcgaagctccgccccaagtttccaggaattgccgaggggagggcatgtggaaggggcggggcaaggcgggttaggggcggggaagggagagcgaggggctgggagatgggcggggcttccgctccttttggagcctggtgctgggcggtgattatcaggaaggtgctgggacgaaatcagcgctggggagtgacaggcgtggcacctgcagaaccgccagtgcacggcatctcctgcggagagagaacggggagaaagtccacttctgctgagcttgaagaacctggaaaagcaacccccaccccaaccttcccaaaacgaaagtatagcagatgcccttctggaatcggatctagggcagggacctagaattctgtctttttaatgtacattccgggctgtccattttgatgctcagctaggtttggacaccactggattagataacattcaaagttatttttatcctttcctctgtgagtacaccctggtctcccaaacttatttaagctgggctgctacctgctgacagtggggcaaaagtgtctctttgcagcccagagtatagacaggaataggagaagggaaatagaagagaaaggaacgtggttttaaaaactattatggggctatgattctcttacttgatgaggatggtacttgaaagtcttggtactatttaagaaataccataaatatattactacattactgtattgatactgtttattttgggattattcctgaaataactaaacacacactatttactaaatccaaaagcacctgatgctatatttaaatatatataaacgacaactagcaccaaatatttaagaaaaatgtataggagaaaatataaaaattgatttcttttcctttgggtaccaattgaaaaatgcccacttttgttgcttttaaaagaaatactgttgcagctgacaaaacaccagtgtttccaaggattggctatatgaggttgaattcctttgacattcacatggctactgtttccaccacaacattgaatctcctctgacaaatgtcacacttactgtcctcttcgtttcaaaaaccagtggatacttttcagcctttgttttacctgacctctcagcagtatttgatactgataagtattttcttcttgtagcattctgctgccggggcttttgcagcttgccttctcagatttttctcctttctggctatttacagtcttggacccctctgcttgcctgtaagtactgttattccccaaggctccatcccaagcatcttcttgctctataatcctttcctcaatcatccttcacctacatgctaatgactcagcctaatctgatctccaaaccatacaaacaactgcctaaacactgtcagtcactactggatgccccttggctacttaagactcagcatatctaaactgcaacttatcattggcttcccaaatctgggtcacttatgagtatatacatgggatattcttgttaccaacatgatgacttgggcacaagaatcaactctagatctctagatgttaaacttttttttctttctctctttttttttggggggtggggggacaaggtctcattgtgttgctcaagctggtcttgaactcctaaagtcaagtgatcctcctgcctcagtctaccaaggtgctaggattacagatgtgagccactacacagcacaggtgttcaactcctcctcccttttttttttttttttttttggtacaggtctatagtggcaccatctcagctcactgaggccttgacctcccagcaggctcaagtgatcgtcccatatcagcctctcaagtagctgggaccacaggctcacaccactaagcccggctaattttttgcaattttttgtagaaacagggtttcgcc

SEQ ID NO: 916287 - DNA, 4001 bp, Homo sapiens
gtcagaacctttactgttttccatatagtgtctctagtttgtttataattgaatttagctggaaacacttttatctttccactttaatcatcctaaatgtctctggaaaaataatttaatatacaacaggcacagtggtgcgtatgtctctttgtctctgtttattaattaatttctgttcattatagtgatctgttcaagtagcattgagttttcgaattttttttaactaaaaatgctaaggaagataaatcactattaaattatttgcttccatttcttatgggtgctattataagtcttaaaacttctaaacagaatattactgtaaagtaaaatttgattctttcttgatatgtgaataatgacacttaggaagttgctagagtcagagtaacacttaacgggaacatctgacatacctatttagaagtttttatggaattaatatttttgcaaacttatgtcagtctgatttaagtaaactattttaatagtttccagacaaaatgaacacaaggaaacaggcatggctgcagtatacatccatggagaagaaagagaaagctcagacttcaaaacataatattggtgcttaggttttgtggggttttttaaagtccacatacacataatacttgttgaaaatgtaaacatactaaatatgtgtggggaaaggataaagaggctaagggtccagattattaggtgatctaattatagtatctctcttttttattttttgagatggagtctcgctctgcacccaacctctacctcccgggttcaagtgattctggtgcctcagcctcctgagtagctgggattacaggtgtgtgccacaatgcccagccaactttttgtatttttagtagagatggggtttcaccctattggccaggctggtcttgaattcctgacctcaagtgatccacctgcctcggcctctcaaagtgctgggattacaggagtgagccactgtgcccggcctaattatagtatcacttctttagtccagaatttattttgccatcaaactcaacacctggagcacaccaagaagccagcacagagggccactgagcagccaaaatgaccactccaaagttcatgctcacaagtgttcagatagatccaggcttttactcagagctttcctctgaattgacccacagttctttcaagcttggttatctagcttctggtgctacagagcattaaaaacattagatgcagaagtttttggttttttgtttatttgtttgtttgtttttgagacagggtctcactatgtcacccaggctgaagtgcagtggtgtgatcttggctcaccgcaacctgcacctcctgagctcaagcaatcctcccacctcggcctcccaaagcgctgggattacaggcatgagccaccgtgcccggcctagaagcagaagtttttaatgtgcccaatagtaagatagaaacagaaaaatctataaacagaagatgtaagaacttaaagtttagattacttacaagacaaagagacatatgcatctcaatagtccctaataggctttaaatataataaactgatgctgctgttgatggtcctgagttatgactgaaatgttaatattcattcaatctattccatttgactggctaggaactaataattttaggtagacttctaatgaaatggataaaatagaataaaatttgatgcctcaaataacagctaacatttactgggggcttaccatgtattaggaactattctgaaagttcaacacatgcttagaggaggttagcttcaattatctgaaaaaattcaattataagaaacatttcaatccgcaaaggcactgggtaaggcatcattgtgttattacagttttctgcatccagtcaaggcttgtacttacctatagggacaaagggggagtctctagatttcctgattagtcgggataattggccttcatcctcatctgctgaccactggttatctgaagacatttttttctctagtaacaataggatataaatgtggttgccgtgaatcattaaaaataatttgtttttcctctcccatcatactcttgattatgtgtttttttgttttcatttgtttgataagcctatctgctcaactgaaacaattgtctttccttcacacttttcactaccgaattttttcattttgcaggggaaggggataagaaaaaaatacatagaggaaatgataatcagatttcatgaatacagagtaaaaacacagatcataatgctgttattcagtctcctttccactgctcagcatttgagatcactgggaacctcaggacttcttccacaagcactgtatttgaagaacacattttctttttaaagtatcattttaaagaagtatggcagtgccaacataggcaaaaatacttccagatttacaggtattgggagaatgatcacttcaactctgcagaatgtgcagggcattataaagtcattcagatatttaccaagcacctactgtgtgccagttgctatgctagacaatggattccttgtctagcctggcttgtctacataggatgaatgaagaaacttgcaaaagcaactataatcacaacagatttagcagcgcctgagtctgttccctgtgcagcttattgtgttcaccccagaattcaaatacagcggcttcatcctatgaatgagacttcatcagaaaacttaagcgtaagaagcacaatacctgtggcacaccccgccacctgctgtctgtctcctgttgttccttcagcaagaggctgtagatcagaacaggtgtttgttgtaaggccaggacacgatgtgcaatttccaactaattgataatgggaaagcccagaaacacgccccaggggactgggggagtggtcggctggtattggccaagatttccagcaccctgctagaaactcaccagtagcagcctgggccacaaactaggcttttgaagccaacattaagaaaaacatgaaggctttggaagaagatgcatttgcttaagtctgccttcacaagggagctcctgacttccctctgtgactgttgagtcttagtacctgactcctgggcccaaaattgaggggaaagagggcacagggtcacaacactgggcttggaggggaaggggagaagatagccatcagaggccaggattcttgccatccttcggaaacacgccctagccagaggaggtgcgctccctgcagttggaatctccggctgaggcgatgagagcccgccgggctcacctggcggtaaggccatcgcaggtgcgcctcctgcaaagcctcgagctgcacacgcgcccaggggaaagacgtgacgttgctgcacctgtggctagtccctgcgcctgtgtgtgagacctgagtggggctgtggagacccgagaggctgtggctcttgaggtgggtcggtggtggacgtggcctttgcttctgttctgaccttgtagccttggggccccttgagaccttggagaacaccttgctcaccgcctccctccgactgcagccatgtggacctagagatgagggcagaggatcaggtagcgttcatggtttttcccttgtaacttaatgtttaaataatttcagacttatagaaaagtccccagaatagtacaaagaactgtgtgtctggtacccgcattttcctttattaacatgtttctttctttaaaaaatatttttggcgaaccacctgacagtagcagacttatgccttttcttccatatacttttgtatgcatttggggcattcttttattatataaccatagtacagtgttcaaaatcagaaacttaacattgatataattctgtttttcaatctaaagattttattcatattcaccagttgtcccaattatgtccttaatagcaaaaaaaaaaaaaaaaaaaaatttctggtctagcatccaattaggatcatatattgcatttagttgtcctgtttctttagtc

SEQ ID NO: 916288 - DNA, 4001 bp, Homo sapiens
acaaaaattagccaggtgtggtggcgcacgcttgtagtcccagccacttgggaggctgaggcaggagaatcacttgaacccgggaggcggaggttgcagcgagctgagatcatgccattgcactccagcctgggcaacgagagagactctgtctttaaaaaaaaaaaaaaaaaatccaccttcttgtgtatcaaaccaaccactaaaatgtgtggtcctgtatcagagattctctctttgacactcaggaaggttgcccttgacttcttatcatttaagagtaagatcaatgaagttggtccttcacatcccatctcctccatgtagcaatcagacctctttatacgtcctcaaaggcacgagaaaaaactcagtgaataaacaaagtttctgacaacatccagatatgtctgccaattcaggttttctccctatgatctacaagttcttggcacaattaattatgtattggtgactttaaatttttttaaaatgacgggctatccgggctgaaccagttgatggtgatgaagatcacaaggctaaattggtaatttgcagccacctgggttccagcacttcgcatttctaaagccttgatatcctcaggatttattatcgctttctgggtcaatcccaagcacaaaggttagaaggtctccctgcgttctctctcatttcaaaacgaaagctgttgtagagtgcgtgtgctaactagatgtgaaggcaaccgcagaagtcatagctctctgcaaggacaagtgggacggaacttgcaaatagccgccacaaacgcaaatgtcaccaacctgctttagacaggagtgggaggggtcctctggcttcctttatctctagagtaaaatttttcagccatttcagtcttggttgacttattttggcaaataaacaagtatgcccccctccaccgcccatcccccaagcctgagagcacttcaagagtttgtaaaataaaaagcaacaggaaaccagaaacgcagcaacgtctgcatcgtgggtccccggcacaaacacaagtacaaaacgcacacccgcgcccttatttcatttctaacgccttcccaggataggcatcatctggaagagttacaagcgtgggaggcgcaggaagggagccccaggaagtttctgtctgtcgggcgccggtatttaatgagggggtgtgcacctatttatacgtgggcagcgctcgggcaaacaagtctggcgacatacgagaagcttttcacccagcaaataataggagactgtgcagccctgggaaaccgctcacgagagaaggaagctgggagtttaaggaatttcctttaaggaaattgcccgtgggggcatcggtttcagggggtaggagacgggggcaggagccggcaaggagcggcacggaaggtcggggaccccagtcgggccgcgccggccccgggagcacctggatccccagccccctcgacccccggcgcgctgggctcgcgcacacccaaccccggccccatctccgtcccccgccgcctcagctccggcgctcccggcccgcgcacaccctgaccccggccccctcagccccggcgcctctgggcccgagcgcccggcgggagcggggagcgcggcttccggttcacctgcgcgccggtcggctcgggccgcggaggccggcggggggcggcagcggagctctcggagagcccgggcggacacaggccctgcccccgcgccgtcccccgcccctggccggcgcctcccgggccccagccgttcgcgcgtgaggggtcagggacgccgcttgcccgcccgcccgccgccgcccgccgcccgccgcccgccgcccgctcgcctgggtcttgtcgaactgctcgcgctcggcctccaggctgtggcccggcctgcggctcagcacccgcgccggcacgttcttgatgctgttcatcctgccgccgccgcccgcttttgtccggctccgtccgcgcgactcacagcctcacggtccggcagccccagcctaggcaccgcgaggccaccgcgccgcgcccgggcccgcccgccggggaggagcccgcctcgccccgcccccaactccagggcacgcccctcccccgcacacctccaaacccgccccccgcgcccgcaaacgcctcgcccgcccccaactccagggcgcgcccctccacccgcacacctccaaccccaccccccgcgatctcgggacacgcgcctctccccgcacatccccaaccccccatcccgcggcgaccccggcacacgccccgccccccgcacacctccaacccccacctcactcacaaggttggggcacaggccaaacgcccccccagctcctccccacctctaatcccctccctaaacccggaggggagggtaggggaagggggagggggaacccctccctcctccttccacccagggtagggaccccagccaattccctctccccacccctcctccgaactcactaagtcttgtctgcaccagggcaagatctggttaattggagaaaatctggcctccatgagtctggtcggtggcagcacagatagacgctttttttcctttttggtcttaatgtatgtgtcaaaaggcacacaatgacactctcccctctttgtgcaattctgacatagctgcagctgttatccatgcggggatgcaggatgcatttccagagacgccgccggctccgcaaccggacacctcgccagctccagggacaatgggggctgaggccgggcgctgttaggctggcacagaaggcaggcggatctgaacagcaaagtacaccgaggagatgccgccaggggtggcgtgaggctttttaaaaacattattattggctttcccttaaaattactggtcacaagactgaagtaaaaaaataaataaaagcccagagtcctctctaagcgtagctctcagatgggtattgtgtttctgctgtttccctttcctatcggaatgcagatgtggaatcatgcataaaggtcccttgcttttgaagggagaggcaccgcctgcctgtaaggaggaaaatgacgcccacgtaatcctgacccttgtctccctagtgagactgtaacctgtctgaggtcagagaccctttcctttcctttcctttcctttcctttccctttccctttcctttccttcctccttcttttctttcttttctctctttctctctcttctttctttctctttctttctttcttttcttttcttctctttctttcttttctttttttttaaccgagcttcactcttgttgcctaggctggagtgcaatggcacaatctcacctcaccgcaacctccgcctcctgggttcaagcaattctcctgcctcagcctcccaaatagctggaattacaggcatgtgccaccacgcctggctaattttgtatttttagtagagacagagtttctccgtgttggtcaggctggtctcgaactcccgacctcaggtgatccgcccgcctcggcctcccaaagtgttgggattacaggcgtgagccaccacaccccgccagggacccttttctttaactgattcctcaccctccagcccaagagctagagctgaccccaaaagataacatttgccaagactctcctgtcactgcaccaaaaggagaaattaatcctgttttctctaattccaatcactaaaaagcttctttatcagaataacggtagaatcacaatagctgatatgtactgaatgcttattatttggcaggcactgggctaaacccttcatatgtaacttagtcaacttagttgatagctgtgctctaataaagaccacagtaaaggggctttttgcggtactccagctgtttctcacactcctttttccacacggaacaaaagtggttctcctgtgacccttcacgcatatacagcatcccttttcaaccaggcaacagcccctgtaggtctagcacatctgccacagagacttcccattagcaa

SEQ ID NO: 916289 - DNA, 4001 bp, Homo sapiens
cccaccgcaccaaggaagctatatgacttcttcatgtttagaatagctagagcaagaccaagcgtggtggctcacgcctgaaatgccagcactttgggaggcggaggcgggtgaatcacttgaggccaggagttcaagaccagcctggccaacatggtgaaaccccgtatctaccaaaaaaaaaaaaaatacaaaaattagccaggcgtggtggcgcaggcctgtaatcccagctactccggaagctgaggcaggtgaatcgcttgaacccgggaggcggaggcgagatcgtgccactgcactccagcctcggtggcagagctagacttggtctcgaaaagaaaggaaaaaagaaaaggtagagaaggggcagattagttaacgcggcatggatcacaccgcatcctggggtgccaagcctaatgagaagttaggaaggacagagccaggagtagagcgaggctgttatacggagctttaccggaggccggggcgacccctacggcctggacgcaggctgatcaccaggtcttccgccccctaccctcgcctactggaaagtgcgcttaactggtagcaccagccccacctttctccaagaccctcactacaccccgggagtaccgggtaggaccacgcgcttggtaatcccacagctgtctctcttacattctcactgaacttattagaacctaacccgccacccgtttcccttctagacccccaggctgctctgaacagggcctttactcggaagccagggcttacctcccggctgcgatagggttatttgtgatgggcatgacactgctcggagcgggggattcccggcaacttggcgacctgcaggtgatctggcctttcatgccggcgtgacccccactgcctgcctgccaactccacgcccgccgccaggtggccgagcaggacgctacccgcttggcgtaggcaactttacgcagctggctaagagggaatcgcagggtgtcgcgagtttcgcccggccgccttaatctcagcatctgagcttggtcacctctcactcaacgtcagcgattaagtaaaatagtacccagtaagactacgcgccacactagagctgcattcagctttcgggcttgcaggtagcggcgtgctgcgacctcccatttcctgcgacttagcaagccctgcacacgcacgaaccgcccttgacgcgtgacgctcacccctgaaggccagcaggaagtcacctaagccctgatttacatggaagccatccgatacgtgcttatgggccaacgactcggccgcttagaagaccatgaccagttctaacactagggctttgtacaagcactcttctaaacaaaatccggtgtctggattttgggaggtcactactgcgttgcgcggcacctccagggtcgtacctaagcacaggcggaaccccctccttgaggtctagttctccccgtgcccgccaagtctaatcccgagcagatgctcgggccgcgaatatcccatttccggtatccggaaggcgacatcaaagggttgatatttacccgttatctaggaagtgttaacagctctttctgtgacagtttgggggccctgaaaagggccttttggagtctgtagagaagctgtggggacagctcaaccgccgaaaccataaagggtgcgaccctggcgtttcagcgcgtacaccacatccatggccgtgacggtcttgcgcttggcgtgctccgtgtaagtcaccgcgtcacggatcacgttctccaggaagactttgaggactccccgggtctcctcgtagatgagaccagaaatgcgcttgacgcccccacgtcgggcgagacggcgaatcgccggctttgtaatgccttggatattgtcccgcagcaccttccggtggcgcttggcgcctcccttacccagccccttgccacctttacctcgcccagacattctgaaatcacagcgcctactcagcagaaaatcgggctgcccactgtgattgccagtcgcagaccagggcttatagtctctcgatgcggacctgtttgaaaacatcaaaaaagtgggcggagctctaggccccacctctggagacatgctatagttgttaagtccaggaagcagtcagcgaaaccagcctgatttttttgttgtttgctcttttgggaaaattttttctgatgtttggagaaaggttcatggtgatacgttttaaagttaaaacagtatgagctaaaagaatttatattgccttttctcagcgcttaaataaaagtaggccagatcctatgcacgttccttgttctgtccctccctccttctgttttttcaaacggaattcctgacttactatgaaactctataaaaacctgaaaagctttacatccgagatttcaaagcaattacttaaaatttaaaatttttcacacgtgggtcttctgaagacatagtagggggagaggacttttttctcttttacggccctgcagataattaaaattctttcaattgaaaaaagaaagtgcagcttcccgtcccccacctacactccacccccacctccccccgacccccgccattcccctttcagctgcttctgcgcaatttgcaggttttcctgccctgcaagagcctgtgtgcttttcaaccaagtaacttcctgtggttatttagttgaaatattgtcaatgtcttatgtcattcaaatctcaggttctcatctcacattttccacttaaaaattcaaagttcttgtaaaacaatggatgccacaatcatgacttggaataatgatttctactgcaaatcccctcaggaggttctgaatcccttcctttctcaagagaatccctgaacaaaaacgaaagtttctgtaaggtgtcaccgctcttcaaaggtgtcaggaccctgtcttctctaaaggttttactgtgttaaaaagcagctgttatttagaggatgagtcataagtctttcccaggtagttaattaggattctgagcaatgaattttagtaagtggggcttctttgtccctggtcttgaagataagcctttacagcaggaagactttatggtaaaattttgttatatttataaatgcctatagtttacatttgtttcaatccatgcccatcttcataacccaaaaggtatttatttttcttttactttttgttaaagataaaagagttggaacactgtcttgaatggctggaaaaagtcctgaatggtcgaacttcactcatgattttaatatttgactcagagggaagaggaaaagtctatcagatcttgaagagataagaattattgtaatggggccgggcgcggtggctcacgcctgtaatcccagcgctctgggaggccgaggagggcggattacgaggtcaggagatcgagaccatcctgactaacatggtgaaaccccatctctactaaaaatacataaaaattagccgggcgtggtggcgggcgcctgtagtcccagctactcgggaggctgaggcaggagaatggcgtgaacccgggagacggagcttgcagtgagccgagatcgcgccactgcactccagcctgggcgacagagcgagactccgtctcaaaaaaaaaaaaaaaaaattattgtaatggtaaaatcggttgacttacttatagttaagctttctaagaaatcaagactagaacattttcaaattagaaatctcttgcttattggaataaaagaaaaaaaatcgtgtctaaaatagtaatacttttaaaaactcttgaaaattccccaagatacaggcaaaaatttaagctagtttacagaactcattccaggaacatctcgttaaaaactgcatcagagatttgtatgcccatttatttggtatatctaagagttattggatgcttactaacgtatttaattttcaaaacactttgatacaggtagaggagtcaaataacttatcaaaggtcactgctcagtggtaaagccaggatttaggctga

SEQ ID NO: 916290 - DNA, 4001 bp, Homo sapiens
agagagcaagttttaaagcccgagaaagtggagtttaaatgttctcaatagacatatcccgctccaactctgcccgccgcggcttggaaattacagcgaacaaaacccccagccctgcgcgctgagcgcagctctgcaagcgccggctgcacgcttaattggttgcatccgcagacaaaaccctccactccgcagggtcccgggcgcccctcgatcgtcccctactcaacccccggccactggccttggagaagagcatttaatggctgcagctctgaggcgcgagatccaggggcaaaagggggaccgggcccctgacaaggaagcgaccctggctaccctgcactctcttggacactcctttcaacgcgcccttagctgggcgagttaaccccgtcctgcggggaaccaggctccccgtagcccctgccccgggctccctccggcggccgccgcatatttaaagagcccaaaaaggaccaggcagccgggtctccatgcgttctttgtcgggagggcgcgagtcttgggccaccgagagcttggaggagggcgccaagggggcggctgcggcgcgccagcccccgacccgcgagcagccccgggaggcgggagaaagagcctccggcccccaagactctagccccttcagcccagatcggccgaagcgcccgggtccccggcacctccttcctcccgggcagttgcaaaagcaactcggaaagcgcctgcgagcccgggtttgtcggatcccggtcgcttccagtcactgggcgacaccgcgccactcggggccgtgcacaatagcgaaagtccgaggacgcgcttcgcccgaccccacctcccgccttccccgggccgcccgccgcggctccccacctccccgcccggagggttgctggcgccccggggccgcgcggcgcactcgtggggtctgcgccgctccccccggccggccggcgggcagtgtgcgacggccgcggcgactgggctcccgcactccggccgccccgcgcgtgtctgggccccggcagtggggacggggtgggctggtgcccccaccgcgccctcgtactgacttgctgctgcttcctggggcggccgcgtcctctcttctgaggcgctggggcggcaggttgtccctgggctgaagtggacggctgccccgcgccctcaccgcgtgcgctcatcctgcctcccgccgccgctaccgccgctgcagccgcttcgcctcgaccgccccggagctgcccagcacctttcgggagatgaggtgatagggctggggacgccggcggggcgagcgcgagctggcgggctgcgagggctgctgttgcttaggctgccgccgctgccaccatcaacaccggacgtccagcggctgccaaaaagagaagaggggaggaggaggaggagaggaggaggcgctgccggtggcggcggcggcggtgggtgggtgccggaggtggaggtggcggtggaggtggaggtagcaagaggaggagggaagcgagggagaaggaagagaggctttgaggtcgcagaggctcctctcgcgggttgggatcaggagttgcgggcaccgggagcacttcggaagcggcttggaaagggaagagacttggagtgaattgtgtcccttgaaatgttaggcggggaaagaattcctcctcctcttccccccaccctgcgagagagagagagagagagagagagagagagagagagagagagagagagagagagaagagattgagattgaaagtgccttgggcagtcggaaagcaaaggaggatggggagactccgccgggatagggtcgggcacggagcacaggcagaggacagagtagtgggtggcaccgcgcctcctagggtggcgggagcaggcagcggcggcaccggagagtcggagggggacgggctgctagctcctgagtcttgcaccaagcgcgcgctgcccgggctggaagttttctgagttcctgccccaagattcaagtgggatgagtgtgtgtgagtgtgtgtgagtgtgagtgtgtgtggtgtgtgtgcgtgcacgcgcttgcgcttggggagggggtggtggtggggggagtgcccacctctaatcgtgggcggataaaggggagggggttgcgcaggaagaaaagtatgaggaggagggaggccaggcggaccgccgagccaaggcgcctggctgctagccagaggcagcgttcgaaatacaactgcctcggcggcggcggcgcccgggtgccacccggagccccgctcacgtgctcccgcccggcggcggggttaaagggacaggccggggatcccgggctggctcgccgtgggcctagctccacccgcctctcgaggtcacccctgggcagttgtcctgggaaggcgcgggaacgtgactgtcccggagccacgtttcggggcttggcctttacctgcgcctctaccgtgccgagccaacactttgcaggaagcgtctaggctgcacctcaggcagcgcaccggttcactgtgagtgggaagggactgcagtggagtgggagaggtcccctgacagccgtactccgcctcggaatgccctcaccacagagcctgcgggcgggcgagcgcgcacatacacggagacatgcatgcagatacacacgaacacgcgtgtaagcacatgcacgcagatacacgtggacacgggggcattcatgcgctggtaaacacccgcatttacacacacacacatacacacaggcacgcagatagacatgcacattcgcagacacatgcaaacaatgtgcacacacagagcgccccagcttcttcattgaacttttttctccaggaaagactagaggcaaccgaagttccctccccatccccctccccgggaatccgatgttcccagggtaaagggcaccttgtagattcctaacaccacaattgcactcactgcccaactctcccttcagtttacctcgatttaaccttctgcctgagaactctctttctgccaagtcctaattttatggcctgggctgttctgagttatgtgaacaccataatggccacagtccgtttttaaaaggtggagtacatttttaaatgtacctcttttcatccttgaataacacaaaactctgaaaaaattaggttcagattttcacacatcacacccaaaattattttggactaattccaaaataaaaactttcacctggggaagaatttatttttttcaaagatacagaccaccgtggaataaaaacgcctactttgcagccctaagcaggagttaggcaccgccaggttccgctgtgcatgtggaggaggcgcgtgtaaatgtctgctttggcgcggcagcgctgattggtccgcgttgccattttaaatccatttccagctgccctttgcagagctgggacactttgctgcacgttgagtgctctgcaggaacccagggtttctgctgggtctgggaacgcttagctgtaatggagagagagagcctccatccctccggatggagcccagcagctgactggggagggaggggtctaacaggaaccaaaggttttctgtcagggcttggctcaaagatggtatcttcatcaaagggattgaagtttcacctaacgattacagtgacatttcctaactgccaatcgtgcacatttaaaaactatcacatatttgcactgtggtgtgcacatttcacatacacgtacaaaataggtttttgggtttgtgttgtttgctcactttttgccaggagtagagagaaattctgaaggtgaatgcaggggagtcactgaggagttcagccagccagttttgtgctgtatacctcattatatcctaggatttttttttttttggtaacgtgtacagaggtcagcaaagagcagattccaaaattttgtttttgcgttaatctttgaatataagagaagcacagaaaaattgggggtgggggaatatacagccacttgttttcaggctgct

SEQ ID NO: 916291 - DNA, 4001 bp, Homo sapiens
gcactttgacctctgcttccccttcaaatgctgtggatcaagcctccccaaccccaccatcccaccaaagggggctgctgaccgagagagctcactcagccaggtaagaaagcatcccctgcccccaccctcaccccaaagcccccagtcccatctggggccctgggcaggtcaggcccagccccaccccgtcaggttgccttcgccctgggtctgggatgcctgactctttgcccctcccctgcagctctggagtcctttgccctcctcttcctgccaagtcagggggccctgactgctcccctgccccctgtccaggccctcgggaggctccctgaggcctctgggaaagcaggaatccaccagccctcccccaccccagctgggatcaggaccttggacagaaaagagatgggcccctttggagcatctttggggctcggtctctctctgactccctggccaccccctgcaggcctctggtccccggtcatagcaattgagagcaccgaacagagtaggtttggggcctcagtttggtgaacttagtctagctccttcccggctctaagccccagtttccccatttgtgaagcagagtcaccaatagcttctgcccaggactcctcaccatgaagggaaattattcctgtgaaacctcagcacagcgcccaggaagtagtgaacctcctcaagcaggcgctgtagggtggaggtcagggagccgctggggaggggtggcccctgtagcccccaggccatccttccttctcccccacacccccatcccccacccccactaggtgggaggtgggttggcccagatctttccaggccaccattcctacaagttaatgatcacagaccttatcagagccttttgccatttataaatttataaaacaaaagagaaataataaagcacatgggtaattagtaactaggtcagctctgctgaggagaggggaggcatcgagctcaggacccacccagttctccaggagacggggagtccgccagcggatggggatgtagaacgggcagcctctaatggcgcctgctggtgaggtggggtgcctgtggccatacaggaaaggggagcagctcccacctcgaggctctgtctgcctcaggtaagaaagacctgggcttccctggctaaacgcatgagtccctaggaggccaggaaagcccccaaaccccagcttcgggccctcctccctggcagtgcttcctgggccccggagcctacccactgaggactcagtgcaggagttagggtctggagagtataaatgatcagagtggctaaaaatttccaccacctcccagttctccaggcatttgagttgtgaactcacctgctttttctcccatcttggacccccctgggaaatgtcccccttgcccaaggactgggctaaaggcctgggctcatgggatttgggactctgcagaggagcagttcaggggctggaggctcaaacctccaagcaaggacccctgggctctcatgggccctgtcccccttcccagcaactaggctaaaggctgaaggtcatggggactcaactcagaaggggggctcgttaggagctgaggggggcccctctaggctctcctgggagcggggacggggcagggctccttactgcagaagggtctccaccacggctttctggtgggccgcctcctcagggctgaggttctccagctctttgaggatgggtggcgtgaagtcttccccatcgtcgtccgtctcgtcctcggagccccgagtctcccccagcccattgggcagctcagccagctcccctcgaccgccgccgcaggactcccccttgtccagggggccttctccagccaggaggtagggccccggctcacccagtgcctggatcagtgcctctttgctcagccctgactcgagcagggccgccaggagctccgtctgcagctggctcagtttagaaaccatggctcggctgccacagggccacgcggcccgggtccaccacgctagccgcctcccccaccgcgtgggttgcgtttgcctgccggccggcagacacaaaccaaactccttgcacccactgcccccccaaaaccccactagccaagccctgtgggcacccccaacccccaaccctggccccagcggcccgtgaatcagggcccctgcctgttctgtttacattggagctggggaaattctccaaggttcatatttatccgtgtgcttagcgaagggactgaactttggacttcagccctgcaaagtgcaggcctcatggcagcggagagggacagggagctatggcctgcgatgggagtgggcagaggggagggtgggggaggcgcaggtgaggggccctgagcagctgggatggaaggtgctgggagccagggaggccatcaggagagcagcgttgggtcccacccccgaaagaaccttgtaggggcatcatgctgagacaggagagccaaaaatgcttgctgcttacgagagcggcagcagcagggagctctagacagctgggctagctcttctcaagggcagaggatgctcacggccattttggggcccttccatccattttgggacccttccaccccactcccggcctgacaccaggcctccctgtaggaaaaaatatgttaagattaccatgtgccaagaacagtgctggctctgtgagggcgaattcacttcattgcattctgctaccaactgtgagcagttacagagattatccccattttatagaggaggaaatcgaggctctgagcggttaagtaacttgtccagggtcatacagccagcaaggcagaaaacatgcaaggtgagactgagttgggatgagtgtgacacttgcctcaggtgcaaatttatttttttattttttgagctatgttctcactttgtcacccaggctggagtgctgtggcgcgatcatggcttactgcagccttgacttcctgggttcaggtgatcctcccgcctcagccacccaagtacccaagtagctggcactacaggcacgcaccacgacacccagctgattttgtgtgtgtgtgttgtgtgtgtttgggttgtgtgtgtgtgtgtttttgagacagagtctcactctgtcacccaggcttggagtgcagtggagcaatcttggctcactgcaacctccgcctcccaggttcaagcgattcccctgcctcagcctccggagtagctgggattacaggcacataccactacacccggctaatttttttgtattctttattgagttggggtttcaccatgttggccaggctggtcttgaactcttgacctcaagtgattcgtccgcctcggcctcccaaagtgctgggattacaggtgtgagccactgtgcccggccttgtgtgtgtattttttgtggagacagggtcttgccatgctgcccaggttggtctcaaactcctggactcaagccatccgcccacctcagcctcccaaagtgttaggattacaggcgtgcgccaccatgcctggcagcccaggtgcaaattttaagggaatgccaaaaaacccagtcatcaaggtaaataacatttttatgcaatatgtttttaaaattaaaatgaatgcaaaaccccaaagaattaaaaacagatgtctatacaaaaacttgtgcgtgaatgctcatagcagcattattcacaagagccaaaaagtggaaaaaacataaatattcatcacctgatgaatatataaacaaaatatggcttgaccatgcaatggtatagacatatatatttttttctttctttttttttttttttgagatgggggtctcgctctgttgcccaggctggagtgcagtggtgcaatcttggctcactgcaacctccgcctcccgggttcaagcaattctcctgcctgagcctcccgagtatctggaactacaggtatgtaccaccacgcccagctaatttttgtatttttggtagagatggggttt

SEQ ID NO: 916292 - DNA, 4001 bp, Homo sapiens
gtgagaagtcagaactacatgtagataaaccatacataccacgaccactgaagtttcctccacgaccgaagttgtcattcccaccgaaaccacctccacgaccaccaccaaagtttccagaaccacttcgaccttaagacatgaagtttaagcattaaatcattcatactggagtaactcaaagttacctttaaggtttaattaagcaacaagcatacctctttggctggatgaagcactagccatctcttgctttgacagggcttttctaacttcacagttgtggccattcacagtatggtatttctgaactaaaaaaaaaacatagatacaacatggtatcagggtttagaatgccatacagattgtggaacccttactaaatgccactatctgatacttactgacaatcttatccacggagtcatggtcgtcaaaggttacaaaggcaaagccccttttcttgccactgcctcggtcagtcatgatttcaatcacttcaatttttccatactgttcaaaataatctcttaggtgatgttcttcagtgtcttctttaatgccaccaacaaatatctttttcacagttaagtgggcacctggtctttgagaatcctaataggagaaaaaccataggtttagattagcaaagcctatactcgaataaaaaattttggtaagtttagaaaactcccgaatcttaagtccatagcagcacatatccaagtaagtttaagaagaagaagaaaaaaaacccactcacttctctggagacagctctctttggttccacaactcttccatccaccttgtgtggccttgcattcatagctgcatccacctcctccacagtggcatatgtgacaaacccaaagcccctggagcgcttggtgtttggatctctcattacctgagaacagtgttaatttatgtaacacaaagtctgaccgcaaaagcttttgtcattttaactttgaatagggcaataggaaactttacaccagccttttataaaaagtcgtccagtttcccactaccctagatttaagaggtagcttttaaaatcaaagcaggacgttcctttgccaacaaagctctaactataatgctattaactactttcataagcattcggagaagactgcaccaagataagccaaggaaatcggctgttttactgctttgtcccttccaaatcttaccacacagtccgtgagcgttccccattgctcaaaatggctcctcaggctctcatcagttgtttcaaagctcaaccctccaatgaagagcttcctcagctgttcgggctctttaggagactagagtggggggagggggaagtgttaaatgggctacaacacgaaacaatttccatcgaggaaaagaaaaactagacaccaactgtgtacctagcacttattgttcgttcaggtcgcaacaagacacgtgcttctgcctatcaagggaggccgtatgctggagttgggagtgctaggaaatcgcaagcgcatgcgtccctagtcgccttccgacgcacgcgcaacaaaggcttgggcggtaggggtgcatctccacaatgggactaatcgctctttagaaaactcgctcaccaaggcaaggtttaaaaaaagacaaagatcctgtgtgcctaagaattttgctacgagtaacgagtcccgcatgataactcatggttggcggagagcggcctcatggcgatcaagaggacaaaatggcgacttgaactttgggaggggtaggccgtggcagcgaccgaaggaactgtagaatgggctggtgcaaggaacgaaacccagcagcatcttaccgattcaggaaagggagaggaaaaaattcaagtgggaaagcgcgcctaactcacctctgacttagacatgacggcagggtgaagagagactttaacgatgcttcttcggcggcgtccacgggcagaaaggagcaagctgacgaacgtatctgccagcctaccttcgccctctcttttttaccccgcctcctcgctttcggcattggtagactccgccctggaacagctctgattggatacttgaaatcgcttccccctgctattggcctgtggtgccacattgctgtgtaacgtcattccttcggtcgttctacgccgtctccaccccttggagtccattggttcccgagtaatgttattgttaaccagtctgattggccaaccgaccaatcattcacatttgaatctaccttgggtgtttaacatctttttaatcttccacgcgcaaatattacagtcaagtcgcttggcaaagcatgattaacactatgtattagacaagcagccaggaggtaacaatttttttgcaatgaactcttgttgaccgcacgtgtagtaaaatggcgagttttgcgcaggcgcattaagaagttccacctgcctctgagaacacgtgaaatggcgggcaggagtaggcagtgaacctacggcgcctgcgtgttggcgggagtttgtcctagctttgcgcatgcgtagtgggcggagaaaaaaggtccggtcccaggattggttgcgcaggcgcagggaaggatccgttttggcgggcggttggcgttgcgcagaaggcggcggcggtggtggcttgtggtgcggcctcaccatacaggaacagggcagacgttagcgtgagtgatcactctcaatcccgggtaagtggcagacagtcttatctacccatagtaggtcttgaactgactccatttgggcccgttattgtgtgaaatgaatggacggcggggtggggggatagtgaaggggcagcggtgggtcgggccaaccaatagaagaacagggggcgggatgttttaatccccgtaggttctttggagctgtgcagccgaagactttgactggcttgtgtataggccaattgggtctgccttgagctgccgactgatcggcccttgggccatcggaatgtgggagacgggttttccccttctgagcagcgtctcactgagccagtgagcaggaagcgcgcggtaggttgggcttctccaggaggcagcggtttgactccaatggggaatgcgggatcgggcggttaaacggatggaacgaatctggaaccagtagacggacagcctaaggaaagcgctgggaccagtcgtccaatcggctctccaaaagagggaggtcttcgatttggggttgtgaggaaggggagtcggtgcctgtaatggcgtgtgagggtggatgttttatccacgatgacttctctaacgaagcctttaggcctcagtcccatacacctccttgaaagcgtaagtttgctcctgtattcctcgacttgagcatttttcccccgccccctcaccacttgaggtttggggaacaggagttgtttttttttgtttgtttgtttttaaataatactttcagaagtcgcttctttaggaagactgttaaaatgttagaacgaatgggagaaatctctatgtactgtcatggaaaggcgttcaagaaatatctccttcctgatagtgcatatttctactgacaaatatgtttgtaggtccacagaaaagttttggaaagctacacaccaaagtgtcaatcctagggacacagtaggatcgaggcagattagatctttaatgtttaaaactttgcaaggttaataatttgtgattaaaattaaataaaaaatgaagtcgattgttttgtgtttctagtcataatcacatacttacaaccccttttctgttttatgtaatccatgtgcccagtgcttttattttagtctctttctcccgggaactttcatatatttcttttctttacaccattgaagatatcctaaagtccctctttttgctgttcctttgaggatatctgactttggaataaaaaagaaacaaagagggtaatatttagggttctggggacagaagattcatccatcacctggattattccttgccttttaattagatttccttcgaagtgtgtt

SEQ ID NO: 916293 - DNA, 4001 bp, Homo sapiens
tgctccgctctcagtatttcatcttcctctacacccaatgagccccttatatactgtcaccagtagccggtgttgtggggagcaggtttattcttccccgttggttgggcctttttctgaggctcttgctacaacttttcaggaaaagtcgttcccctcagcttttcctcccctgctcccgtttcctccacattctttccccaagtatcagagaaagatcccgaaggcccccagctcctacagcagaaatgaatcttgaaccctgagcttgaactctggctgggctttctctcaaccaaaattacagtgaaatccaaccaaagccacattccctttcaggagaaaacctcttgccacgcacacagaaatttcccaaccactcatttgtaagctgcttttggaaaccaatgaaaaaagataatttaactagaaaaaaatggaaaagaaaaaattaaaagaggaaacagaaaacttacaacattccaaatgccctgttccaacgccatccaagccaggcatctggaggagggagggacgtggcgggcagcccttcacctccacctcttccggctccagcctcgctgcccaaggcccccggccgagccaaaagccgcaggagcccaagccgcacgcacaaatcagacccacaaacaacaaatcgcgtttcgcaggaaacaattttcaactgggaaaacgcagtaaagagaactccccccatctccccagccttccctagtccctggcccaagatcgccattttaggctttttgcaagcccctgacctgagctgggggacgtcagctccccaggacaccagcattgagaaagcaaaccacagccagcacgcgcctgggagcagccacccgtccggtgcagcacactgcgcctgcaggcggcccgcggtgcgcaccgcccccgccttagcacccatggccggggcagggccgacacctccacgtcgccgcttaccttccccagctaagtgacgcgccaccagcctggagctcagcggacgctagtcgaaagccagggtcgcattcccgaaatggtctggggcctcctgggcccaaccctctcccctgcccccctccccggccgcgaagaccaagtgccggaacgtcccagtggcgcccgcggcccaggcggccttacctttcgcttcgttatccgaggtgtctgggctggagtcggcagctttggccctctccttttcgctctccgaggggctccctttagggcccgccaggctctgctccgtcttgatttcattggggctgggggtctggctgtcggacttgggggtctcagggaaactcactttgccccccagctgaggcgattccagatgttcggcgcgcgggttgagactggcccgctgctcgaaaggggcttcgaagtcgttggccccagaacagtggggcgtcttgtccagcgcggagtagctcgggctggcgcggtagtagctgggcacgggtacctcgtgctccccaaggcaggactccggcaaggggtgggagtagagagctgcctcggggccacttttcgcccgcttctctgcgctgtacatgcagcagacattctcctccttgacactaggtgggtaggagcaggaggacagcggcctgccaacaggttgttccaggcgataggcggctttggggtcgccccaggagtccagctgcgagaggtaggacggataggtgttgagggcgaggctggggctgctgccctcgtccctcttggagagcgagggcgcgagcccgcagcccctcatcaccccgcaattgaagtcactcccagactgcatatacatgcctgcgctccggctatagcgctctcctccgccgggcgcagccaagggctccgcgtacgagttcggagttacattgcgagggcatgtcattttcagagagaggggtttttaaggagcaatactacagcggaggagctgacatctttttttttccccatccgggagggggggcgcggttggaggggagggaggaaaaagaaggggagggggggaaatatcagctccgtaattatccgcgcattcggttctcaccatgtgacggctagaccaatgggatttgaaaatggccttgatgattcagacggccgtgacgtcagcggggtcaagttgtcggcaggcggagcgcgcagagtggagtaacagcgccatctagcagctgcctcggggtaggggcaccggagcccttccccgcgaacaaaggaagcgccccccgggcggcaggggaggtagaggggtggaggggggtgggggtgggggtgggggttctaggaagagtggggtttgtttatccagtaaccagcctgtaactcctggggagaagggggcggagaggggggaaatgcgggagagagggagagagcgaggcaacccggggctcaaaacagtcaaattcaaattaaaaggtcgagacacgaatcaggtacttctccccactcttcatctcccctttccatatccccggacccgactcccacttcttaccttggggatgggagtggggtgaggtttgtgggggggggggtttggggggatctgatgagcagagaaaggggaaaaaaagttaaggaataccaaacaggactaaagtttctgctctcccgcctcctcttttccccgggcttggccctcggggctggaagcttgggggccgcggcgctggagttgcaagtttcctgtgggggttgactgggaatctccagcctctagggtgggccagggagggggtcacggtcacttcatggctgctcggaaaaggaggttccgaatggacgcggggtaggggaaagaggaagccagagaccagaggcacccgatccccgacccgagagctgtggcctgggcctggcagggtgggcggctcctgggtcaccatctcaggggcccacaaggctttggccttggagccggttctgctgctttacttcaggccctggcggtcctcgctttccgcttgaccttgcccccgctaaaacagggaatattccgggaaagaaagagggaacctgcggagcctcggtcagtttggaggagtcacgtatcacacgggaaaccagcacacaagacgcaacaaaacccgacccagagaagcgtcctttacagagcgcacgggctgggagcatgtttgaaagaagacagaccagtctatttttgtggttgtttttaaataaaaggaagaaataaggggaaccgtatgtttcaaacagttatttccgtttctccatcgccttcttccaaagcgaactaaactctccaccccttcctcaggaaacggaatctggagaacaacttgtctttcctgtcgccccacatttttccttggacagagcctagggttcagactttccgaagggctggagtttggcggggaaaggactggagcccagcgccctggagtggaggagtgaggaggctagaccgtttctaaggaggcccaagcccgctgcggctagaagaccgcagaaagaaatccgccgaatttccccatccaggggtggagagagaagacgcaggggttcctgaacctccggaaaactggaaggaaatgtggagtgtatgatttgcttgcaggaccggccaggggagatttgaaatggttttgtgttttcatatgcagggtcaccgtggcctcagcatgggggttatccagggcaaggttaggctgtttaggccccagacttgggacagtccgggcagcagtcaatccagggagccatttgtcccaccgcccatcccgcgggaaacgggcgagactttatggccactctgtttgtattatctgcattagtctttccccaccagtttgatcgaaaccgttcccttttacgaggacccaacgaaaatttcccgtcatatttatcagccagggataaaaatttagtatgggaactgatatttcctcatttatgggacgatgaaattaaataccaaagcaattgagaattatatggctttgggggttccctccccc

SEQ ID NO: 916294 - DNA, 4001 bp, Homo sapiens
acccgggcgaccccagcccgctgagcgctcagcggcccttctcctagcccaccgcgggcagccctcccgccaggcggctggctctcctgcagccgcagcacccgggcaagcctcgaccccctgccaggtctagcgggtccccacccccccgccactgcgccaccccgtccccagttctcaggcgagagccgcggctgacagggtctgggacagaaggaaagccctccaggtacacgtgcgtcccctcgggccccctgtctgctccccctccgccctcgggcccttcctgggccgccctcctagtggttcggaaagcccaacccctcccccagaaatctggggggaaagctgagaacaggcgcgaagcagtgaaatctggcgagagcagtcgggaggcggggaggaagccggccagcaggcaccgagacaccagagagccgcttccggggccctggcgccccgggaagcccgcggggcagcgccttccacaccgcagttctaggcaagcactaaggccgcggacccgggagaaacgcccagacccccgcctggaacgcagtggagtcctgcgccgcctcgccccattcccctgtcgccgctgaccccagagttgcttgggtttctgctcgaggacccgcgaacacatagtttgaacattttcaaaactagttttaagaaggatcatagcggtcctggcttgcctctccggtctcaggttctgctccattgctcctctcccccacctctccccctctctggatctctccctgtctttccctcgccctcccctttctccccctccacccctcccctcctccccactcctcggcagcccggctccccatacttccttaaatgctcctctaagttcacgatcaaagttaatatcgcccgcaatggttgcgcttttaaaaatttcacagaccgagggagataacgggggaggggggttcacccggcttttccaaagagcccttttccctccctccccaccccttctccatcgtaaaaagtcgagtcgttgggagagagggctttgtaggttataataaaatcctttgaatgcttataaaactccacataaaatcggactgacccaaaacacgaggccgtccccgctccccttgcctccccccttctctcgccctccctctctcgctccctccctcgctgcccgcccgttccccggccgctgctacctactgggggcggctcctttggccggctccttggccacggagtgggctgaaccggacgagctgggatttgtgttctcctcctcagcctccgcctcggcacccgcctcagcccgggacgccagtcccgaggccgggggtgcctcgggctcccccttggcctcgcccttgccggagcaggggggctcggcgggcgggtcgccgccaccgcagtaggcgttgtcgaagaaacggtcgaaggcttgaggcaggacgctgttcttgttgactgaggagtagaagccggcgggggttgcgtgcggggcgctggggtggtggtggccgccgtaggagccttcgtttttcatgaggatctcggtgacggtggaaggaggcaggcactcccggtgcataagctcgtcggccgccgcatagcaggaggagtagctgttccgatggtgccacttgccggatggctccaggccgtaggagacctcccggaccgggggcacttgggccgagtagggataggagatctgacgagagggggcctggggcaggaaggaggagaccgtggagaactcgggcatgtagtaagtgcaactgggcagatagaggttggaggcgcagctccctcgctcgccgaaatctgcgcccctctccttgcgcgacggagagcagaagttgcccaggttgaccgagttaaacatcgttctcctctcctgccggctccggatggaggttttggacccggtctagcgaggggggaaaatttgggaaggcgagatgacgcgttatccgtcttagtctctctctctctgagcacgtgatccaaagtagatattgtcatatatcagttcggagcacttcgcagacgtaggaggggttctctcttaggtaagatcggggacgttcaggcgattggtttgcaaacaccgcagaaacattatgaaaatcaattgcagatttgtattcgtttttctctcgtcactccccttctctccataccacagcacgagcaaaggaggagagagagggttggggtggggtgggcggtgggatgggcgagggtggtggctgggaaggggtaattgtatttttttctagctgctgctcttttttcccccaggattgggggaaggaggagggctctcatgtatgggggtcttgcctcctctctgtgagcagcaccaggagggtgggagtgaggacttctttccccactgcctgatttccccagagaagtgaatcctttcccttaaatctcagggactcttacccttccaacccgcagagacaccgcctgttcacaagagtttgaagaagtccactcttttcctggccagagctgggtgtcaagactacctttctggagtccttagagagactcccggaagagtatctgaagtttcccaaaggtgaggcagcccagctgcaagccagtgtcccaactttgtctggcttgctgtgctgcccctggctagggagtcagattagtcataaacgagtggtgagcagtgcgccagccgcccagccggtgcctggcgaagtctgggaaaaaccttctctaatgttgtgttaaatatttagtatgagagagtggccctgggtgaatatttcatgcctgcctttattgtcaatcaatgtgaagaaagctacatccactgtggattttcaaatcccaaaccccaaagaaaaggattggaatgagagccatgtatcttctatgtcagggccctttggcttagtggctcagcctcagctagtgcgctgaaaagaagcctagtgtaggggtccaggaagaatatggtgggggggactaggtttggggttcttatccttggatgattttgaggactgtaaggtgggtggtggggccaggtatgggtctccagaagagactaaccagacagtggaaaggagcggtggatgctgtggcatcaggggaggcccagcggccactccctagtcaaagcccccagcctctgtccctggggctgtgaccagatcttagtgcctccttcctatttctcagccctgtcctgccctcctacaagtctgtcagcctcctggatagctgtagcccaagaagtaggctcagtcattctgcatccccaaccccttgccttccatccctctgagcaccacaggacacatgtgggcatctgaaaatcactttattgaaaggttctggactgggtccaaggggccaaaagcaaccagcatgagctgaaagcaaccttggatccaaagaggagctgccagggcacaatttgtttgggaaggaggggaagaaccgaagcccccaagggctcagcccaatgcacactcaggggaaaacaaaaaatagcccgaactctctttacatccataaccctcagttaaaattagtttccacttaaagaaattagaatggatttgtcttgatgaaacatgataaggtgctgcggctcccaaaccagataaggaggacacaaaaaattgtagcttgtctccatatgtaacccctaaaatccattcctcctcaatgctcctgcctcctcaaacttgctcagcatttaagtgacacctgagtggagtctgcctccaccatgggtcccattctcagggtggttctggaatactcagggataggtctcaggtgcccctctacgcactcaatgctgggcgctactcctttagttctggtcagatcttaaactgaagcaaagaagaactagattggggctttgctgaagtgtgagacttctgttggtaaggggccatgaaaagaaaaatctgctgtgtttcctttttcctctagccctttttatagagtgagatggg

SEQ ID NO: 916295 - DNA, 4001 bp, Homo sapiens
gggaagtagaggaaggggacatctgggccgctgcttctccagatcctcagcggaggtgcagtgccccagtcctgcctcaaataaaccagcccgcagcacctcagccttcctgcccctgccaaccgcaggcagctgccggcttctgctctccctggctaggtttcttcccttctctctgggacctggcagggtgttttgggtgtgtatgggagggaaccacgaacaaaacagacaagaggatatccagggagggcctgccagagacgcctggcgttctaagtggggactgtgttctaggcggcgccctcttttgctctctgccagggacaggctcagtctggggctggcgcccgtgtcctgcaccttaaaagaaggagagagcttgctccctcaacagaagtcttttctttttcattctccggttctgaaaccagatcttgacctgctggtcactaagattcaagcggtctgagagttccctccggcgctggcgtgtgatgaactcgttgaccagaaactcgccctccagctctgccagttgcaacttcgaatagggcttgcgcttcttccgagagcggctgttgatcgggtaccagggcgcgcctgggtggagatgaatggcaggggttggccaaaggatcaaagggtgaccagtccagtgcccttggcccttccccagaccctttcaccttcgcctcacagctggactccaggccctttctctcccttctccttgccgccagtcatctgaatcgtcttttctacccagacccacatccccaccaactcccccactttctttactcttttttttcctttcattctttgctcttacctcctcaaccctacctcctgctgcactattcatgacccttctaagtccctatcccctccttttttcccaaacctctccccaattttcttcttccctatttcctggtcccttcctctcacatccttcaggactggatcccggatcagttacaacagatatgggcgaatggcagagtaaacgcatccactggcatttctttcgaaatgtaagtaatggggtctgtgggaaggtggagggagaggcgcctgggagaactagggccgggctttctgtccccacctcctcacccccaggcctggggagtccccgtcaggatcccccaactccggaatccctgccgcctccagccgcaggcagacgaaaaaggaacactctccatttcttttgtggggatgtttacatgtttataggctccccccacccgcacttcattttataagaagctcttcctcgccacacattctgtcaccctgggcgtccctagctcagtcctgttctgcccgccctggtaagaggtcgggtttgaatccgccgcttgagtggccggggtccttaccgctggccgagagcccgccgccggggttcaacggcgataccaagctgccggggtcgcctgcgccggcgcccttgttgccctcgttgagcagggacgaactggagtcggattccagcgactggcaggagggcgggtcgtgcggaggtcctgcgccgccgccgccgtcgccaccgccgccgcccgccgcgtagtcgtacttgaagccgagcgcaggcggccccgacggctccagcgggagcagcgctgccccgggcccggctcccgggtcgcgcccgcgctcctcacgcttcaggcccccgccgccaccctcggcgcacggctcgcggtagtaacccttgccgtcctccacgcgcgccagctcgcacgtgcggccgaagggagggttgagagacactgggctgccgaggtagggctgcgggtagccattgcacggctccgccgacggccaggacagggagcacacgttgtcgcggcgtgggtaggacagcgaaggcagcccgggaagctgcgccccggacgcgcggaagttggggaagtagaaggtgtctcccgtgtggatgtttaccagcggccccacaaacccgggattcaggagattatgctcgcccatttccgcggggcccgaccggcagcttctactttattgctatctgacattaaacatagttaaatctgcaccagtcacccattggccgccccactcacgtgggcacggccgccagggggaggggtggggacaaccgatcccccccccccaccatcccatcccgcactctaacttcccccttccccaatcctgggggtgagtggggtaacaaagggcgggggcaggtttatttgctgaactgattttctaaaacaatgtatataacctaacgcagagagtaaagcaattgcccaacacggggcaaaagggaaaaaacacacaccaaaaaatgcccgcatatatacacccctataacctgcacccccccccatatattatcttatcgccaacagctggccaagcacagcctgtccctctttaattagcttctttattaactaaaaccgttggaatttacaatatctcctcaataaattactattagatattgtgtcatataaagtttactgactgtttaaggagacggatgagccctttggctcggggtttatttacagtagaggcgaagtgggggtaaggacaggtttccctgccgttatctcttcccgccccagctgctgctgcacacttctttatcagctctttatcctcaggaatttggagagacatttggagtcctcttccccaatactcaaggataattgataatgccgggttttcctctggagccgggagccacccagcctcacacctccactcacggctagaggaaggatgcggaagggaggtagagaatgcagcaaaaggaggtgcctagctccacatggacctgcctgcctgctcctgaaaatctgggggcgaactactcttctgctgtcatttccggggaactgaggagcttctgggggcctcctggagtctttgcagtgggaagctttggacccctaacagggcttgactgggctgagaggggcctaattctcactgcggaggagacaactgcaccccagaaccggccaagcctgcccctgggaccatcagatagcagtgcagaggcccgcagtaggttgcctcctgagggggctaggattgagggaaaaaacccttgaagaattatcttattggggggtgaaattatatttatggtgcaaactcagaagctccctccagagaaggccgagaagcaatgctggccattggtgagataatcaacatctgcaaaaccacaatccgatctcaactaggtccacagaacacagccaagcggattaaaaagaaagacaaaataaaactcccccaaaccagatgtatccttttggggtctaatagaaaaaacactcgaatttccatgtgattatttcgagcttctaaccaatgcatggcttaagtaatacagggttggataaatagttcagtaaacgtctaaatacgaaaaaataccagaagattgaaagaaaattggagacagagattcggagagaatgagaaagaaacccatttaggtgaaagttaaatatcagagaaagcctgagaataagccaaagctgcaaaagcagatcgaagcagagaagattctccctttttttcctctccctcccctctctcctctgcaggacgcggcagagagaaacgcagattctttgaattccaccgctccccgggcgatttcatatcccaaaccgtagctgctcactccgacagaaatgtgtccccgcgggcgccgccctgcccggagcagttcgaagctcgcagctcggtgcctgtcccttgccctgcttggccggttccccttccccgcccctgcttgcctagctgcccggcctggtccagcccctcccgcccccaggagccggccccgcgttaggcgcacttgtcggaacttagggcaagccatgggctgcaaacccgaagccgccaccttcagttagagccggtggcgccaaggaatgagcaggagactcagcctggattggcctttttgtgcctaactgataaggggctgg

SEQ ID NO: 916296 - DNA, 4001 bp, Homo sapiens
ccctgggccccccacccccaaagacctctgtaggtatcagaagggagaacgctctcccactgagctctgcttacagggagaacagactcaaatgctggactccctagaccggaatcctgatttctcagcacaaggcaggatccaaagctcttggtgtggttttgggaaacctgggactggtcttgtccgcaaggagagcggtgggatttacaggagcctttctctcttcaactggagacggaacaagaggggaatgaattctcccttcccatccttagccagacaagaccaaggggtccccagcctgggtctggactccagaagcccctgaacaggtcttgaacaggtcttcctctcccatttctcatccccacgcccttctttctgtgtctggggcaccaataactaactctctttctcgaccacatatgggggagttggcagtggaaatgtctataggtttgagctcaatataccaaagaggcaaggaaaactttacaatgctggggagggattctagcctcctctccactccctctccagagattttggatcttctgttccctcaacaatcaggaaattcgtggccagatttttaaaataagtcaggaaaggaaaaaaataaatctcacatttctgtagaccccagcaaattagtcccctatttaaaaaatactgtctagtgcctgaacgatcctgcgaattctgtcaaagaaagtgggggttcttattctccgccctccccagttattcggtgggttgggggttttgtcctggattccaaggcactataggcccaccccgcccccatcccttgccggaagcaggtttaggggccaagagcccggcgggaggctggagcctgcaaggggaggcggaggcgagctaccggacagagcagagccggcggcccggctttcgggcgcctgtgattgcttcattctcggccgggcagctacagagaacgtgtcggagcagatttcttccccggcgcattcctcagtgcagctcgcccggccggctccataggcagcccagccgagcgggcgcgccggggccagacggcgggggtggttggggcgcggagccccggggcaggcagggcggggaggggtccccggcggcggcggcgctcgggtcccttccttacctgggaagggagacttccagaggtgggcggactgcgactgctccttggagcagtacacctgactgtcccagccattggagagagcccagtgctggtagccttcgacggggatgagggcgtcgtgacgcggctccgggtgcccgctgatcccgggcaccaccgacacgtccaggtagccgggcatcgcctggtaggagctggcgaagctggggtagaaggcgaactccttggccctagaggacaggtcgtcaccgggcagggcgcccgacggctccgggtatttatcgcccgggtggtaggcgcaaggcttctgctgcaggttcacgttgtgcgacaggcggcagccgtagtagctgcccccgaaggggtagccgtagcccagggtggcgctggacgaggtggggggtgcgggcggcggggcacactggcgcgccgcctccggggccgggatgtccgtatagacggcgccctgaggggcgcccaggggagccggcgggcggcccagcacggggtgcggaagcaggtcgcggcagtggctggccgggcagctgctgcccagaccatccatgctcggggctttgccggggctcgctccgctgcagccaccccccgctccgcccgtgccgccgcctcctcctccgccgccgccgccgatgccgctctccgccgcgctgtcctcatagacgtacataaggctctccggccagcgtggatgcaggagcagcgaagtcgtcatgacatgatctgctggagctttttaaaaactccacttgccagaggcagcgagctagggagacacctcgctcctgtttcccctccccccatccctcccctcttttctctccacccctcccctcctcctagtgcttccacctccctccctacattccctctacgcatgcggagacacttcattaagaaatccgccggctcccgctctccacctctcagcacccctcccgcgcccacgtgacccgctctgcgcacgtgatgccccggccaggtctcctggggttccctcccctcgaggtggggcggggcgaaagggaaaaagtctgtgctgattggatctcaggtaggccaaaggaggcgggagctgggagatttaaagggacagggagacgcccccggcaggccccagggagggagagggaggggggggaggctgaatttggccgacgcaaaggggtgtagggaggagagcgctgtaactgggcgcctccgcctaggcataggatgtgcaccggagagacagaccccctaccgccaagccgatcactgtgactgctgaagtctctggattggggcttgaagctaagggtggggaagaaaccaggttttaaaaaataataaatgaagataatagaaaacagtcaggagcgctctggccctggcagctcgcctccgctcgcggctggaaagaacccgatgctgcgtagcgagcctttgatgccgggattgtgtttccatttcctaccttcagccacattccccaaaactctagatgtctgaaaaggacactctgctttacctcgctggatttttctcaagcggagaggggtgtgacaacccccaaatacagaattcatcacctggggcaggggatcgagaggcaatggaatatactcggcaataaatggagaaagaataaaacgagggaaataaaagcaatagaatagactgatatttcaatatgtaatagaaataaaaaatctcagagtgaggtttttcaaagaaatgcgggtggtgggggcgcaagattcagcctgggaaagctaaaagccctggatgcgaaggagagcgcgctttctataggtatacaaaagaaaacgtggaaaatgggggagattcagtgctacacctttggagggacctctctctggcgccactctgggggaccctgcagaacccacctctgccctcaggggcctgggttaagccacatgacacagtccccagtttgaatacccgcaatggagctcccacggctttcttaggtcaccctcttttagtgaggaatagtttcatgatctaaaactgccccctatttcaaagaaaaaattaacaccaacttactgattcttcaaaagctctcccttctttcctcccaatctcccaacttgtcaggagcctcaatagagtcacccctttctaagggagcatctccgtggaattgagtcaagttccctttcagcacaggacctccctgagaaatcgtaatgaagagagaaaaataagaggggaaaggggctgcagcgtttccttctttcctccctctgccacaggttttaaatgctgagtgctcgtgtgcagccagcgcacagaccatggccacagagcagcgcctcgctcagccagacctactgcacccctcaagtggagagcaaatggacaggtctgcagaaaccccttcgggccacctccctcctctttgtggggagaaggtggtgtttgacggttgagagcacccggacatcggtgagttaggatagtaattcttatctgcgtgatcttcatccagaagggtcagctcagagttcagaaagcaggctgcgggctgggctggcattaggaggaaaaatacaacagaaagagagttaagacataaggagaccagctcgagtgtgcattgagggcaatgagggaggggcggggagagatgagcccagtggaagatagggtcttgctgggagccggctctgctaggaaactgcttatcctgctgctggagtccaaggtcaaggtaaaacgaggagagcaaacagggcctggccaagtctagactgggttgtatgacgttggcccccttgcctaaggcctggctggtgggggtgggtgggtggagacgcct

SEQ ID NO: 916297 - DNA, 4001 bp, Homo sapiens
gagggtgggggtagagggggtgtcttggcttagattaaggtaagtctggcccccaggttctctcggacctcgtctggaatatgttcccccacgcctccgggtgtgtctgcctgggtgtgtaggcgtttgcgtgtgcgtcgccgtttataaacagaaattcacacttatggggccgcctcggagcctcggacccaggccggggagcagggcggggtcatatatcaaactgcaacacattcagggccacgtacatttggaagaaattaagccactgtgttatgaaaccatatgcgtcgggttaagactatacaacaggccattagcaccaattattagagagatcccgagtgcccaggaccctcccgccgccccaggctgacgcctctaccccataagccagcagcccccggaatcctcactgcctccacagcacctaggagactctaccaggaggactgggcctgtccccgcccagcctagggccttccccatttccacctccccccgaggcgaggcaggtcctagcccagagcagccatgcgtggcgagcgggcatcccggtccagtgggcatcccggctgggatggccgcggctgggggtgaggggcgccggaccccggaagggaaagccggtaggcctcttttctctgagcacaagatggcttttgagtacagcatcccccacccccaccctacaacctccaccctccacccaacgcagggcacctcccacccttccatccgcccgagtgggggcgggagcagggggtgggcagacgctctcctctcggctgacgcgcaccagccaccagcctcccccctaattgccaattaacaggccccgccggccgcctagctgcgccggcttcctgctcggcggcccggccctgggcccacactgcgcatgtgtgagctctagcagtcgcgctctctgggagggagggggctgccagacagggaggggaagctggaaagtttgtttgggggttggggggctaactttgcttagggggcaatgggcacagcctctaagttctctctcctgcctggagcttgagcttccagttccgctccgacccagttccattagccaagagaccgaagatctataataagcaggtactgacacagtgggcagcagagagctggcgccctagaccgccggcttgagccccacaggtgctgttcccttgcctccccacccccaacttggcacacagtgacatcaggacaacacaatcgccccactaccagttaccggtattccagtttaaccccgtttctctccccccgccaattttcctccccataattaactacgcgcccaccctctcgccagccccctcttctccctaaccaagagaagccgctgctgtcctattcttgaaaccgccacggaccattagttacatatttgaaccaataaggaaacacttaccgagcgctgctgtcactctccctctctccctctctgcctctctctctcccactctctttctcgtcttccctcattctgtgccgctgccgagcctgtctcagctccacacacacacacatatactttatataaattcaaaaataaaaataattataatcatccaaaagccaaacaaaattaaggagagttgcaagaagggggcaggaggaagagcctgggagagaggaggggcggaggcatctgcagctcccaagctcaactcctgctcctgcattcctcctgccccttgggggccagagggtcgggaaggaagagagagatgccctcaacttctgtctctcccctcccatccccaccctccccagctgcccccagcttcggcaactccacctgggaggaaaaaaaattaaatgggggaaaaataattattaatcagattaatttaaaaaaaatactgctaatgaagggagcgcccagggcaggtttccctggcaatggttaggctcttacagggaggactgttctgcggagcgctcggaacggacaaaccacaataaaaagttcacgttcatggatggaatccacatgacttcttgtggccaatccaacttgtgagtcgatcgtaaacttttattactcagctgtaaattttctgcaaacaaccgggaatgcgatgcatttgtgtagcgtgtgcaaatgggcgccgcggtcgccatgtttacccaattctctcatagagggagcatccccggacccccaccccacccctacccccacccaccgcccactccccacgggccaggctgctgcaggcgagcgcagaaagagctgagggcggacgcccaggcgaaagaaagcttcaagcactgagggtcggttgcctctcctggcttgccgagttttaaatattgtccttaataaatgggggcattaaggttggatcaggcggaattcaaagctttgcaaagatttgtggccttgaggcagtgatggctggtgaattgcagggattgaaagggtgcctccctacccctaccttttttttttttttttttttttagtaagagaacaacatcccctctatgccgtacccctgaaagctcctactccaccctagacaggaacagtagtggaagaccactggcagccacccaaccaaacctgacctggagtggtctgaagaacctaggggactagacctaccctgggcaatcctgcagtgcagcaggagaggtgagaattggggtcaacttctaggaccctcaaaacgacccacatccccggggtccctttcttagagagaatgacattttcccccaagaccatccctagtttcccttcccagttcaaatggtggcttatttgaaatctttttacaattaaaaataaaattaaagcccaagatcttggtctctacttcctttttgcggggaggggtgcaaggcagtaagccttttggatcgtgtcagattgcccatacccacctgcctttctcagaaaaatttcctgattcaatgtctgggcagctgggatgtactaccgaggcctgaaaaaataaccttttactgccctgaattccaccttctgtgctaaaatttcgagcagcctgtttttccagacccctaattttgaaggtgagtccagaataaattcccccatagagactatttgccgggggaggggttgcaggcaggtcactctccccacgggctcgagatttgaaggccggcatctctccacttggtcccgcatcaagctggcatgggaatctcaatggttgggtgcctcaaccctgaccaagaggggatacctcatgccttccccagacttcctccatagtaagaaaagcagttccctaggccggatgcagggacctcgtttcttttcacaaacccacccataaattttataacaggtagttaaaaattacgacaaggaagcgctggcccagcttttcacaatgggcagcggggagaatgggacggcgctgcgggcagctcaccggaaattttacttctagactgtggcacaacctgtcctgaattctccctaattgggcggggtaactttcccagccagcaggcagtcattagggcatcttatctggggaagataagactggggagaccaaaccactcgcctatccaagggtccctcaaggagcccttcaggacgctcactacctctctcacccacccccagatctcttgcaggtccgcaccttccttggctgatgcaatgagggagtggggaggaaaaaaaatttaatccagagaaacgaatttgccccccaacttaatagctgcattattccagctctacggttgagattagaataataaattcaaggagcaatgagcgagatgcttcaactcagcattttgaaagatactatttttcacaaatcacaaatggctttcggaagccactttgattggctaataaaaaagtaaagaatgggagagaaagtcctatctgcagcagccgaatggtccccattccggtaatgggacggcgggagcatttgggaggacgcgattctaaagagagcgcatcccgctca

SEQ ID NO: 916298 - DNA, 4001 bp, Homo sapiens
ctgcctctctgaactgaaagttcattttgattttcttttggctcctcaaactgaacagctctgagaggctctccagatgcatttagctttgtctgctgtcttcgccccctctcctcccacacccccccccaacaataatacaaaagaacttcatagctttgttctccttaaaatgacttccccctcactaacctcccctggtgcattttcaatgcaaaaggcctaaggaaagagggggggaaggaggaggaggagaaggatgagaattggctttaaaatttctttccttttttcttttcctcatttcccctgaaattcacccaagccagaccatcacaccttgcaatatataatttttgcagctttttttcttaaaaaataaataaccccccaaaatggccttttaaaaaaaaacacccagcaggtaccatgctaagacaacatcacatgcttaaaagggtccttaacagtgggagggagaggagggcagggggcttgtttgtttatctgttttgtctgtttggaactgacaagggacaaggtgagaggaagagagaaaagaacctatatatatatatatatatatatatattaaattctataaataagagtcaatttgtgtgtgaggggagggtgggggcatggggtgggggcaggggtgtgagttatgttttataacctggtaatgtcctctgcccgttgctgctccggcggcgtggcgctctgggagtggtcttcagaagtacccggggtagctgccgaaagggtgctgggcgcagcgccggccgggggtgctgacctgactttggtgttggggagtcggtggtccttcttccatttcatgcgacggttttggaaccagattttgatctgcctctcagagaggcacagcgagtgggcgatctcgatccttctccttcgggtcaggtagcggttgtaatgaaactctttctctaattccaggacttgctgccgggtataggctgtcctcgagcgcttgggttcccctccgttataattggggttcactggggggaggggaaaagcaaatagtggggttcagaggcagcaggctccccgccccccaccctcaccccatcctcagctctgagaaacaggaggagggagtggtggaaataaagtcatcaagcttaaatgggttataaagaagttgaaggaagctgaagactttgtagtgtaataagaggggaatcctcattgtaacgacactgaattatttatgcgcccttagaaagcgagcatagttttcacacatacataacagatcgtagcacatggctcggactgcccagagtagctaagccataaaatttatgggggatgtaattacccattctcgctcgtaaatccagttcaattgtgctaacccagagtcgctcctggagagagagggggaaggagagaaaggaggacgggggccagagggggccgaggagggtggggagcgctagggaagaagggagggagggggggagcaaaaagcaaagttgcctacccgtgctaacgtgaatttttttcatccatgggtagactatgggttgcttgctggcggcgctggagggatggtcgggggctggctggctgcaggctggcggggctggggacggggaggcggaggcgcctgagagaggcgccggctcgcagagcgactgtgatttctcggggtggtggtggcccgcctgggccggcccgtggcctcgcgaattgccgggcccctggagactggtgcagctatactggcgctcagggtagctagggcgcggaggcggtggtgggtacagctcctggtggtgatgctggaatcccgattccctggtccggccgtaatattccggactgtgttcagggatgtagctattttgcgaatattcttcgcatggaggaaatttcggatcgatgtagttagagtccatcaaatacgagctcatgatcattaatttctggagtggaaaataatttttctcgctttgtcgtttttctgctccataaagccctcctactagctagcgaccctgtaaagttactttcaccatgtgactcctccggccaatcacacggagcaacccagtccccggataaggaaccgaatcgctttattcaaaatgtatccaatttttttgtgtgtgtggtggtggtggtgctgggaggcgggggtgggtggtgatgtggggttagctagcagaggttggagtgcccccagtgcacatcccgccagactgacaaccctcccctgcaaaaggagatgggaagctcccggctcccctccaaagcccgggcattgggggactgtcgggaggcagtgattcagcccccgcccagggtctcccctcaggcctctgctgggccccgtgggcctcggctcctgagcttttccagaggtctccattcatggcgatcgtgtctcagtctgtgtaggtcacggggcagcgcccctctttcgcaggaagaggaagttgaatgaggactggagtggatgttggatggggaggggcccaggctgagccgaggaggctggagagcctggagtgccccccatccaaggataccagagtccagcccctcttccccatacacactcacccaaccctctggccatgcggccggcgaggcagggtcccagctggaccaggcaggtagaggcagcgggatgcaaatgattctgacgtcatttctggaggtctgggggttgagcccccgctgaagagagacaggaagtggttggcaaaagcagagttcagaagtctcgccttcccctgctacccactgaccctccctgccccagccccagagcagaggatctcttctactgctggcttctgtttccactccccattcagcccggcctgctattttctgacaattatctccaaggagctggggcaaggaggagagctttctgccaggagtcagtgccctgtgatggtgcccagccaagatcctgagagttctttctctgtccccacagagggcagacctagctaagagggaggcctgtgtgggtagagcctgcttgcttctggctaggagctgtatccatgtaacacgtgtgtttacatgtaaacacgaattcctaaaggccagctccaggctgctttccaaaaacggaaggctaagctcaccaagttggggaggcacggccagcctttggggtctccagcccattcacaccccctgctctctctctgccacccactcacagtaatactctgatggaggggggtgacagggccgtagaggagggagggggccaggaaaagctgctttcctaaccaccaccccccccccccagctaggggtggtcctgtcatgccaccgattccaattaactgatcgcccataactcagagttgcggggggtagcggaggggagagcccagggagggagccgggtccccttgttgtacttgataacaattatagtttaaaatcatagcttgccagggctcagctatattttacttgataacaataaaagtgacacataaagttaactgtttatgttttatttattagactaaatctgccagcggtggtaggagcgcttgcctcgtcgctacagcttttatagggctgtaaaacgtcataaatcagtctcgcggaatcgcccgcactctttgtgtcggcggcggcgcagggctggcggccgctggctgcctgctccctcctttccacgaaaagtcgtaatgtgattttttttccctctgattttattattatgatcgccgccgtgattagtcaatctacctttaattcgccgccctacgctacctcctcccagcccagcctggttgacacttgaataagtaccttttaaaacggcataacaactatttgagggtttaattagaacatctgcaattaagggaatgaggaggggaaagggaaaaaaaaaataaagcccttgtgagagggagactgaaggcaagagattccaatccttttctcatcacctttgggatgttggagagggtccccacttc

SEQ ID NO: 916299 - DNA, 4001 bp, Homo sapiens
ggccctaggccgatgctctcctttcatatgcaaatcattcataagtgaaaatctagtttagtcgctacaaggaagcaccccgagtctagggccagactctcgccagcctttggctgtctaacccgtccagccgggaacaaaggagagggcgaggttagagggtccggcgagggtcctgtggcgcgggccgggcccaccttaactcgggagggccgcgctgaggctgggagccggagatacggcccaggccaaggttcgttctgcgccagcctgtacgccgcagccctccggggaagtcctgcggagcttgccctgggccccgggtaccgagctgagccgagctgaggggagatggggcagcgccgacagccccgcgggaaccctgggtcggtagggatgcggaatgccaaggaaaagcgcttttgtctgtggggcccgggagcccagtgctccagcacctgcccccgacccgaaatatagagaggaaaggcgaaaaggaaaggcgcagggacaggaaccggctaggggcgcgctctgcgggcctcccccgctgcctctaaagagcctctttgcttttcattttggaatctttcttccacttcatcctgcggttctggaaccagatcttgatctgtctctcattgagacacaagttgttggcgatctctatgcgcctgcggcgagtgaggtagcggttaaagtggaattctttctcgagttccagagtctggtagcgcgtgtaactggttcgggaccgcttgccgtccgtctctggaacataaaccccaccccaagccaggaaggggtgaatagcttgcagcgttcccccgtccccaccccagcccaggcccccacccgcggccggagggagaggaggcgagagccgcaagacaggccacgcgggccgcaggcgggccagcccagcccagccccgggagaggcgcctccgcccaggcaggaaactttccaccgcagccttcactctgcagccggaggggctgagggggggttggggggaagagggagacccaggctcggaccgaacaataagcaccctcgagatccgagcaccggggacccccctcccgcccctcccgagtcgctggaatcctccggagccgcaagcgccggcggagccggctccgcaggggagggagggagggagccgcggggggatccccgctctggagccccgcgctcctcacccttcagatccctctatttttttaactccctccctctcccccaaaaattgaatattgccttttatacacgttttgttcctatgatccaattatgtcgtcgtaaatttgggcgcacacagcctctaagccttttagtggacagttttacgagccattgatgcctggatcgtaaaatttatggccgcaggttttttttctttatttgccccgcatggcctataaaacccaggcggacccgagagcgcaaaatgaagtcctaaagtttaccgtggctcatgtgcagtttggtcatccacgggtaaatctgtggcggggccggtggctggctcagtccggcgggctgccctgtctgcgcctgctcctctttgatctccccactgctcttagctcgctcctccagcgccgggcgagccgccttctgactgtacatcccggggttcagaggagccgcttcgtctctgcccggagcgtgtcccggagcggccgcggcgctgcaggcggggcggtcggggtgagcccgggggttggcagccatgtctaccccgtggagagagttggaaggcgcaggcggtgggaaagtgatgcttaagtccaatccgccgtagcagtacctggatgcctgcacctctgaggccgatccatagttcccacaagtttgcatgttataggcagggatattggggctctgcttatagaatgaattggctacgtaggagctcatggcggggagggcccaaaaaaatttctgcaccctttttgattaagggtgatttgtgactctttgaagttgaggggttttttgttctccaaagtggacaatttataggtggagatatctctttctttatcctatgcgctcttcccaaataagggagccttaaatagagtcacgtgactcgagcggccactcataaatttggcttgatgacctccgggaggttagtgatggaagccggcgaaaagcatctcgatatgttggcaaagcccaaccaagggggagagggagtgagagagagaaagagggaagggggagggaaaaaaaaaaaaaggttcttggaattgggggtagccgggacaacaagcccacagcgacacctggtgcctatgtgggggaattgcatcctggagcgccagcttgctttccggtggctggatttcctacactgtgaaggagaagctggttgttggggcaacccctgagctagccttttaaattctatttaaaattgggaaaagacgaggccccacttataacgcacagagtgctttttgtaatgaaagtcccgttctcccaacctccagggtcttccaatcttcaaaaatggctgaggaaaggggattaagttaggtaaggtggcctatgcccaggctggagaaccaatggggtttaacttaggttccctaaaccaaaggtagaagtcccttgcctctcaggccctaaggctccactactgctgaagaggtgcctatcagcaagagaaagtagaattagcttctgaagaggtagacaggacgcccaggaggagggatcctgagtggtcagaacaagataggggggtcatgaagctgagggtgttgcaggctgtttgggatggatctggaggtgaggagccaggtggagttggctagacctcaccatgctagggtccccagagtggcaacaaggcaattttcaagtgtgtgtgtggacacggacagagccagacaatggtctagaggactgctctgtttccctgtgtgcgatccttatgtggtacctatgccagaggttttagacagaaaatagatgttaattgaggacatggagaagcaagattgaagcctccacaaatattacgtgagcatggcagaggaaaaggcccgttatgtgccctttggggaaaaggtctctgggctaggctttccagggacctgaatccataaggttcacaagagagcaatttctgagctaccaagaggaatggggcggacctggggggtgggcagggcaggcgcctgggtagccttcgcagggtatctgcagccattcggccccatcctcttcccccgtagccccaagtctcatacttccctgcctgcttcttcccaggaaatctccgccccgccaggagaaggccccctcctcactggtggaggcactggaggcgagggtgggggcgctggagggaatctgaagggcccggaaaactctggcggattttttccctccggagaccctcctcaacacctctccctgtaggcccactcaggtttctctggccaggcttggagagagaaggccagggttgataaatggttagggtccggctgcgctcctcacccgcctcttcacccgtttgaggagagaaaagtaaggaaccagcccggctggagctgtaatgaagaaggaattttgtcccggccacgtcaggagtaccagagcaggcgagagctcagtttccaggctttctctctcgagatgtccttgaatcgctcaatccctgccgacagggctccagtcccgcggtcttctctttccctccgctctccgcctccgctacgtttcgcaacagccagcttggcgcgggcctggggcttgctctcacggcgccccccgcctccaactcccgggagtgggtggaggagaccctggtgcctggatagtgcttctttactggtctttcggggcgcctcagggttcggacgccgaggacaccggctgccacaggcaggaagaaaggcctgcgtggggttggtgcccaaaccgactgatcccagctccccccgcaacaaaatcctacgcggctttttcccgca

SEQ ID NO: 916300 - DNA, 4001 bp, Homo sapiens
gggcctccggccctccccggctgccaggccgggccctgaggccctggagcagaggccccagcaggcccaggagccggctctctgcacggggggcgggggtgggggcgtcgaaggagtgggggagccaagtcctcacttggagggcaatctgtagagtctgagttcagggtccgagcccccaaggcctggacggggaaaagggcctgtagacaagccgagaacgagctagcaagggagcgaggaggaggaggcgcgtggtgaaagagagttgtgcggtgagggagggggtccagagctgactttcaggtccacgtttgactccctaattttgttttagggaatcaaaacacatcaattgtgccagtgataaatacagagtgtgtgattaggggagagttggtggggagcgagggagaaagggagagaggggtggcagggacagtcctggtcactctttctgcttctcctcttctgtctcttcccgcttttcctcttttccgcccaggctgtcggcggtggcccctccgccgccccccgagagagtggatgtgagattagattcttttttccacttcatccggcggttctggaaccagattttgatctgtcgctcggtcaggcaaagcgcgttggcgatctcgatgcgccggcgccgcgttaggtagcgattgaagtgaaattccttctccagttccagggtctggtaccgcgagtagatctggcggccgcgcctccggtccgctccgtagccgacccctaaagatccgggcacaaaacacactaaaagcaatcagcaaagcgtcctctgcagactgtttcgcctagcaaagtcctgaccctcccaacctggccagcagctcacagcctccttagggctctagccttctcccttttgccttgccccacccccactgggggtacagcgaggaccccaacttcagacctcctataaggtgggacctgtgtgtcccaaagaaaggtgtgtggtgggggggggggcgggggggcggggcaaaaggcaaacagaaagctgcaagtctaaaagcagatttttgaaaaatcccagataatggggatgagggccccctttctcaaggactgggctcccccatctccccaagcatcctagttccttggaaacttctccccacttatctgcctctcctctccccctcccttctcctcagactgactccactttggggggctcccctatcttctgctccctcccctcatcccctgccctgttcctgccccctcagcccgccttggggccctccaatccgtcaggggccaagggggccaggcccctgcaagcgagcgagaggcgagctgagggggcagaagagggggccctgtctcggtgaggagacgagcgtgattgtttttatggggccataaaaaactctctccgcccgttcttctagggaagccggtcataaagccagttcagtttatttaatttatatctcggagctgtaaaactcaccactgtgcgaattcattcgctgcatccaggggtaaatctggatactggctttctggtcctggggcgcagtcctgccctgctcagaactaaaatcctgagcgattgaggtctgtgtgttatgtcctaaggtgttttgtctgcagtttgagagcatgtctttctcctggtaaaaggaattagatccatagtcatacggcccccggctggaactgaacacgacattctcctgtggcgaataaaagggagtcgagtagatccggttctgggcaacggccgctccataggtcgagaaatgcctcactggatcataggcggtggaattgagggcgacgttggggaggacgtcctggcccccggcgaggtggcaggataaggaagggttagtgaagtaggaattcatccctttgcctttacctggtcggtctatgatttctttaatatttatttctgtctccagtttgtactcggaactagatggttatagggacggctccaatccaggacagacaaaatgacaaagtcagctgaccccctcccagccaatcgcaagccagatgtcaggaagggggaaaaaaatcgcttctgcttctgttgattccctagttgagactaagtgtgtgctttgaaagtaagacttggatttcttttaaaaaatatatatatatatatatatatgtaagggaactggtttggtggtgaaggaggggtgcatgtccctgagcagggccttgggactcagggaaggagagctgtactaccaggaaatctctcagccccagctaactttgctgtgctgtggccagagccagggctagagaaacccctgtattttcaatctggtttcatgttttatatctgcccccttctaaaattacatcctgatttctccaagggaagaactccctcccagcacaggaggggggtccctagaaatcctgcaggaaatcctgttttgacactccatggagtgagtcccatcactaaactagtatttttttcaccaataattaaaaaaaaatcaaaagtagaaagaaatttcataaaacctgttcccctgagtaagtagagtgtggctgagagtcttgaatgtagtagggatgtggggaacaactaggtctaaaggggcaagacttcagggtacagtggcagagctggagtgggcaaatgggccacgcatctgctctcctttgcctcctggctcccttctgcctccttctcaggacccctctgttgggaaaactcttccagcatttttgcctaaaagggaaaatgtataaaaaatgcaatagaaaaaggagaaaaagaagtaaaatgtagggaggtggcaccggagggggaaagacagagagaaagagagagagaggaagaacgaaaactctgagaatctttctagagacatcaactcctgtttatgttggtgagaatttattatttggagccagtgagggcctgtggggtaattcacataggatccagccagaaagagaaggctggtggggctctgatggacagttagcttcctgcaggctcaagcccctgccttggtcagaagcccccctgccccctccagactcagggcaccgccagtggaggcgcccctggacctgagctatgaggcttggagacttcagaaaggggttctaaggagctctcacccaagtgccagtcacccgtggtggggatgggcctctcagcaacctcaacgcccattttattcccccatcttggggctaaaaaaagggaagagacggttacgaaaaggcagctgaatccgaggcttgtgagggagccgcagtaggcgaactgaaacagcggaaagtgtgcagatgggggttttctcctgattagtccaaacttaatttgatatcgtgatataggctgaaaatgccttgagttgacaaagaagggtggtggggagtgtgcggggagcagagaaagctcatatccccccccccccaccatttttgggtgggttggggggggggaaagctggctataacaagaacccggatgtcgccggattttatgatcttttccttctgtgtaacaaagcggagtaatcaatgggtagcaataaagccataaacgggactatgctgagaaaaaactcgtttattcatcttctgtaacgttaaggtttccctggagtgtcgctaggggggaaaaataaagtttcgaacccaaaagcagacagtgtgcaggagctggtggagacaacatgttagttaatacatgaacctcgttagggggttgaagagtcttcctgccagacaatttgtgttggttttagaaaatacagccccaatcctccagaaaggacagaaatttgtcggtatttggaagggaaggggaaagactcctataattataaaggttcctccttctagatcacactttcttctccccaaggaaatgaaggggaaagggtagaggaggatttttaaattaagaaaaaaaattttagatgagttatctcatttttggggtgacttggcaggtacacaaacataga

SEQ ID NO: 916301 - DNA, 4001 bp, Homo sapiens; identical to SEQ ID NO: 916297

SEQ ID NO: 916302 - DNA, 4001 bp, Homo sapiens
cactgcgcctccccggagctggacagaagaaaaccccagtctggttacgtttggatgggggcttggttttcctttgccactcttcctactctaaactcccctctctgatctcctcagttcgcctcccctctatggaaaaggctagagcagaaggcagacaagggcagaaaagttgggggattgtttttgtttggcttcaccttgggaggtggggtgggggtgggggctagggtctgtttggaaactggggcctttcaggggctggggagccctgtagaatcccccccaccaggcctgtaatcctaggaactggcctttgcagctttgtttacaagtgcagcagggcatttagtgagcgaggctggggacagactgtttccaaaagaaaggaaaaaaagctgggggtaaagaagaggggctctgcccactgccctctccttgtctctctctgcctaatgcttttccaataagaaaaataattgatctgctggaatgtgtcaccgctccgcctgattgctaactggagaccagcaaataaatcatgggccatccccgccggaacttgtcgctttatcgcttccccctgtacttcgaaattgggccatgaggggccacccttggaggggctcatgacctaagctactctgcaggtctcagggagaccccacaagtccttgattgggggggcggctagggtcttctggacctcaggaacccctaatctctatggcctctctccttttgagcactcttttttccccctcctctcaggctcccccgtcttctcccaactgggggaagtataaaaaagttggggtagtggccctcaggctggttctctgagaggaggttatgggtgccctagagagccagagagcctgtccttagagtctcaccacactctggctagggcagagcaacaggggtctgtctccctttgccccaagacagcctggccagtgtcctggactccaggctccctgcctctggagaaactggtttgttccaaaggctgacagtctcagggtactcagggtaccattcccagccacctccccaactttgactttagagatggggagtgggagagtcagagagagacagacagacagagatggagaaaacgatttttaaccctttgcggccacacaccagctttctctcaccttcaccccaatcccctaaatgttctaggcaccccctccctgccccgccccagcggagccttcccaacttcgagaaaaccacccaggcacaggcacgggggtggggcgggagagaccccaaagccaggagaaaaagcgagggcagacaaaaaggaggcgagggagggggggaaaccctggagcgcgggagaccaagggggaaagagaaaaggcttctcaccgtggggtctcatccatggaaacatgaggctgggagacgagttttgatttaagtggccttgtccttcgctactgttagtgttggcggaggatttacagtcgggatattgcaccacgctcgcctcttgctgagccccataaagggactgtctggggagcgcctcgtagccatagaatttggaggcgtctccgtggcagctaagcgagcacgggttctgctggtagcctgagttggagatgccggaggtgccgtggtggaagaagtcttgaacgtggtgcgaagcgtgctggaagccgggcgccgagccgccgggcccgtacaccagcgcatggctcctgcccacgctctgagggaaccggcagtcgtaataggccggttccagggactcgccggctttgtatttggagaacagggggttgacgaagtaggagctcatgctgggtacatgaaaacccgcggccccctcccctctggctcacgagtaccccgcccagtacccccgaaactcccctccccccgggaccgaaccccaggccagctggctccccgggactgggctgggctggtgggctgggggctgggcaggttggggggcgcctcggtgctgagctcggccggatcagcagagctcccggggctggggcgcgggcggcggcggcggcgggcggcgagcgggcggcggcggcggcggcggcgctcctcactgtcggtaggtagagctcgcgctctctcacttagctctttcctctaacagcccaggcgaattcctcagactcccggcggtggcggcgcttacacgcgattcgcgttcatcaatccacgacatgaagacaggcgagagagagagagagagagagagagagagagagagagagagagagagagagagagagatggcgggggttgaggggtacagggctggggggacctggaggaaggggaggggaggagagggggagggatgggggtgtgtggtgtgtgtaggggggtggtgagccagccccagctaatggctggggccagttttccagggtacgaatttagatgtgaaggtgcctctcgcccccagcctcgcttctcttttccttcttctcagagagagagagatacctgagccagcaggtcaacccaggttacctcaacaggtataagacctccaaggggatgaatacctgcaagccagagcagggcccctaacccaaaagatgggcttcctagggggtccctaagtctggagactttgaggaggaacaagcacaccatactcccaaatacttcaggcatcagaccctccatcccctggcccctccccagggtccgaagctgttctgtcttcttccttagatccaggagactctcttgctacctgctatgggtagaggagagggtcagaggaggtggggctggggaaaactccatatacccagtcagggccacactgccccttcagacacgagcccctgcatggagcaggaaacccaggcaatggccacaagcttggctaggggctctgagagcaaagctgcttatggagactaaaaggaaagggcagctgtgtgtccctggtttctagctgggctgattcaggacatttcttcttaggagactatttgcatctgagttggaggggactggagcaggcctcttacttgtccccacatacccccatgccataggaaatgccagctcagcctggtggggcccctggcttcactgcagctccctcttccccaggcaggctgcccaggccaggatgtggatgggaactatcaacagacactctttaaatatttatccacactttctctggagggttcccccatccccaagactgaatacgttcaagttaattctaatggattaaagaaccttagtccatcagcacccttctctggccataagtgtgtacagtgatttgggcttaacacagacagagagaaaaagggagaaggtgagaatacatgcatgctgtgtgcatatgaatgaaaaagatgagtaagaattatttttccagtcctctccctcaccagggtgtgaggctgttacacccaggaaatcctagagcacactcaggacacacacacactgtacgtgctacttttcaccctgagacacatcaagtccatgctcagtgtaaactagcacacacatgcctggaagcatccctgccacctcacagacactgtacgcacatgtgcacacccaggcacacatgcatacatgcctgacaaacacagatgcatctttaggtctttgcattatgaaagcaaaatgctacctgtttttcttccacatcctgggggtttcagggttggatgaggaaggaggtggttaggcaaccagaccttttccttccccatccggagcccagctctggagatggaagaaggaatggcggttcagggcaggatggtttagagagaatgaacacctcctcccacccaacccagtccccctattatctaagtaattgctggggaaatggccactctctgtcaaattcccaaaggagattcactggtgcaggcagcaagagctccctccaggatcccctgcatttggggaatcccacccccatctcaggagctgcccaaactcttagacacccagaactc

SEQ ID NO: 916303 - DNA, 4001 bp, Homo sapiens
cttgttttttatttttatagcaaggtctctctcctccccacctccctcctcctctgccccctcccatcctcccagcccacgaccaagtcctgaaattttagcagttctgcttcctgaccctgagaatccctaaacccctcaccaccctctgcagcaccatcctcccgcttggagttcaaccctgctgaggcgaattctcagggtgatgctgagacgggaaaagtctttctcctctccccagagagccgctggccttggggacaggctcccctatatcttagttttcctgtttggcctccagtgcccccctcctgccagccccaggacaggctctgcaggagccaagcctccaatttcaggtttatgggagtagctgagggcagggagggaagccttcagaggagtataattaggccctggccccttatggggctggaggaaaagatttcctgcagccccctcctgggactcccccagacacttcctcacacccaggggtctgcaccccctcccctgctgtttctccttctttcccctttttctggccctgcagctcccacctgccccccaccctagccctcctgtgcaatcctcagaaggcgcctgtctccctgattggagtgagtgagtgagagtgagtgtgtgtgtgtgtgtgtgtgtgtgtagaattctctaatctggggagatgcccactcctcatccctgatccccattctcaatccttcccctccaagaccctcagaagagggttctcaagtttaaggaggctcagaccccacttttatccccacttctctttgaaagtcctgatctctccaagttctcaggcttcgaaatacctcagacccctcacccagtgctcctgggggagaagtccatggaccttctgttttgtgaatctctagtggggtgaggacctccacgctgactgggaagcaggggtcattctcgctgggggtatctcctctgtgcccccagtgtcctcctcacctcttccctgtcccatctcaaatcataaactgaacttcgcccccagccccatcccctggccctgtccgcctttcttcgaaagtggtgactgagccaaaaagcctgggctgggaggagggggcaggggtctctcatcaaagccagctcctgagagaggagctcccctcggccctctcccaacctgtctccctgggccccattctcagacctcctgcccctgaaagctccccaaggtaattcgcttttattgagtcctcgccccctcgcccctctcccgcgctccctgcacggttcgggagggctgtaattcggctgcccccgcccgtcctcccctcccctcccgcgccggttgtaaaggaaaattgctcccaacttactggggtccaggtcggccttctcctctttgtgcttgctgccggcgagcgcgtccgcctcgggcgagggcagtgtctgcggggcgcggtcgcgcagctccccgggcgagccgtacatgtagtccgggtagctgcggccctcccctgggccgcagtccgcgcggcgcccggggtaggcgtccggcttgagggcgtagtgacggcccccggccgggaagctggggaaggagacggcgccggacagcggctcgagccaagtccgcatgtagcgcgtgtcggcgccgaggtggggctgggggccgtacgggtgatataccacggacgactgagagggcacgggcgcccacgacgtgctgaacactgccggcttgggcgcgaagctacaggacggaaaatcgctacagtccggcaccaaaccgctgggtctggcggcggcgggatgagccccggtggccggaaacctggacgctaggaggtcttcattgtcgtgagagatgagcgagtccacgtaatagttactgatgggccccgtcgccgacatcgtaacggggttttacatacataagattattgtatgaactgtatatgtactttttatctgctcacagaacaatcaagtcaggtaattatttttccagccttttccccacagctcattggctccccggcccccacgtgatcgtatttacccaaaaatacggcgcggatcaatgcgcaggggcttttttttccttgccttcttttccccctctcccacccccttctctctgctgctccccgcgacctgcgatttcctgggggtccggaactctggacccaaggcaccggtcaccccctcaggacggctcctagctcatctgagaagcccctgtgcccatgtccacccataagcagatggcctccccccaaccatgaggattttttaatggggtgaaaatgccagtccccgaagccagggttctcggacccccagggccgagctgggcgcgggagccccgcaggggcggggaggccgaccgaggtaggtggaggaactatttcttgacgtaatccgtctctgtcggccccgacgctcccgcagtctctgcgcgagccgagatcagcgattgtcagttcggaacgtggcttttaaaaatgcgtttttaaatagtgtgtatgtatgtatttctttcaggagcagcaggggcggtgagggagggagggtgggaggggactggggaagctgagatacagggagggaaggagggaaggggagcgttcttctgccactggccaactctgccccccaaatctggggtaggggaagcctggggaaggtggtccctgggtgggaggggtagaacctcaggatctcatacacctttatcagcagcctcagaagtcttctctttgctttggcacagatatacaggcgcctttattttaaatttattgtctatatctatttatctttctttgccagcttgaagaagtgtaggagagatctacacaacttaagtggggcgtccccatcccatcttcctgcgcaccctcctttgcccccaactccatctctgcgacacttccccacccccactccccccaaaaagtcgctcccgggctctgtctgcagagagccagggtgagagcgggcaaggcaaaagagcgacctcggtcgtgggcaagtagcttgtttttacgtccctcaataaaatttttatgaggatcatttgattgttcataaatgtatctttcattaaataaaattgtaggctgtttttggaacgggaaaaaagcaacggaggaacaggagaaagcaatttctttggggtcggatgcaggaattccagagggggcagtgtgattgcagaggaatatcagacaacttggattcctccccccaataagttggttgctaccctcctccttcaattgagggtttgtgcccagccctctgctttgcatcagactgtcccatggtggtgtagtaaaggggggctttagtcaagtaggaaattatcagggtgggtgaagaagagggggcatggaggttggctggggggtggggagaaagggacaggtgaaacccccagaaatatggtgcacttaggcagggtagagtgaatttaaaggaggggtgcaatttcagggtcagaaaggaagagtcccagtctgtggccagggaaaatagacaggagctgaggttgagatgcaggctctggaggcagcagggtaggagtcttcccagacccggccacgcctgcccttctttccctctcctgtccccaggaggggaccaaacgccaggggtaggggcgggggctagttttctcctgcgtctctatggatctttctcctctggggtggagaggggctggggagagtgtgtatagtatgtgtgttccggggggaggaaagttagggggagacagctgcagctggcagcaccgaccccagctccataggccccctcccaagtctctgctcctccccctctctggctctttccttttcctttttggtctaagggggcggcttaacggggctgggatttcaactcatgggggaggatgagggatgtgtttggttggggagaggcgacttgggggttcagctccttggcgccactgtcttcccctcccttgagctggactgagc

SEQ ID NO: 916304 - DNA, 4001 bp, Homo sapiens
accacttgcaagttagtagcagaaatcatgacactacacatctaaataattgagcatttatctcgttccaataaagataaaagtgattctctcatataattgcaacaccattatctgactgaggaaatttaacactgatatactataatttaatataaagttcatatttagatttcaccagttggcccaataagtcttgtaaagctgctgtttctcattaaataattcaagtaaggatcatgtattgcatttagtcattatttctctcttcctccctttttaactttattatttatttatttatttgagacagagtctcactcggtcactcaggctggagtgcagtgacatgatctcagctcattgcaacctctgcctccccggttcaagcgattctcctgcgtcagcctcccaggtagctgggattacaagtgtgtggcactgtgccttggtaacttttgtatttttagtagagacggtgtttcaccatgttggccaggctggtcttgaactcctgacctcaagtgatccacccacctcagcctcccaaagtgctgggattacaggtgtgaatcaccacacctggtcctctgctaattaattattatttttttttttttgtagagatggaggtcttgctatgttgcccaggctagtctcaaactcctggacctaagggatcctcctgccttgatctcccagcataatgggactacaggtatgagccactgcacctgtatttctctctctctctctctcgataatgttagaaatgttagtttatttttgaggggtgcggtagctcactcctgtaatcccagcactttgaaaggccgagctgggctggatcacttgaggccaggggttcgagacctcagcctcctgagtacctgggattacaggtgtgtgccaccacacccggctaatattttatatttttggtagagacagggtttcaccatgttggcgaggctagtctcaaactcctgacctcaaatgatctgcttgccacagcctcccaaagtgctgggattataggcatgagccaccacacctggcccattgcatttagttgatgcacatctttagtgttcttaaatctaggcaattgcatatccgcctcctttctctgtcccccaccccttattccccatgtgtatttcacaacattgactttttttgaagttttcaggccagttgttttgaagtatgtcccttcttttggatatgtctgttttccaatgattagattcagggcaaacatgtttgaatactacacagatgaccgctgagcccttttcaagacaaaatattagaggcacatggtcagatatcaaagttgattgtttaggtaagctgggttggaattttggcctcacattttgctagttgggtaaattggttattgagacggttttctcagctgtcaaattgggatgtaataatctagcttcatgaggttgttgaattaatatatgtaaggcatttagaacagcgtctggcacattataagtatcaataaataaacactgttaccgttattattatcactacgatttttagaggccttaacaggaacatccagcaccttcaacagtatatggctcataggaatcattccatgaatatttgttagcagaaggacagctctatgagatagattgctatcaattactgccccattttacagatgaggaaactgaggcccagagaagccaagtagtgacctagggtcacacagattgccgttaagtggcaagatacggggtgtgtactcaggcatatcggatctgtaaagtgagggataaggaaccttaatgtattttgtaaatcctccagggctgtgtggatgtgaagaactgaattggagcgccacgcagcggttctctggcgtacagtatccatccatacagtaggcgctcaataaatgtctgctgcacgaatgagaaaatgagtcagctggggcgagatcatcccctagcgttggtgtgcaattgcgtggggatccattgcttccgacgctactcctgccgggtcaccacaggcgcacgtgttccggcagggcgcggcttccggtgacccagctccgccctaagccccatcccaagccccgccccttgactgttctcgcgttcgcggacggctgtggtgttttggcgcatgggcggagccgtagttacggtcgactggggcgtcgtccctagcccgggagccgggtctctggagtcgcggcccggggttcacgatgtccgacgaggaagcgaggcagagcggaggctcctcgcaggccggcgtcgtgactgtcagcgacgtccaggagctgatgcggcgcaaggaggagatagaagcgcagatcaaggccaactatgacgtgctggaaagcgtgagtgtgggttcggggcgccccaagtcgcctaacccggcccggagtccctggggtactgggatgccagggcggcctcagtttgggcgctccgcaacggatctccctgggaggcccaaggcgccgcaagtgcggcctctgtcggcacaagaaggcaggcaaagaactttagcaactgaagagttagccatattgatatccagcaagagtttgtggagccctgctgtgtgctaggcgctggtttaagtgctgtgcattgttgagttaatttaatctttgcaacaaccctttgaggtggatgctgttactctttccattttagggagggggaaacaggtgttacttggtgattaaacagctgtcatgtgcctcgctgactgccttatcttaattttgtactttttgtaaagacagagtctcactgtgttgcccaggttggtatcgaactcatggcctcaagcgatccttccacctcggcctttcaaagtgctgggattacaggcgtgagctactgcacccggcatttgctgattgtatcgtgaattcttaaacttcagtgtgtatatgaattacctggggatcttattaaaatgcagattttgtttgaggcaagggagcagattctgcatttgtagcaaactcccagcaatgctgatgctagtggtctaaggaccgaactttgagttacaaataaggctcatcatccttattgcataaggaggaaactgaggcccagagtggggcaaacgcctatctaaggtcatgtagttcggaagtggcagtggtgggtctggctcaaaagctgatgcaggttttcttatgccatctagtgtaaaatcacagatcagtttgcagaggaagatgcaattaattatgcccaagtagggtgggatggaatgcattttaggtgatgtaagatgaagtttcttttttttttgtctgagacggagtcttgctttgtcacccaggctggagtgcagtggctcaatctcggctcactgcagcctctgcctcctgggttcaagtgattctcctgcctcagcctcccgagtagtagggattacaggcgagcgccagtacgccaggctaattttttattttaagtaaaagcagggtttcaccatgttggtcaggccggtgttggattcctgacctcaggtgatccgcccaccttggcctccccaagtgctgggattacaggcgtgagccaccgcgtccggccataagatgaagtttcatacggagggccagagaaccattttactgggtgctgactatatgctcaaagtgggattcagacttcaggtctgttacattcagaacctgtgctttcaagcaaattaccagcaatttctcaaactttagtttactttctaccacatgcagtatactatatgcatataccacttgtgttattcctttgatatttttatttaaatagatctacttttaatcttatataaatgtattattattgttattattattattgagacagggtctcgctctgttgcccaggctggagttcagtggcaccatcttggttcactgcagcctcaatctcctggtgtcaagcaatcctcccacctcagcctcccaagtagctgagactgcaggt

SEQ ID NO: 916305 - DNA, 4001 bp, Homo sapiens
aactccagggaccccatcggtcagggcactgcttaaaattcctctcctctgatatcccaggttttctgagcacctgtggggtcagtgttgggccaggctgaggaggaaacgaaactaggaagggccgtgttgcatggctgtacaaagatgccagcggaggggtcggtgggagctgaattatatgtttttgttgttgttgttggggttttttgttgttttttgtttttttttgttgagatggagtcttgctctgtcgcccaggctggagtgcagtggcacgacgttggctcactgcaacctctgcctcccgggttcaagcgatgtgcctgcctcagcctcctgagtagctgggattacaggtgcccaccatcatgcccagctaatttttctatttttaatagagatggggtttcaccatgttggccaggcaggggttgggggctgtcctgggggtggtgactcaccttcccttgtttgattacatggctgaccacctcccgggaaccggtctccaggcccctgtaggctagaggttcaaagcccatcttgctgcagtagaatgacgtggcctgaatcacagggttgcagcagggttcatgagggtcaaggggccagcatgggggacttccgcaagagagcccctggcccccctcagcctgcctgccctattgcctcaggggcagagaccctcctgggaagatagactgctgcctgcacattttgctgacagataactttcccgctggtgtaattaggattcagagtatctggcccacccctggcctgatcctccctcccaagggccaatcacagaccctgctggaggcctgcccttgtcaggcagccctctgccctgccgtctgctcactccagcaccttgccccggcttctacctgcttggcgttgccaacccagaaggtcacagagtggaagtggaggaatcggcctctctcaggctgcagaaggagagaagaggtgaggttgagtccctgaaagtgagtctagaaaagtgcgggtggagtgatgtcccctagccaccctccttattccagcctcaaccacagaacttaggagcagcggaaccccatgcagccttgccaagcctcaaaagaggtttctcatgtggaagttgagctcctgggtgtcttggatggggaaaccccctcaggaggcctgccaaggtttcacacagggaaatagacttatgttgcagcaatatggatttaagttagaccttagaaagaacttccagatgggattaaaagattggcaggcatttgagaaggggtacaggttttgttttggtttttgtttctgagatggagttttgctctattgcccaggctggagtggagtgcagtggtgcaatcttggctcactgcaacttccgcctcccaggttcaagcgatcctagggttcaagtgatctcccccaccttagcctcctgagtagctgggattacaggggtgcgctaccatgcccggctaattttcgtatttttagtagagacggggtttcctcatgttgaccaggctggtctcgaactcctgacctcaagtatttgcctgccttggcctcccaaagcactgggattacaggcatgagccaccatgcccggccaggatacaagtttgttgtgagggtgaggttgagtccagctcagtctcggggagccccgggggtaaagctgagtgtgcaggcatgcacgtcatgtatccactccagtccttcctcttctgctctctgctgaaaccccagtctccctgcactccgacccccttctagactcaggcccctacatttcccacatttcgcctgcttacctttgcccctttgtcactgtaagtcgtctaaggagaaaaagaaggacagtgagacttggaggttccaacacaaggtgcttctggaagcgttactgaagatgtcccacccaaggggagatggccatggcacttaccatgattgatcttagtcaaacctcctactgggactagaggcctggggagtgctgggccggagtatttaaccccaagcaggtcccgcccaggcctcctggcctacctgggggatggggtggggagctgagcccagccctggaaggttccaggcctggggacctctgatccagccgcagcctcattgaacaggatggtgttgccaggcccagagaggggcagtgacgtccactagtcagtgggaggcagagtcagggccagaagccaagggcaagcttttccaggacgctgggaatgtgaccattactgcccagaatccaaagctcagaagccaaggccggctggagtgcagtggcggctccagaactcttgcctagaggaaatttgagggggcatttggagactggccccaaagtcctgtttgcgtcacagcgttgtattccatagctctgagaggcacggcaggagaaggtttgcatcctggctctgttacatacagtgtgacttgggaaaatcaccatatccctttgagcctcatttgtaaaacaggaatgagaatagtgtggtggggattaaaggagataagcacgctctttggaacaggacctggcacacaggacactctcagtgttggttataattcattgggacagagaacattcctaggccatgaggtcagcaagcggcagggaagaactggaacatgaaccgggctattctaactccaggacccacactttaaattgctagattgccctctatacaaatgggagatattgatatccccatcagatggggaaactgaggcctggagaggtgaacacatgtctcccaggtcatggaactggtaagagcagagccccaaactctggcctgtttgattctgaagttggatctcattgcaccagtgcagaccacttctccctccttttctctattttctgggccattcaggaggcaggcaaggtggtcccacccccttattctgcctgtcctgggcctgcccagtgtgctcccagtgtccacctcagctccttaagtctaaatttccaactgggggccgggggtggtggctcacgcctgtaatcccagcactttgggaggccaaggagggaggatcacttgaggccaggagtttgagaccagcctggcaacatggtaaaacctcatctctactaaaaatacaaacattagctgggcacggtggtgcacgtctgtagtcccagctactcaggggactgaggcaggaggatcacttgaaccaaggaggcagagattgcagtgagcagtgatcatgccactgccctccagcctgggtgacagagtgagactccatctcaaataaataaataaatatccaactgggaaaacttgagtggaggtggcccagggtggatctcacaggcccagaaggttcccatggaggagaagagctctgtgtagcctgcctatcccctccaggccagcaggaacatcttgtcactttgattgctgtggccaactcaaacccccactcctggagcctgccctggcttatatgctaagcacaaaggccaatgtttactaactcaaggaagtgtgtcaacagcagtgggttgcaaaggctggcaggcatctagaggtaggaactctgtccccaacactgtaggtctcagtcccatgctgggtgcacccctagatgccattcacatgtctgggcagagagcagggaggcaagcctgcagggcccagtatccagagtcccctccctgatgctctctgttcaggctgggctccactggataacagatcagcagtggctgggtgtgactgtctctgttcttcatgcccgaccatgcagaggtgggttccagaggccttgctcaagaagctcactgatcagatgggttcataggacgcatccttgaaaataccctggtgtgcagaaaagcattcacctagctgggcctggtagtgagcacctgtagtccccagccactcaggaggctgaggtgggaggatcacttgagtccaggagttaaaggttgcagtgagctatgatcacgc

SEQ ID NO: 916306 - DNA, 4001 bp, Homo sapiens
ggcttcgcgtctgtcgctcaacttcctttttctgcaccccgcgatccatccaaaatgttcttcctgtccctgggattgggcagcctcagcctggcccctttcagtcgcgggagcccctggcctctccaacaggagagagagaaggtagggagaagtggatgggacccccggcgcccgggagccgggcagagagcgccccgaagcgcgcatttctcttcgccagcgcccgggctgcgcgggcccacgcgacatctgtcgcctgcggtcccggctcacaccccgcgcacccccgcagctccctgggcgctgccaccccccacgctccggctgccgcctttccccgcgggcgcagacgctcgggcctcgccttcaggcgccgctccaacttcccagggtgtctgcggcgcgcggcggggctcgggggcggggacctaagggcggctggctatgtcaccttcgagcttcaccttccggccctagacccatctatggtgggctcagcctgattctctctccctcattctctgcagcgctcctcgctactccaggatccagagtagtaagacgatgcttacgctgtgtgcttcctcaaagcgcctagcacagtgccaggcgcacagctagggcacaatgatccccccaccccaagagcctagtaccttcctcccactgataccaaccacactaggtgctcagtacccacttcctgtcctaagttctcaacacatgacctccctaaacagtgcccagcaccccgaaggagctcaataaatgttccttccttaaggcttcccattggagtttccctgaaagccccctattccagcccactccgagggcgtctccttcccgtagcagctacaaccgtctggggagaaggaagccaaactccttaaacaggacacctcactcgagaaggagcgaagttggcagggcagaggaaaattgcaaatgcgcggagcttgggaagaaagattgggccagccagaaacctggagggggaggaagtctcgagatgcgcttggggtgccagataatggggatcagagattggagaagtgacacttagggacaagaggttgggagcaaaggtgatggagacgggggcgactcaggaacggcaagaggattggaacgggaccggggacctttcttggaagtgcgatagattttaagtatttggcgtggcttacaactacattcccatagcaagcacactttttacttgcattgtgtgtttatttgtggggctggtggggattatggaggctgaagtcctccgcaagccactgagctataagtgagtagcaagatgcgcttaaggactcgcagagatgggggcagaaacggtggaccttacacttggaagggaagactggggactgggtagaagaggagaggtggagatgcttgcaagagaagagaacggaggaagaaggagaagggaaaagaagaaagccaaacttgccactctcccgctcccgggccagcccagcgtctccagtgcccagctgccgcgccccggctctcgctcgctcgctcgcgtacctgttgctcgctccggctgggtctcggctccggccccaccaagaagccccgcgttcctacaagttccgcctgccgagcagccaggccgccagcgccgccacctgcgcggccgcgcacagccaaggccagtaggtggggagcgcgccgggcgccggcgccctccggctccgcgcgcggcgccgccacatggtgcgctggtgcagctcgtcgcctagcgccttgagccgggcggcggtgagctgcgcggcggacgagcgcagccccaggcgacccgcgctgcaggcgcacacggccggggggccgcggccgcggtgcagggggcacgggcacatgaccgctggcctcgctcccgccccgcgctcgggccgcccctcgcctcctctccctccggcctctgcgcccgctgccgccgcgctccagccgccgggggcctcccctggacaccaagtttctccttgtgttgtgcgtttgttgtgctgacggcgctattattaattaaagtgtcacatggtggaggggggcggggaggggggttacatcatccggcccccgggggttggggggggggctgcaggcagaagaaaccgagaggtaacttttaaccctagcggcgccggcagctagggagcgcgaggtttgggagacggggagcgcggcgcggggcggcgcgagaaggctccccgcagcggaggtcctgggctttgggggtctcgggggacccccgcggaggcgcggagcgcgagggaaggttgttctccttccccttttcctgaattcagctcgagttccgatttggcgagggaaaaaggcttgtttgccgttttggatgaagctgatgctgaattcggctgcattattcaaaaatattccgaggctgttgttttgtttgggggaggtgggtggattcaaaatcttatggaagggtcagattacacccaacttgcctcgtttcaggtctgacttggcacctgtaggctttcagcctgaccctaacgtgcccccagcgcctggctagaaacctgaccctaaagtgcccccagcgcccggtgggaggctggatgggcccacctgagctcgcgtggggcgcggacggaggcattctcgctgcccggcacccgcacccaaaagaccctcgcaaggggctttctaaagggaaacttcttgtctgctttctttgtgaacattattttcctgatggcgttacagttttctgcgatgaccccgatttaatgcgcagtggagaccctaaggggtcggcgagaggaggggcgcgggggactttaattcccccttttccaatccgacagccactcctgtgcacctccagactggagcgtctgcagttgtcacaaacggtgaaggttcagatgggctgggcggctgtcaggattctgtgggggagaatgaaacctgtgatcttaaatcgactgggattcagacaactttgggattcagaccatcgggatgagtccagagatggctccaagttgggagtctggaacctgctgagggagcttccgttcttgccttcccaccgcagagtataaccaagattcttcgagtctgtgaacttagttttggtctgaattgatcaggaggagaaatgtcccttttggcccacagcgtggtgaaatgacaacaaagtcagggctcaaagcccacaacactgtgtgattctggtggccttttccctcacccagctccaattattctaggcttcataatggccaagacctactgcgcatcttctatgtctggcacctgtgggctttgggcgcccttgcctctgctgcctaaaggtaaatctcccaacaattctacatgcaattactataatatttcaaagatgaggaagctgaggcacaggtaggtaagggttcttgccctagctcacagagtagctaagaatgaaaccgtcatctgaactagggcagtatgccgcaggctctaagctcttaaccacggttttatactgccccctgtaatctgggaataataatacctccatcccaggattggggcagagattaaatgagagaaatgtgtgccaagcacctggcacgcagtgggccctggatagaccttggttccctttgcttctcgccagaaccacttcccattctcctgggactcacctccttaatccccctagtctttacagaggggacctgatccattgcccgggtgtagcgttccaagaatgaagacacagtgtctatttaaaaagccctttggatttaaattgaacaattccctccccccatttttaatctgcacgcttttaacggctcacttcatggacattaattttaatgggacgattattaccctgtttggaagcctgcccctcgaaatgctgggctcgcaaggtggcgctgggtcgggtcccagcagcttggatgttgtctgtagaagagggggtgcaatcttggccgtggggatgcaacgttcag

SEQ ID NO: 916307 - DNA, 4001 bp, Homo sapiens
gtgatccgcctgcctcagcctcccaaagtgctgggattacaggcgtgagccaccgcacccagcctaaaaaaaaattttcttaaatagaatcatgaggccaggcatggtggctcatgcttttaatcccagaactttgggatgcgaggcaggcagatcacttgaggccaggagttcaagaccagcctggccaacatagcgaaacctcgtctctactaaaaatacaaaaattagtcaggtgtgatggcgggcgcctggaatcccagctactcaggaggctgaggcaggagaatagcttgaacctgggaggcagaggccgcaatgagctgagatcatgccactgcactccagcctggaagacagagtgagactctctctcaaaagaaaaaaataaaaaatagaatcatgagcatagactctgaggccagatggcctgggttcaaaatcaggcttcgagatttacttgttctgcagccttgagtaagtgaactggcctctgttcctgtgtgctcgtgttcaaaatgggaaaaagaaacctcagtgatttattgagagggttaaataagttaatgcatgtaaagcaatacataattgttagatattagtattattttgggtagttgttgtcttattattgccatattgcctttctccctgagccctgtctcttcccctgagctttcatagaaggaaactgtgccatgggaatgtgcattatctggtgcattacaccaccacttttctacagtatgcataactccacatattgcaacatccttaatcatttctatcagctctttatcactattttgggccatgctcgtgcaccttaacttccttctgtctcaagcgaggacctctctctctgcaatataatacatggcaaagtaagaagtagcctttattcccttctttggttaaaatcttcagacatgggtttgtctataaactccagtcagcttagtcactgatcctaagagcaagtctgtaaacagcacatggctccctgaactgatccaccatgacattcttttcttcccacttgggcatacaggctaagtattcctcaagtcaataattgttttttcttttctttttgattttcttttttttttctttttttctttcttcttttttttttttttttttttttgagacacggtctcactctgtcatgtaggctggagtgcagtggtgcaatcacagctcactgtagcctcgacctcctgggctcaggtgatcctcccacctcagcctcccaagtggctgggaccacaggtgtgcaccaccacacctagctaattttttgtattttttgtagagacagggtttcatcatgttgcccaggctggtcccaaactcctgagttcaagggatcctcactcctcaacctctcagagttctgggatcttggcccaatcacagaaggcccctttccgcttacccaaagtttcacaaacttacccaacagctatcagcattaaccattaaagagcttgtttcccccactgccgagaatcccgttttcagaggatacccagagtccctatttgtaagtatgaaatcactcccaacttgtaaccagtactctcccaaacttcatgggagtaaagatcaaaaaagcagagcaagcaatcgtgacaaaatttctttcacgaatcaaagttgaaggatcttttaagatgataaaaaatcataatcaaaacctgtctccaaacagaccatatcccatatcccctacacacacacacacacacacacacacacacacacacacacacacaaccacccttacccacctacataccggacttgcttaggaagagtccagtcctagagacttgaaaggacttctttgcagaccaggcagcagtcggcttcctcctgccccaactgctgcccactccaacctctgcattgctcttataacacctccctcttgtggtaagagtccaggctgcttcactccctcatagggttctcaccagtgtcatccttgatcagctgcagaatcagatctgttactaccaaaatgaaaaacagaaagaaagaaaagagctgccctgaccagagagtcttgtatgctcctcagcccccatcctctaattttttttttttttttttgagacagagtctcgctctgtcacccaggctggagtgcagtggcatgatctcggctcactgcaacctccacctcccgggttcaagcaattctcctgcctcagcctctggagtagctggggttacaggcgcctgtaaaaatttttgtatttttagtagagatggggttttaccaagttggccaggctggtctcgagctcctggcctcaagtgatccacctgccttgacttcccaaagtgctgggattacacatgagctgacgcacccagccctctatttaattactgagacagggtttccctctgtcactcaggctggagtgcagtagcacaatctgggctcactgcagcctcgacctcccaggctcaagtgatcctcccacctcagcctccagagtagctgggactaaaggtgcacgccaccatgcccaactaattttgagtttttttgtttgtttgtttgtttgtttgttttttgtagagatggggtttcaccagcttgcccacactggtctcgaactcctgggctcaaacgatctgcctgcctcagcttcctaaagttctaggattacaggcgtgtaccaccgtgcctggtcccatcctctaatttaaactggaatattacaatgcaaatcccctgctggaatggggtcagagggcaggttgattttagcaaagcccacttcttaagactgccaacctgagatcagctgctgcaagctggggctggctcagtcacctttctgaaagaactgcagctgtttcatagcttgagccctggacctagggttgtgtgtgtgtgtgtgtgtgtgtgtgtgtgtgtgtgtatatatatatatatatattttttttttaagtaacagctttattgaggcataattcacatatcataccattcactcttttgaagtgtacgattcaatgggttttagtatattcacaaggttgtgcaacaatcatcactatctagtttcagaatacttttattatcccaaaagaaccccatactccttagcagtcacctcccattctttcctcccacaccccactcctggcaaccagtaatctactttccatgtttgtggatttgcctattctggacacttcatataaatggaatcacacaatatgtgacctttgtgactggcttcttctgtttagcataatgttttcaaggttcatctatttatcagtacttcattttaatgtctgaatcatattccattgtgtggctattccacgttttgtttatgcatccatcaactgataaacatttgggttgtttctgcttttttgtgttattatgaataatgctgaaacgaatatttacatacagattttttgtgtggacatgggccttcaattctcttggatatatgtaccctaagagtgaaattgctgggtcaaatgataactctatttttaacattttgaggaattcccaaactgttttccaaagaggctgcaccattttacaatctcaccagcttcatatgagggttccaaattctccacatgctcaccaacacttattatctttttttttttttttttttttttgagagggagtctcactctgtcacccaggctggaggacagtggtgcaatctcaccttactgcaacctcttcctcctgggttcaagtgattctcctgcctcagcctcctgagtagctgggattacaggtgcatgccaccacacccagctaatttttgtatttttagtagagacgagttttcgccatgttgaccaggctggtctcaaactcctgacctcaagtgatccactcacctcggcctcccaaagtgctgggattacaggcatgagccaccgtgcctggccatattatcttttttattttagccatcctagttggtatggat

SEQ ID NO: 916308 - DNA, 4001 bp, Homo sapiens
tctaagttctcttatttgtgatgcatttaatccatccaactgaatagcttcttcctctctaaggaaatcagttaggtaagcaaatattgcatggcatagttcccttcaaaactagaggaattatgatgaaagcacaggggcctctgaatattgtcttgggggttaaaatggaaacctttataaaatataactgatataccgtctcattatgttagcacagcagtaggctacctttaacattacactggaaatactcggttcttaaaattgccagaaaaaaaaaaatcccaactttcctctactaaaaagcaaagtcatactcatttatgctccacagtgaggacttcaaaactgtcaataagtcccaagaggccaaattttaaaatattgttcaactgacagaaatcccatttttaaacttactcggtgtacacagttaatgaatacaaatccaactgaaagtatcttctataaagtcttacaaagtttatggtgctagtattctgcaatatagttttcaaaggaattcactcagttttcatcactcctagggacaagttaggaggtatgtatgcacacaactcaccgggtatttaaatacagggtgttagactttatctggacctttggagaagagatacataagaagtgaccgtaactcacaaggttcacacggcttatctgtatacgtaagttcaaatgaacacaaacctctgtactacttcatcatccgtccttgatccttctctacttttacccagatcctcttctactgtaccatccacatcaacttcatcgtcagctctgaccgaccctgaagatttaacacgggcaaactcttcaacatcacacttctccaaggaggatgatcaaatagggaagggtaggggttgcaaaattcagttggtaactaagggaggtggggatgaaagagtgcattccctggtttaaataccaaaggtaaagccaagacagaacatctatttaagttcagatgctgaagtctccagtagatcctgaaatacggaggcagtcaccacttctaaacagtgtgtctccgatcatttataaataacgttaagcagactgataccaggcctcttctacacccacacgtgttgcgcgcaggccgagccaaggcctcccaactgatcaagccaaaacttcggccttcgttagcacaggtcagaatgcaaataggatttatgcaacctctggcgaggggaactgaaattgagcccagaggcatgagaagggggagaaatgttaagaaccgaactccagcaaaactgaatcaaacacgctgacactgccattccgctggccccaggcctcacgctcccgaggccagcatctaagaagggacacgggcttgcgaggagtcggagtctggggaattaggggacgggaaagctgggatggccgaaggttgcggtggccgaaaaagtcctccgggcggggaggggggagggactcgcacagctcccgggggagccagagcctcagagaggccccaccccgaggtcgctgagacctccgggcgagatactattagatctgtagggcagttagatgatgttgctctctttttttatttccagaggaagaagagaataaacgtaattcccttgccctctttcgaggaatggtgacgtcccttggcccaccgcaggccccgggatcccccctcccacgttcaacgcccccaggaccttcgagaagcggccgcgtgtgtggaggggggacgtctgctcctccagaatcactcaccgaaggtcagcaggacgcagcagaggcccagcacccacagggccctcatggcgtgcggccggtgagtctcaagtccccttcgatcgcaggagccgcctccaccccccacccctgggttcggatcctcacacctccagccgcgcggtccgcccactacaccgcaagcaggtcgggccgcttttcacccccacttcccgcgggcgggggacgggaaacatgaacccaccaatcgcgccgcaccacgcacccacggcacccaatgaggattcgtgagggggggcggaagtccaccaatcggagctgtccaggtgcggtgaccgatgcccgaagcgtggctccttccgattggtcagggtttgcagcttttctccaatcaaatggctccgcgggcccctcacacgtgggaccgcccctttgcctgggcggccttggcctctaagggaaaacgtccaatgaatgtaagcagagaacacatccatccttttagagaggtcgcggcggaactacttccggatcctagagagcgtttattccgtgaccggggaaacggtagccatggcaacgtgttcttcaccctttcccatctatgcctggggtttcgttggaagtgattccagcacgactttcgcggccagctttctcgtgtggcggcgcttctcggaaagaagaaacacacgagagaggttgcaaatcccctagaaccctttcagatggcgggggggcgggggggtggcggtggtgagaaactacagctcccggcatgcaacgtcctaggggttcactgcattgaatgctgggggtcgtagtctttggtctctgaggaccagctgcgtagttttggccctttctttcacgttcccccagcgtgtctttgccagagccctgccctgcgtcttagatgttacatctcgttctgattacagtagagatatgtgcctattccaggagtctccattgtacacagcttttagaagcgggcctagaaagccttcatgcctcgggcaaggccgcccggttctggggggtcggtctgagtctgggggctccgcctccggctcaagagcacgagtttccgaatccgcctacaagtgcgtcacttgggcagccggagcgttcacctcctctgtgcctttccgcggccggaatccccaggccttccttatctggtttacagaagaacgtggttgggaccttcccgaccaccttagggaaatcgcgagcagcgctgaggccttcgactccccaataaagtacaaaggcggcggtgacctgacggtcgtagaaccctttctgtgaatcaggtggagagcgtggtcgtaaaagcgggtctagcacagaaaaggaaaacccttagtttaacgagtgcaggaggatgcacctgcagatatttgaaagcaaaacctgtggtgctgcacatgagaacgggattgcagctttgtaacttcatagaaataccctgtctgtgctcagaaggacatataaaacaccaggtgtctttcctgtgagggaagtccctcatgctaaacttgtgcctttggaaatattttctacgtctctttaacctactctatacgttaccccctcgcatacccgcgcccgtctctgacatagacaccccacttccttattgcttcctccaacaaaattgaactttgaatatcttttcagataatcgtccgaattcctgaagacaagttttttagtgacagtctgtcacagtcttttacaacttcccgtatttagtgtgcggatcttggctctgtggttggcgctcacgtgttgtggtggtgccttatttacatctgcccaatttacctacatttgttattagtaagcaaagagtagcttacaaagaatgctttatgtatgcttctgtgctttcatctttttttaaaagagcatactagagtgtgaattacattcagagatttcagttgcatttttgtatattttaactcctttattttttgttttgagagaaaactgagtttcttcacttttttttctgcatttcacagctcaacttcttgaccttttcctccaattctgaataagtaagcaaccagttctgaaactgcaaatgccaccttaactagtgagtggtggggagttggtgctgcacctggagagaactgagacagagacatatccttcaaaacagagccactgcttgtgggtagacgtttctgcagatgatgatgggaattcatgaggcagacagagcacaagat

SEQ ID NO: 916309 - DNA, 4001 bp, Homo sapiens
ctgattttctggaaggcaagcctctgccgggaacacattctttttaatggagtgttaatcaggagggaaggaaaagaaagatttttctactgcccagcttcacaggggctgagcttcctgtcttctctcatttttccccctagtatgtttatttctcccagggtgggatgcggcagtgagagccctgggcctaaagctgtgcataggcccagtccctactccactcctattgctgactcatggcatgactgtgaacgagtcccacctaggcctcagcctcctcagctgcaagatgggcctaccctgctaccctggagtggactgaggatgattttggagaagtataagaatgtcagcccacccttggcacctagtaggtgctcagtaaatcatcacttcttctttctggcctcctaattcccagacaacctgggtctgactccttggtggccttgaacaagttactttaatctctccgtgcctcagtttcctcatctgaaaaaagaagataaacagtacccacctcctctggttgtggtattagctgagatattataggcaacagcagttagcaaagtgctgagcgaatagttagcactcagagttaccagttagtgttactacaattactggtaagcctcagtttccctgtctgggacaaggagaggtgtttcaccggaaaccagttgcggttattaacactatcattgttcagccttaacgtgcacttctagactctgttatgatgctggagtgcacaaaatcccgtttcttctttgttttttaattctttgatatctgcttaacctattctttatattaaatgccctctgtcaaaatatccaacatggtttctattttcctgtctgtaccatgattgatgagcacccagaggccccaatagctgagtcaggcaggttaagatctctgctgggagccgggagagaagttttccgtaaagataactttgcaggctgcattcctgagccctgaggtcacctgtgtcacactgtcccaacgtcagctcccaggaaactttctctggctattcccagggctgagggctacatcccggcctccccattctctctccctcctgcccctgacttaccagacacctccacgtatccatctttggtcttcaccatcaactcctctggcttgaagctgtgcacattcacacacactttccagggctccccagggaagggtgggggggtcctgccctcggcaggcaccccaaacctggcggtggcagtggggccccggggcaccatgcccgaccttagggtgcctggccaggcggaggagagacgaggcagagcccagtcgggccaagaggctgtcaagtcgtctgggaaggggtccatgccaaagccatcatccagcaggcgagaggagaggggagagtcccggaaggggtctcggcgcaggcggcttgggtagtggcaggagaagggcatctgaccgtcagccatggtggctgctcagctcagagagaaacagaggctcagagagacagaaccacctgcccaaggtcacacaacaaggtggtgtggctgggctagcttattcttcagcttccgaaaatgctgcttttctgcagggagaagcagaaccaaccactgccagggacggttgtgtcccctcgactggggtcccagcccccaaaggtaacccccggggcagatccagcagaatcccagagggtccccgtccgcactgcctcacgacagaccggcaagccaccgtcctcccaggcttcccaggctgcccaggctggcagccagaaccgctgaggtctagagcggagccaggagcttaataaacccagggcacgcgcgcctagaaacttcttctggctccttctgggctgcaagccttctatttatttgctgctggaggctggaggcgggttttgcaagcgtctcctgtcacaggaatattcggaggtgatgaaccagccccggagaatccgcggagggaacagctgggctgtggggggagctgggaggggccgcgtccaagttcagccggcctctccggacactctctcctcccctggccactccgctcagctccgccctcctcttgctccaggagctggagccgccctccccgagcggggcactaaggcctggctattaataaccccgagcctggctgagggctcaggtcaccctctggaaataccttccctagagcgtgtcgtatcctgcctttcccctggggacctgcagaaagggaagagagagacaggagcccagtggatttgaaggatggccctgggttgcaatccccacttacaagatggccaagctcctagagcctcaatgccctctggggagattggtaaaggaaaaaaaaaatttttttaatgtgtatatatatattcatatgacgcttgttaaagtatgacaagcaagactttactgggcagggaaactttctccatagatgtagggacccctgcaatgggattttgcagtgagggagaaagattagacttgattcccagtaggtcatgggtaagtgtgaatttgtagccaagaagcaggtggggggtcagcgaatggaaatttactaggagggaagtccaggagtcagagggattcgggctcagctaacctaagaggattcttgctgaagacaggccagggtgctcagacatcacctgggggaccgcggaggatgaggaaactaatcagatatcgagggtgatcagaaatcgaagatgggtggttgctactaaacagacttagcagagttcatgccaaaactgaatttttctttctttcttttcttttttttttttgagacagagtctcactctgtcccccaggctagagcgcagttgcgccatctccgctcactgcaacctccgccttccaggttcaagcgattcttctgcctcagactcccgagtagctgggattataggcacccgccatcgtgcccggctaatttttgtattttttagtagagttggatttcaccatcttggccaggctggtcttgaactcctgacctcatgatccacctgcctccacctcccaaagtgctgggattacagacgtgagccacctcgcctggcccaaaactgaatttttataaggaacctcactgatgggcttaggagaagattcagaaatccgattaatgtttggtcaatcaaagcatctttataggcagtaacattattcccaggcacctccaggttgttagttttcctccttataaacggacataacagtagccaactcacagatgtaccatgaagaatacatgaggtaattctctttctccttgtattttcaattttgagttatcaattacataatgtttgctatatgccaggccctgctctatgggctttataaatatgaattcatttaaccctcaccagcaatcctgtgaggtaagagtaccagtattatcccattttacagatgagaaaactaccatagaagtgttcatgaatagtagcttctattattattatgactgttaatactgataattattgaaagatgttacactcaggcaggaggtctggtctgaaactcaaagccccaaatctagactttcctgctcttcccatgcagctggaagaatgaatttacaaatcctcctttggcttggaggcctcttcggcttgggttctaatctttgatctgtccgcaacaggcagaaaattttaggcatgtcgttttccctgtgtgggctttcgggtctcagccctgccttcttcacgagatgagggtaaactgaggatattaaggaattcagtgagtcataggttgagaaattgttttgatattaaacagtgagtgcatgaggcagtttgctaaaaataataatacggagaaaaacaatcactgtcgcccattgcctcctgtgcgtctgcttttagagttagtacatttcagacattactgagttaaatcctgactcgatagttaaacgtcactattatcatcacccccattttgcaggtgaaa

SEQ ID NO: 916310 - DNA, 4001 bp, Homo sapiens
acactctggctttctccttcttgctaaacctgtgtcggggagggcaggggccacagagcagctctggaccttgtgcaagcctcagcccagagattttcaaaaccctgcccttatcagcctttccctctggggagtcagccagagaagttgccaccccctcaccttggtcttactcaagcagctcctagttgctggtggggctgtccggaaatcctgcagatctcagatagccctgaacaacctgaagttaaaggtgcccaggacagagaagtactctcagaggggcaggacggagggtggaggaagcactggaaccatgaacttttggtagtaacctggtgccaggggctaagcctgtacaccaagcatcttatatcatcttctcagcaatcctgcgaggtaggtacatgcttaacctcatgggacagatgcggaaactgaggcagagacaggccaagtcacgaagctgagcctgcaagatcccccacacccagcactggtaaaagtggtgggggcaatgttggagggagttccactgaggaactgctctcccctctctgtcttggcgtttaccctggccccaatcactcttgttcctcagcatctctgtctccaacaggtgggtgcttttaaagtgtttctagggaagagtttgcttccccggggctcctccttcagggatggctgggcctgctcattgcagccttctcccgggacatccagcactgcctctgcccctgcttctctcctacaatctcccgggagggcagcggggcagggacgatgcatccgaggacttaggggacacagacctggttgtgagttctggctctgcctcctttggctgtgtgacccaaggcaaggggcttggcctctctgcgtcttggtttcttcacctgttaagagggagacgacgatggtcacctgtggctgctgcgcggagtgtgaagaactgaaggcacctggcccagggcggcgcgcaccaccaactctccgggatcggggggtcactagggccagcgtctcccgcgttcccctcccctggactccagtccctgccgaggggaagcactgcccgcccgcgccgggacacgccagagccgagggcaaccgagggctggggtcctgctggggctccacggcgaggcctggacagcggagatgcgggggggggtcccctcttctcggaaggatcgggcactgggggtcttgtagaaagggctgcacgccaaacggggtacgccccccgcccggcccgagcacttacccggcgccccacccgcccgcggtcaccgctgcgactgggagcctcagagcaggtccggcccagcccgtcccgccccgtaccgtaccaggccccgcccccgcccgggccgcccccgcccccgtccccgcccccacagcccgcagacccccaacggtcggcgggcttctaggcctcggcccgggtcttagtccccttgtccctgcctgtggtcagtccacccgttcgtccctacctccctcaccccggctgcctcccgccccgcagggtgggcctgtcctgggcctcccgcagttacaaaggtcccgcccgtgggagcgaatcgcggatcacaaaaatcctgccccgggccagcctaagggaagggtgggcgggggaaccacttccttcctccgccggctggagcggggcgaatccaccccgccaacccctttcggggagcttctgctccatcccaccgtctccgggccacccctgcctctgggtctcctgattccttggcctcgtcccctgcacagtttctgccatgcaggggtggagggtgggcagcacgctctgacgaatgagcaacctctcagccctcagaacttcccttggtcgagggctctgaggctgctcatgggatggtactggcaagagggagccttaccgcgtgcagcccctgcctgtcctgggccgccttgctccgggccaactcgtacggccccgcaggcgcaggcccagctctgaagtccctcccctgtgggccctcccagcaccctgttcacacagtcgaatcagttctgttagcttctgtcttcccccagagaccatttgtcccaaacatcctgcaaagccgtcttctgcacacctctcccttccggttgagtcggggctgtggggagaggctcacctccttggggttgtgttagtttcctcatgccgctgttaacagatcaccacaaacctagtggcttaacacaaatgtgttatcttacagccctggaggccagaagtctcagatgggtcctacagggccagaatcaaggtgtgggtggggctgtgccttctggaggcgccagggtagtgtgttccttgcttttcccggctggagaggtgcctgtgatccttggctgtctcaatccgacctctgcctccatggtcacagcgtcttctcccttctaaggagccctgtgattatatgggatccacctggataatccaggctaatctctccagctcaggatccttcacatagccacatgtgcaaagtcccctttgccacttaaggcaacatacaggtttggaggggttaggatgtggatatcttggtaggggggtgcattcttctgcctcccataggggtattgtctgcttcaactgactcggctttccccaattctgctgggcagctggctttcttttcttttttcttttttttggaacggagtctcactgtcgtccagcctggagtgcagtggtgcgatcttggcttactgcaacctccgcctcctgggttcaagcaattctcctgcctcaagcctcccgagtagctatgattacaggccagcatcaccatgcctgactaatttttgtatttttagtagagacggggttttaccatgtgggtcagactggtctcgaactcctgacctcaagtgatctgcctgccttggcctccgaaggtgctgggattacaggtgtgagccactccacccggcaacagtctcactctgtggcccaggctggggtgcaatggcatgatcttggctcagtgcaacctctgcctcctgagttcaagcaattctcctgcctcagcttcctgagtagctgggattacaggtgcctgccaccacgcctggctaatttttgtttttttagtagagacagggtttctccatgctggtcaggctggtctcgaacttctgacctcaagtgatccgcctgcctcggcctcccaaagtgctgggattacaggcgtgaaacaccatgcctggactgcagcaggctttcttttttctttttgaggtggagtcgcgctctgtcacccaggctggagtgcagtggcgcgacctcggctcactgcaagctccgcctcccaggttcatgccattctcctgccccagcctcctgagtagctgggactacaggcgcccgccaccacgctcggttaaatgttttgtatttttagtagagacggggtttcaccgtgttaaccaggatggtctcgatctcctgacctcgtgctccgtcctcctcggcctcccaaagtgctgggattacaggcgtgagccaccgcgtctggccagaaggctttcttaaaaacattttggtcagatctcctgacttctcagtcatgtattattacaacagccccatgccagtttctaaggcatagtctggtccattttcaacttcaacttccttatattttattaaaaattctcctcctcccccagggccagctagacagagtggagaggatgtggggactgctcccaacagcccctcctctgtgttcactcccctctggttgaggaagggaaaagggaacaagtaccccgtcccctagttgcacacctggaagttgcagccctctgtcttaacatctggtcttgcctgtagttagacccttagtgcagacaggtggtgacctcaacagaccctgctaaggcaaggcaaggctcaaaccctggcctggcttgatcccctggctaccttcccccatcccttcccctacagaggcatcgctcagtct

SEQ ID NO: 916311 - DNA, 4001 bp, Homo sapiens
ccaaggtgaagaggaaagggcaagatcacgatcctggtagactgacatgttacctggggagacaaacaaggaagcaaggaaatatacaagacagaccacaccccccccccccagctaagcactgggaagccagccagccagagtaaggggccagggagcaggcggggtctccttaagtggggtggtcagggacaactcgacatttatggtgtgccctgaattacaagggagtatgtcacagattgcagagaagagcattcccgggaaaaggaagaacacgtgtgctgtgcacagcccctgagagagcggagtacttaggaggtggcggctggggacagcagtggacaggacagtggccagagagaaaaattgagaataatcacacagggcctgatcatggagagggcttggcaggcgatgctggggatttggatggaagtgaggggtccagcgtgatgaggcggcaagagatgctggcggcctggtctcagggtggaagtagggggtggaggggtggccggattcaggatatgctttgggttagaacttgtcgctagcctagactgtggggaagggacgaggagcggggtggtggatgacagctcccagggcccaagccccaatgactagcaaaggatcaagtctggggacaagaacactctggctttctccttcttgctaaacctgtgtcggggagggcaggggccacagagcagctctggaccttgtgcaagcctcagcccagagattttcaaaaccctgcccttatcagcctttccctctggggagtcagccagagaagttgccaccccctcaccttggtcttactcaagcagctcctagttgctggtggggctgtccggaaatcctgcagatctcagatagccctgaacaacctgaagttaaaggtgcccaggacagagaagtactctcagaggggcaggacggagggtggaggaagcactggaaccatgaacttttggtagtaacctggtgccaggggctaagcctgtacaccaagcatcttatatcatcttctcagcaatcctgcgaggtaggtacatgcttaacctcatgggacagatgcggaaactgaggcagagacaggccaagtcacgaagctgagcctgcaagatcccccacacccagcactggtaaaagtggtgggggcaatgttggagggagttccactgaggaactgctctcccctctctgtcttggcgtttaccctggccccaatcactcttgttcctcagcatctctgtctccaacaggtgggtgcttttaaagtgtttctagggaagagtttgcttccccggggctcctccttcagggatggctgggcctgctcattgcagccttctcccgggacatccagcactgcctctgcccctgcttctctcctacaatctcccgggagggcagcggggcagggacgatgcatccgaggacttaggggacacagacctggttgtgagttctggctctgcctcctttggctgtgtgacccaaggcaaggggcttggcctctctgcgtcttggtttcttcacctgttaagagggagacgacgatggtcacctgtggctgctgcgcggagtgtgaagaactgaaggcacctggcccagggcggcgcgcaccaccaactctccgggatcggggggtcactagggccagcgtctcccgcgttcccctcccctggactccagtccctgccgaggggaagcactgcccgcccgcgccgggacacgccagagccgagggcaaccgagggctggggtcctgctggggctccacggcgaggcctggacagcggagatgcgggggggggtcccctcttctcggaaggatcgggcactgggggtcttgtagaaagggctgcacgccaaacggggtacgccccccgcccggcccgagcacttacccggcgccccacccgcccgcggtcaccgctgcgactgggagcctcagagcaggtccggcccagcccgtcccgccccgtaccgtaccaggccccgcccccgcccgggccgcccccgcccccgtccccgcccccacagcccgcagacccccaacggtcggcgggcttctaggcctcggcccgggtcttagtccccttgtccctgcctgtggtcagtccacccgttcgtccctacctccctcaccccggctgcctcccgccccgcagggtgggcctgtcctgggcctcccgcagttacaaaggtcccgcccgtgggagcgaatcgcggatcacaaaaatcctgccccgggccagcctaagggaagggtgggcgggggaaccacttccttcctccgccggctggagcggggcgaatccaccccgccaacccctttcggggagcttctgctccatcccaccgtctccgggccacccctgcctctgggtctcctgattccttggcctcgtcccctgcacagtttctgccatgcaggggtggagggtgggcagcacgctctgacgaatgagcaacctctcagccctcagaacttcccttggtcgagggctctgaggctgctcatgggatggtactggcaagagggagccttaccgcgtgcagcccctgcctgtcctgggccgccttgctccgggccaactcgtacggccccgcaggcgcaggcccagctctgaagtccctcccctgtgggccctcccagcaccctgttcacacagtcgaatcagttctgttagcttctgtcttcccccagagaccatttgtcccaaacatcctgcaaagccgtcttctgcacacctctcccttccggttgagtcggggctgtggggagaggctcacctccttggggttgtgttagtttcctcatgccgctgttaacagatcaccacaaacctagtggcttaacacaaatgtgttatcttacagccctggaggccagaagtctcagatgggtcctacagggccagaatcaaggtgtgggtggggctgtgccttctggaggcgccagggtagtgtgttccttgcttttcccggctggagaggtgcctgtgatccttggctgtctcaatccgacctctgcctccatggtcacagcgtcttctcccttctaaggagccctgtgattatatgggatccacctggataatccaggctaatctctccagctcaggatccttcacatagccacatgtgcaaagtcccctttgccacttaaggcaacatacaggtttggaggggttaggatgtggatatcttggtaggggggtgcattcttctgcctcccataggggtattgtctgcttcaactgactcggctttccccaattctgctgggcagctggctttcttttcttttttcttttttttggaacggagtctcactgtcgtccagcctggagtgcagtggtgcgatcttggcttactgcaacctccgcctcctgggttcaagcaattctcctgcctcaagcctcccgagtagctatgattacaggccagcatcaccatgcctgactaatttttgtatttttagtagagacggggttttaccatgtgggtcagactggtctcgaactcctgacctcaagtgatctgcctgccttggcctccgaaggtgctgggattacaggtgtgagccactccacccggcaacagtctcactctgtggcccaggctggggtgcaatggcatgatcttggctcagtgcaacctctgcctcctgagttcaagcaattctcctgcctcagcttcctgagtagctgggattacaggtgcctgccaccacgcctggctaatttttgtttttttagtagagacagggtttctccatgctggtcaggctggtctcgaacttctgacctcaagtgatccgcctgcctcggcctcccaaagtgctgggattacaggcgtgaaacaccatgcctggactgcagcaggctttcttttttctttttgaggtggagtcgcgctctgtcacccaggctggagtgcagtggcgcgacctcggctcactgcaagctccgcctcccagg

SEQ ID NO: 916312 - DNA, 4001 bp, Homo sapiens
gtgctccagcagcctgggtgacagagacagagagagagagagagagagaccctgtctcaaaataaaataaaaaaaagagagggtaaaagtgcttagtaaatttctatatctattgaaagaaagtatcaagatataaacagatatactaggaaatactactgattttcctgtcatcattcagatattctgcttatcagaaacttcatgtcattttaaaagttatttttatgaaaaagcaaatagaaaattacagtcagttctgagaagaacaccctgtaaactaaataagccttgaaatgacaaaaagcctctgataatgattcttgctatttattatacgtaggtgctgtagaaatctttgcatattgctatgggcttccaagaaaaactacctcgaaggaaaacaaagacaagatgacgatcattctaatgagaagaattataatatgacatgcacactctttacaaaggtaaacttaattctccttggtgttaaagagtgtgtaagttcagtcccataagactatatggagcaaaactaatttaggcacaaacaaatcctcactatgttatttatgacttatgcacatatttgaacttaataaccctttaaataaattacagttttaaaatctcagtttgaaaattttaactactctaagagttttacgtgacatagttgttagatgtccttaattaccatttaaatgacatgaaacctttcgtaataagacttcccaggaaatcctgacatacatgctacctactgaaagtaattttaaaaagtattaagtttatagcagcttagaagtaataagaagaataactttttataaatctgtttcactcacagaatagctagctagcaatatagaataaatcccccaacagcaaatggctttttaactacttcttttagatttcatttcttaaaaacattaatttgctcctgattatttctatacatttccatttccacaagatgtaaaagtttttaacatttccagagacatctgaggaaaacaaaaatctaagtaatatatacaaaaagaatccacttggtataaaaatatatgctttagttaagtttctctggtttgtttcagtatcaggttaatatagaagaaattactaccttttgatttttttcccgcttcatgttctggctttgcccctctaagttccaagagtatatttcttgacaaaactggaattatccattcctgtctgtcagaagttccatcaaagatatttatttgccactggtgttattctttaaagaacacagaattcaaggaacaatggaatagctgaaggtactgttcttaagtatgatatagtcagaaatctaaggctgtagttatttgacagtatttaattctaattttctcacactttacaaaagttacaaagaaacaggattttaaagttaccaacctttcaatgggtgtagctttcagatggttcaatgcaacagagagcacaatgagaaatacttgcagcttcaggatgcccattgcttctcaaattttctgcaaagaataatccagcactgaaatcaagagatttcttacagttctaattgatgtaattttaaattagagcttagtttttaaaagaaacatctttttaaaacgtaatttacaaggatcaaaatttttattgatacagtcccttaatattgtccacttttcaagtaatttcgagatttttactttcccaatttccttctctaagcaatctgaacatttatattgtaatacattctccctttagcctttctttgaaataaaccatgaatttaacaccaagtgtgcatttctctaaataaataaaactttcccagaaataggaaattctttaccttttaatgtttcaatgtcagcaatatcagcaaatgcttctgatagaaagaaagcttcaagaaaagagtccaagcttgtatccactggaatatttaccccctcatttgctaactagtaatccagctcttatatacccctcacacctttctcagctctgacatcaggcagctcagagagcctctgtcattaatttccatccctatagatagaaagtacctcacaggcagcagaagcggatgggtcattattacattaactcatcagtaaatattaacgtagcaaatacacagtgtccttgtgcagttaatggtgtgtcatacacagcagaagtttgaatttgccatctttgtaagacatgagtgaatttccaagaattaagtgtatgttatggtaaggaactgatagaaaagggtaaggataacaacaaatgtgcatatatgcaaacagagaaatcacagacttttggtatatctaaacccaagtgacctcaatggctgaatcccatgaagcttcaggaataaatggagatataagggaaaggtgtataaaaagggcataaaagagaaatcaaaagtcatttacaatgaggtgaggggagatttaaaagcataagagtaatggaagacctactctgtggtagggattattctaggtaccagagatatgacagggaacaaaacaaaattagaatgaacaaatgctacataaccaaatgaataaaaaaattcatttttcagcacttagatagagatccataggtatatgtagtcaagtagtttttggatgaccttttccattcattcttacacagaaattttacaattattttgaaagaacagatttgtttcccattagctccatgagaacattatgaatggcttagctcacacagtactttgtagtttgtcttttaaaatgatttgctttttaaaattttctccaaattgctttttctttttcttgtatttctttctctctttctttttttttctttttttttgagatgaagtttcactctttgttgcccaggctggagtacaagggtgcgatctcggctcactgtaacctgtgcctcccgggttcaagtgattctcctgcctcagcctacagagtagctgggattacaggcatgcatcaccatgtatggctaattttgtatttttagtggagacggggattctctatgttggtcaggctggtctcgaactcccaacctcaggtgatccgcccacttctgcctcccaaagtgctgggattacaggcgtcagccaccgcacccatcctctttttttgtatttctaaattatatttggtatcttagttattaatagaacaacttagtgtcatgtaaagcaaataaatttcaattgtcagtgaaaatgtgcatgcctgtgtaatcttaaaaaaattgaagttctctaactagaaacattagttcattgatttcatatacttcttaaaagctttgtaacattgtttgaaggtgtttggtagagatttcaggaggaaagaaacttgtttagaatccttgttctaattattcaatgattctacaattttaatatttctgtgaaatttactgatattccaaaagaaaaaaaatcaaaagaaatggaaggataatgcatttccgtaagaagataatgtacttaacaaggtgaatatgaggtaggaggcaggactagactccagaggcagggcttgaacaccagaccaaattgagaactagctaaaacagggccaatggaaagcagctttccataagacacgccccctagtgtgccatgtcagtttaccattgctataacaacacccaggagttactgcctctttccagggcaatgaccagatgacccaaaaattactaccacttcccttgaaatttccgcataaaccatcccttaatctgcatgtagttaaaagtgggtataaatatgactgcaaaaccgccgtaagctgctactctctgcatatgggttagccctgccctgcaggagcagtcacagagttataaatgccagagctgtaacaccgcctcttcaataaagctgttttcttctacctccaacttgcccctgaactctttcatgaacaaagccaagaacccttgagggctaagccccagtttgggtctca

SEQ ID NO: 916313 - DNA, 4001 bp, Homo sapiens
gaaaaaaaaaaaaagaaagcctgctgatctgtgatctggtaaactccagcagggtggagatccctgaaggtcgcccctagacccagcggtcatttcctagaacattcggccaatcctcacccagtgctgaatctccgccacactgggctgcataggtagttcccaggcccgcccacaaggggtcataatagctgagatgagaggggaggccgccaaaccaaagcctgtcagtcacccgctccctcctcaaggcttgggttggagtctgcaagacactacctctgctctcactcctgtcctatcggcttggttatcagccatctaaggaatccacttggtatacagccagcactcctggcatcacatccctttcccttgccccttggggccgggctcctctcagacagccaaatcttcatccacagaatgcaccgggcccgccccgcggcctcgcggtcctagggagggcccatatcccagcttctccctgctcagtcccctgctggctctccactctccctccccactggcgctttatactgccaagattcccctgtcagccctgctctccaccctcaccctagtgaattcccttcactctttcttttcccagtttgttgacctactcaagcaatggcttgaggtcccggagcttttcctatgaaaccacagcaggtacctggtttccatcaatattctttgggaaaccttggggtgtgaaagaatcactcgttgcaaggtacagcccctccctcaccagccccttccagtttcactcaatttagtctcccaaatttacgctatatccttgcctcctacttttgaagtttatatccctaacctgccccagggctgagaccggtagggcagagccccagtccctttcacaccgcacaaaacccgcagttaagcctggatggcagagacaagccggaaaagtaggaatccccccgtgttccgctcccagcgtccttcttcctgtcacgagcagggcttctgcattctctgcggattctagtctccctgcatccaattgcttccaagctcctcattacacagcacaaactttactctcattcttttcacccctgattcttcggaacccacaccaactcgcggcccgttgtgagtggtatgacacagagagacctgtccccctttcccaatccctacctccgcttgtactcgtcccgctcccgcttcactttggccagcacgttgtagagagcgcggatctcgggcgtgatggtgtcgatctggacgcccaccccatccgggtgcacccacgacaagccaggcccttgcaccagagtgggctccagtcccggcccgagccggcgggcgtgcgagaacgaccagatggtgccgggcatgaagcgggccgacgaggaataggtggtggaggtggaggtggaggacgacgagaggctggccgcggagggcgcgagggggccggccggggagcgcgcgggcgagcccagcacgcgcgccgaagggctgcagacagcggccggccgggcgcccagctgcagccccaggggccggatggggctgacgaagccggtctgcactgcctggtcgcgacgacccaggccccgccggccctgcttaccctcctccagcgcttgctgcagttgcttctccaacagccggttccggcgctccagctcatgcaccttggccaggaagcagcggaaccggaggttcagggtcttgagcacgttgatgttggagcccaggtcattgcggagggccatggcggcaggcggggccgggcccggcccgggcggcgagtaggcagcagggccggccggcgagagaggcgccgggggcaagtctcctcccccggcgaagtggtcgcctcccagtgagtcccccagtggcccggccaggccctgctgctcctgctgcaggaggaagaggttggggccgaataacggattcatggctgcgccttctgctgggagatgcagaccggtgcaggagcagggatggaaggcgagccagaagagccaatgcggcgccggcgggacagagccgaccaatcaggcggctcggcagcggggcagaggtcagggggcgggccgaggggaagccaatgacaggctccaattggaggccggaccctggacctttccgggtctgaggccgagccctgtgatgaggggagccaccgcctggactccagccggggtggcgtaaagcccaggacctccagtaccccatgggttctggtggcaagcccatctcccctacacgactttttttttttttgagaccgagtctcactgtcgcccgggctggagtgcagtggcgcgatcttggctcactgcaacctcagcctcccaggttcaagcgattctcctgcttcagtctcccgagtagctgggattacaggcacccgccaccacacccggctgattttttgtatttttagtagagacgaggtttcgccatgttagccaggctggtctcgaacacctgacctcaggtgatccacccgccttggcctcccagaaagtgctgggattacaggcatgagctagtgtgccccgccttcccctacacttctattgccctcctctccccggagttcaatcacccctagctctgactccagggctttcccttcctgggaaaacccaaggatgcaggagcctaaaactgaccttatttctcagtagcacccaaccattccctctcctcagaagatcccagtcccacctcccatctttacccttaaagcggcaaaggcagcacccagttccctcaaaaatactcagtggccagaggttttaaaatgtgtattaaatttcatgggtatgcacagtagagaaggcatcctcacagaggcaagagttccaacctggtgacaatggcagtgagccacccgtctagttttcaaccatctaagatagcagcagctggctgttgcccctggactgagatttcttcctctttgctggtggggggcggctggaacggatgggagacacagtgggaggctgaggccccttgggggtatcattctgtttctggaaggcagctttctcaaaaggctgctctggcaactgctgcttctcaacccccttggcccttccaaggggctgatgatggtccttaggtttcagggtggcctgagtcttggatggggataacacagccggtgtttgtgtgtctgtgcccttgggaggggcattctgcctgaggaaagcaactttcttggaggactgtaatttaggtgatcgttgctttagcttcccagtcacctttggctccctgatcccttcggcttttccagctggctgactgctatcctggaagctggaggaagcttgggtctttgtgacagaaggtacagtggacaattctgagtctgcccctttggagatgccattcagcttctggaaggaggccttcttgggatgttgctgtttctgcagctgctgctttgtctttgcagcccccttggctttcttggctggctggctgctgttctcagacttggggatgacctgaggcaagtctacatttgtaggtgtggctgtttcagaatttcctggggttaaaattaaacagatggtgtcagaaaatgggccttatcaccatattttaatattctcatattaaaatatgagaattgccatttcctgggcaggagctccacacaattaggtcagtgcctaagagcagattacctaaattcccattacttaatataacttggcctttactcaagtcctagttgaaccttgtattaaaagatcactgcctataggccaggcgtggtggctcacacctgtaattccagcactttgggaggccaaggcaagtggattgcttgaggccaggagttcaagaccagcctagcccacatggtgaaaccatctctactaaaaatacaaaaattagccagggatggtggtacacacctgtaatcctagctacttgggagtctgaggcacaagaatcgcttgaacctggaaggtggaggttgcaat

SEQ ID NO: 916314 - DNA, 4001 bp, Homo sapiens
ggctttgcaaagtcacccaaacacgaatggaaatagtaaggtagagtttcagccatgagttgagttcatagctttagcaactgttaaatagctaatgtctactttctggagaataaatgctttgcaagaccctcggcaatgaaaccaaagaaagaatttaaatagcctcaccgaataattagtcagcttttcgaagtcatctcgtttctttttgttgctattgaaaaacttgacattcatgtcttccttgatggtctccacactcttttggatgctctggtcatctttaaagtttttaaaaagtttgaagtaaaaggagacaatttggctctgcattatttttctgtcactctccttggaaggaaagagcacaaacagaggatgatgtgaatttatccatcagaaagcaagcaacaggaaaattagccaaatgggaatattcagcttacctctttccaattcttcaaaatgcctaagaaaagagttccattatccgctacatctgaatgacctgcattctaaaaaaaaaaaaagaaaaaattggtttacaattagcccataaattgccttaaaaatatatttcaagtttcattgaactcagatgtgacaatattcactgatttccttttcaactcttctgcttagttctaacaataagtattcccaaaaggcttatgtgagatatagacaaagactattatgttcttttagcttttttatttcccaatataaccattaaattgcaatgtcacaaatgagctcaacaaagctgatactccaaaggtcccaaaaactatagtaagctaaagaaagtattttcaagctaggctaaaaaatacaaaaacaaaaaacagcaaagccaccccactataaaatactgccccccaatggtacaggtttctattacatctactgtgccttcctgtagggtattattatacgagctttaaaagatagttccaaacatgtgcgagtgtgtgtgtgtgtgtgtgtgtgtgtgtgatttgattttgtgttgtaagaataaaatcaattgtgaatgtctgaatattattatgacagctataattataacagctaagttttaaacaaataatgaaatatttaaaatgtaaaaacttttcattaaccatcaataaaattttaaaagaaactcaaaaaattcacttaaaatttttaaacattccttagccagaatcataattcttccaaaatcccagtgagcaacgaagttccggaatacttcacaagtaatatagatagagaagcagaatgttgaaatcactttttggagaaaatcacctatcagttatttttttaagccaaagctttaaggacctttttgactttaatttgtaaacatttcctattacctttttaatgctaatcttgaccttagagtctgagaagtcaaaaactaataaccaatcatttttttcaatctgcatactccttgactatcacaactgaatgagttcccaccacaaaattattaacatcattatgcttcatacccatattatgcccatcttttggaaaattcataaatcccttttaagtctctatacaaactgagcagaaggttaaaacaatatctagattatttagtcaaggaactcatctagtcaataattaacaaaataacaccaaatctcaaaatgactgcctacaagagatgacagcctatcagagatgctacagcaagtcgatattcagtcattttcaaccacaaacaagtactattaaaaagtcatacttacaaaatatttcttaaggttttctgcttcttttacatatgggtcctggcagtaacagccaagagaacccaaaacgatgcagagctgaaaagccaagatataacttgtatatttcatcgtttccgagagaattaagccaaagaagttgaaatcagtagttcttgtatcaagctgatcaggtccaaaggacttaactgatctttctcttctaatagctgatcttcagatgatcagaacaatgtgctgcacctcctctggctgctggtatttatacctaattgaagtctcctgaggattacgtattttcacaagttttttaagatgagatggtgacagataggcagggatgatagtttgtattaataactaaggttttgtggcatttgggtgttgtagttagagtttcctttagactccttgggtcctttgacgatgagacagacccattatgcccacctgtgccattctggtgggattctttgaaggcacttttacttcacaccattcaaggactggaaatttttttgtacctccccacttcgccctggtaaaatgttgactcttcattcacaaagcacattgatcatttgcttgtggttgggaacaagtgaaaaacgaaattctagggcctctcaaacctttacaaaggggcagccttttaaaatttttcttgcaaatgaccagaaagcaaggaaagaatgcggttaaaagaacaatttggtgaggaagtccttcatcagagttggttagtaaaatatctaccacaagtttcaaattgctctagatcagcactgcccagtagaaatacaatacaagccacacaggtaaatttaaatgatctagtagcctcattaataaaagtttttttaaaaggtaaatataattttaaaatatattgtatttaaaccaatatatcccaaatagtacttcagtatgcatcaatatactacattgttaataaggtatttgacattctttttgtcatattaaatccttgaaatacagtgtagagaatattcccagggggagttccagacgcagtggctcacacctgtaatcccagcactttgggaggttgaggcgggtggatcacaaggtcaggagtttgagaccagcctagccaatatggtgaaaccccatctctactaaaaatacaaaaaaattagccaggcatggtggtgtatgcctgtaatctcagctactagggaggctgaggcaggagaatggcttgaacccagaaggtggaggttgcagtgagccgagatcgcgccactacactccagcctaggtgacagagtaagattccgtctcaaaaaaaaaaaaagaaaaaaagaaaaaaggaaagaaatacagtgtatattttaagcctacggtgcatctcaatttggtctagtcgtatttcaaacgcttaatgggcacatactgctaggtgctactatattgaacagcatagctctaaacaatttattgttccaaataatcagtactaacagagaatctttttaactttttatttctttgtctttcagatacaaaaaaaaataggattctttctcctcctttgtaatttatttatgaagtacaacactttgggatggcacaaaaagccctccactctttggttcaaacccactttgcatttctacctgtactgtgtacataacagtattgcagttatggggcaaacttgattcctgactcctctactatctagctatatgattgtgagttagcttcttaaatcttctatgactcagtctccttacctgtaaaactggcttgataatagtatcttcttccatgcttcagttgaaaattaaatcaggtaatcctcataaagtgctaggaatttttcctggcatatagtaatcactaataaaagtttattattattttggcacattggatgactagtcatttctttttttttttttttttttttgagacggagtcttgctctgtcacccaggctggagtgcagtggcgcaatctcggctcactgcaagctctgcctcccggattcacgccattctcccgcctcagcctcccgagtagctgggactacaggcactcgccacgcccggctaatttttttttttttttttttttttgtgctatttttagtacagacggggtttcactgtgttaatcaggatggtctcgatctcctgacctcgtgatccgcccgccttggcctcccaaagtgctgggattacaggcgtgagccaccgcacccggcctagt

SEQ ID NO: 916315 - DNA, 4001 bp, Homo sapiens
atctgtgcttctctcctagcactacttttgatcttgtgctttttttttttttttttttgagacggagtctcgctctgtcgcccaggctggagtgcagtggcgcgatcttggctcactgcaagctccgcctcccaggttcaagccattctcctccctcagcctcccaagtagctgggactacaggcgcctgccagcacgcctggctaattttttgtatttttagtagagacggggtttcaccgtgttagccaggatggtctggatctcctgacctcgtgatccgcccaccttggcctcccaaagtgctggaattacaggcgtgagccaccgcgcctggccgatcttgtgctagttctttaggtacgcatcttctcttccctgctaaactgtaaattccgtatctgtgtccaattccatttttgaacatccattgtgtctaaaacagtgattccttccactagattgaatgaacttgttcacaggcacaagtacaacataagcctaaatctaaaggaaatcaggctggcagtgagaaagatcataactttttaaaaaactgaatatctgatttattaactgctgaaacagctttacctaggtaaatgctttaaggattaaaaatgaattaagcaatgagttgctgccgggagctgtcgttctctcctgtaatcccagtactttgggaggccgaggcaggcagatcacttgaggtcaggagttcgaggccagcctggccaacatggtgaaacccggtctctactaaaaatacaaaaattagccaggtgtggtggcgggcgccggtagtcccagctacttgggaggctgaggcaggagaattgcttgaacccgggaggcggaggttgcagtgagccgagatcgcgccactgcactccagcctgggggacagagagagactccgtctcaacagaaaaaataaaataaaaaagataatttctccacaatgatgaaaaattacgcacaaataattattattgctaagaaataagtcaaaagaggataggaaggataaccaccatggcttataataaatctgaggtttcctttaagctataaaaggaaaacctttacgtaagtttttttttaaaatccatattggaagtgcaagttttccattgtttaaagtattttaagtaaaagtccacgtcataacctttgcgtgcagaaatatgtatttcattttaaatgatttagaaattatctataggtctactcttttttcccttaaaaaaaaatctggataaactagtacaacgtttccaggaaggcaaaataaaccagttgggttccccccaagtcgcccaccagcctgcaaaaatggtcactcgataaggacaaagatgtactgaacaggaaggctgtctgtgcccagcgggctctgcgctctaaaattagcaaaagcaattactgtccctcttctagcgcgaagtcgccgcgctaattcccaagcactcacccacaaacgagtcgcaggaggcggggaacaatgaaaaccaggacgtgcgtgttctctggcacaatttgggagagaaaccgtgctgcctgggtcccaggctggcacgagcatcgacccgcagcctcctgggagtaccagaaatagtgtccccctccccgggctcgggacaggggacaggggaccccacacccgaccgggcctctagcgggggctgccctgggcccctcgacagttcatccctccagggagcggcctggatccgctcgaatcccagaaggggcccgattcccctatccgggggcttaaccgcgacgaccccttccacttgcgaggtgctgcatcaggaccgagagaggacgggagctctctcctatttcggggttcagaggagcttccgaccgcgagttggcgaggttacctcaaattctcctcacgaaaccgtttccccaccccccaggaggcgcccgggctctagaccgctcccagagtcgagctccttggcaacggttgctaggccgtagagttacgtcacttccgggcgagcggccgctctcccgcgcgcgcgcgcacgagctggggggcggggccgggccagggcggggaggacgggcgcggggcggagcggacggggcggggcggggcggagcggacgggacggggcgggacggggcggggcggacggggcggacgggagccgggcttacttgcaaagcgggcccacgtgctgagccactgcagacagccgagggcatttgggactgttactccgacctagacgcgctacaataagcttcccgaaagtcctgcacttcgcagtttacaaaatactctctgcatgattaacctatgttaaatgcgtgtgatgtttcattcattcattcattcatgcatgcatgcatgcattcatgcgccaaacgtgggtgatgatttttgtttgtttttgaggcagggctgggtggtaggggggttgggatgagcaagcatttggccagtgcttcaaatttaggtttttgacataagtatctccaaattaggttatgcataggaacaattgtagtgaggctctggcaggattaaaagaagacacattcatcatagagatttcagcttctgtgtcacattactgggccacattgcctgtactgggaattaaatttttttaaacccaatacgttttgagtatgctgagagcctgaaagggggtgtgggagaactaagtgtcctaatgttcctttggcttctgagtgggctctctttaggtgactgcagaaataaattaaatcctccttgtggtcttcatggagttcacatcccacgcaggacgcagggagatctttgtgcccagtcactgatgaggtttaaaagtctactggaatttgcactagctggtttgtgggagaccttagttggcaaatggtattttgaaccaacctctattagactagagaccacgatacttagtgatatcagctggcaatgaaagaaagagaaggaaaaaaaatcaaattattgataccttgaaaacttagttgcctgctcaaacagcataggagaaaccaactatagctttagcatcagacttaccacaacaaaaaataacagattacgtattaggcatttcctatatgccctgtactgtacaggctgctggaaatgcagaagggcaggacttacctggcccctgccctgatggagctgacagtctagtgccggcagagattattaaaggggcaacaccaatacaattgagataaatgctgtaacaagagaagccaatgattaggagcccagattaagggcctcaagtttatttggggagggtggtgccaaaggggccataccatcaggaaagtttctgtcaaatggagtgatgtttaaggatcagtaaaaattaggcctggcaccgtggctcacgcctgtaatctcagcactttgagagaccaaggcaacaagataactttgagcccaggagttcaggatcagcctgggtaacagagcaagaccctttctctacaaaaaattaaaagcaaaaattggtcaggggtggcaccattgcactccaggctgggcaacagaaggagacccccatctcttaaaaaggatcagtaaaaattagccaaacaggaaaagggagagtgttttgggcagaggcaacacaacattccaagaccagtccctttgttggctgccctctgactgttgaaatatcaagcgtaggtaccctgcagggctcctggagagaaactaaaactggccccaccccacaaccaattaggggaagcaacactcaaaacctcaaagaattaaataacttacataatactgacagaaacaatacaagatttgtagaagggattatataattcattgatcctgttgggtgtgttaggagacatccctggctacctgggtttgaattctgcatctgccattgtgtaccctctctttatcttgctaaactttcctcatctgtaaaacgtggctataataaaaccttcctcaatagggttgacatgaggattaaggg

SEQ ID NO: 916316 - DNA, 4001 bp, Homo sapiens
gtggggtttgtgaaagcatctagttacatttggacacccaggcaggtatgctattatgagcctgggtaaactgccttttgtccattgaaacaatgaacaaattgcacagctgggatttaagtcaatcttttccccccagtcaagccacctatttccattgtatgcctattgtagcagcccagatagtgacccaagctccagtccactcccttactcccttcccccgactcactcacttggaaataccttgagagtcagagtacaatcagctggtgagctctgcctctgggcaggacacctttacccactgaattacatgtgaaagaccacgcagctccctcaaaccacttcctgcttcaagtacagaaaaaagtaacaacttattaagagctccacttctgaagtgttcagcatacacagcatgaaaagtgcatttggaaacaattttcttaacttgtaattaatgcagagataacgctccacagcctcttttatgatcccctaagtaaggagacaaaaactccagctgctagatcacatagtatgtatgcacagtgacgtcatttctttgaaagcaaggtggcctgcatgtgttggcatctcaggaacagcagaatcaggtgcctgacaagggtgtatctttaactcctggagccacttacttgactagggaaagtcgtagtggtgaagtgtttgaaagcagcaactgaatgctgcactaagtggcagagacgtcttatgaattgagccctcaggcaattgaatcggtggagccagtgacagcagcttaaaagcgcttgcaaattgaaaaaaaaacacaagtcttgaaggatataattttgctgagaatggaaactagaactacggccagcaatcggaaacgagaagtcggtgcactgacagcagcagccagatttacctaaagggacttcacgacactgaatataaaatcagagttttataacacagaaccccaagtccaaactttgcccatgaaagtcctcttctaaacagaaaagttgggcaagcagctcttagaaagtttctgctttccatatacagtatgtatttgtttaaattatacaaatatgcaaggtcagcaagagttgtcaaggagttcttttttggaagaacaaattacactttactctaactttaacactctctctgggcataagtgcagagttccgggaccttagctccaaagatcatatttaaaagctttaatatcatctaaaatacaacccttcatatatagcatgccttgtaaataaagtcctgatgagttacacacacagagacacatacacacagagacacatacacacatgcaaaagaacatggtcttaaaaataaaacatctgcacctgcaaaagaaaaaaaaaatccccaagttcatatccatgctctatagcccttagccatagagaggatttaaaggaatcttctgtaatgacaccacggaagccctgcagaagtggaggatttagcataagtaccttgcaatagtttctactcatacagatatctgtgcaaatgcatccatctccccgagctatttttcagattccacagaattgcatattcagcaatttataaataactctcggttccgaaacaatgaaaattttaaagtgaagaacagttctaggcagaagcaaacagtacacaatttaaatagaattccccaatgacttcaaagagtaagaaatatttaccttcaagaaatcacaaaagcagcacttaaataattgggttggaagactgctgatttttcccattgcttctgaagtacaaagtctgaaaatgaattggttagcaggaataatgaagcaaaaagaaatccagagagatgggagatgttgagagcaatgtcacatttcaattttgaggactttattccattgcgcaggctctatctgctctgaatttagcagtgacagtgagatttagcaaacagaagagggatttagagaaaatcctcacatttatctacaaaacacagacactgtagacaggaaacagctgggggaacatttgccttctctctctctccctcttctggcaaagttattgagtaaggacttttttgggcatggtgacaaataacatcatacctttgcattttaaaactagagcacagaagcatttttttcccttaaaagaatgtgtgttagtgacagggttcgcagacattaaaatacttatgctgccatagaaaataaggatctgttttctgattaactttctgctgggcatgaagacacaaacgtctgctaatacaccttaccagtattaaaggaatatgggggatgggagagcaattttagattctagagcaaatgcattatttaaaacaaaaaaagaaagaaaggacgataagaccctctccagcaaactctacaattttaaccctgaagtgactggggtaaagtagattggaagacagcactcgggtgaccccttgtcccagttgccaagtgagaggtgtgatctcatttcctagaacctatggaggggcaggcagcattggattggtccctttagggcactgtctcatactttttctcctgcgatgaggcaaagactatgccgagctgtaaaacccaactgaaatagaacatttttctttattcttctactaggctgcctgtcactgtcccctccccaccccaccactctgggagaagggtacctggggggcaaacaattttcctgttgtttgaattttccatataactcaaacctgtgtgtgtgtgtgtgtgtgtgtgtgtgtgtgtgtgtgtgtatgacagagggagtctgtgtgccagagtgtgttttctttctctgatttttgtgtattctaaataacaccagctggctagcaataccctctcgagggttatgatgtcattcaaatccctcaactgggtgactggccggcaacatggtccaagccagctgttttgctatttataatgtacacttgcctttgccattgagaattcagttctgatcttttgtcgatacagtttgtacctatttccctttggttttgtgaagcagtagataagaaagtgaattataaaataaggttgcaaaagcccagagcagacatacctctttccctagagagctctccaggcctggtttcccaggagtggtggaaataacctggaccttgaattttttctttttttttttttccacatgactctcaggggactgacacatcaactgaaaacacagttctgcttgaaatcctactctggctctttgtgttatcctggggccagaaatttgtttgtagaagtgggtgccctaacaaaaaacaaacaaacctgctttgtttggaagggggttgggtttgtttgagtcttctgtgtggttaatacattgtagcaatgtttacctttcagaaatcaaagttagaaatctggaattatgttgtgtcaatggtgcactatgttcagcaacattttgtgagctctactatgtgcccaactacaacatccctaggaaaacaaagaggaataagatatggtcaagtcccttcaggggctttcagctgaatgtcagagacaaagaggaaaacttcacagtcatatgatgggcatgtgctcttttaaaaacatgaacagtgcacaatgagagggagtgacacattctctgggaagacaggggagtaaaatcttttggaaaatccaaaatgagggaggcagattgtgtcatgagaggctttggggtaccatgttgggaaatttcagtgggtgggatttgacccaaagagcacactaagaggtatcatcaagaggtggcctagtaggtggccctggattattcttaatgcagggattatccacatgtgcagatgtgtgagtaatccctgcatttaataataatccgtggcttcctttaataagctctctttgtacacttgatttgtgacaaatctttttcttttctgcagtttttgtggatcacaccctttctgaaaaatgtctattctcttacagact

SEQ ID NO: 916317 - DNA, 4001 bp, Homo sapiens
gcaaaaatcttttattttatttttagtcacaggaattatggcttcatctcttggagggacttatgtgtcactgtatctattttatagcaaaatataccaagggacccctggttggcatgacttagtcaatgatagactgccaaacggcagccttgccaaaagcagcagtcctgtggctcaagtcttcatcctcactctaagtagtagaaaccatgctaagatgatcattaagtttttccatattgttacttgtggcacaaagatgtggctttttccaagaagcctctcaaggtgagtggcttcacttctctcagatgcatctactttcagcatcatgggaagagtccctgacagggtgttaggtgaggggcgctattaaaagggttgtggagtcatgctggaagctataattataagaagagcattttttttgaacctcagagtagtggcaggtccattcaaccccatcacttttggagaaacagtcatttattttctgactaccctccttgccctccatggactctcaatttagtggctctatatcagtggcaaaattttccccatcattctaatgatgatttccattttttgtagtcagaccttcacctcagcaactgaggaaaaaaaaaaaaaaccaaaacccctgtctctcgttaacaaaatataaatattcagttaatggttgtaaagcagttgaagatgaaaagcgccctctatttgcaaatgatcataaataatggacataaaatagaagaggaggtaaaagctcaactgaacatttactgcatttttctcaacaagatctccgcatggaaatcttccaccccctacatagcccaaaacactgggactggaagaagcatgttatcatccagttctcatttttttttttttttggttgtaaaattagtggggttttcctgttcaatatttccattggaaacctcaacaaatccaacccacctggacctcgtggcatttttcaaaagaacaaacctgtgattgatcttgcagagcatacccccacactgcgggaatgggccagttctagaaagtatgttattctaccgaatcctatttctccacccctcccttctttgttgcgttcatagcaatgctgaaggctaagcacctgcaactgtagatgccttcaagttcttcagtttttgtgaaatccagggaaaaaaattactcaagttatagccttagtgaatttcaaacttcattagatgtcaaaactatatttttaatagttctagtataacacatttaagtgcagcgatacatataagtctctggaacttaagaatttaagattttttttaaatagatttctctttttctttttttttttttttgctgagttatattgtcagataaatctcagtacttacagttctaggacaagacagaacctctagtgcattttcctttagtgtagggaacagtccagtacacccacagagaaccagagaattttatgttcccacaaatgaaaacaataccgaacttgcttaggagtttaaagtgtgaaacaagtggtcccatatgttcattatttccttggccttttattttgccaaacacaaaagaaatcaatagagagaaaggaaagatatgatagaaaaaaaagggaagaatcagaaagacatgagaaaaaaagaaaaaaaaatcagaaaacactttctcaaaaatcattcacaaacccaaattttaaaagttcttttttttttaatcttagataaatggaatattaattgattccagatgtctgggccacaatgaaaatgccctgtaaaatttgagggcaacagtcataagaaaatactcactgtaggtgtaatcatttttgtttgttccaggtcttttacagcaggtcagggtgggtattatgaggccgatgtgaatagaaaactgaagtcttaaaaacatgtgctgctttgtgggtggggtttgtgaaagcatctagttacatttggacacccaggcaggtatgctattatgagcctgggtaaactgccttttgtccattgaaacaatgaacaaattgcacagctgggatttaagtcaatcttttccccccagtcaagccacctatttccattgtatgcctattgtagcagcccagatagtgacccaagctccagtccactcccttactcccttcccccgactcactcacttggaaataccttgagagtcagagtacaatcagctggtgagctctgcctctgggcaggacacctttacccactgaattacatgtgaaagaccacgcagctccctcaaaccacttcctgcttcaagtacagaaaaaagtaacaacttattaagagctccacttctgaagtgttcagcatacacagcatgaaaagtgcatttggaaacaattttcttaacttgtaattaatgcagagataacgctccacagcctcttttatgatcccctaagtaaggagacaaaaactccagctgctagatcacatagtatgtatgcacagtgacgtcatttctttgaaagcaaggtggcctgcatgtgttggcatctcaggaacagcagaatcaggtgcctgacaagggtgtatctttaactcctggagccacttacttgactagggaaagtcgtagtggtgaagtgtttgaaagcagcaactgaatgctgcactaagtggcagagacgtcttatgaattgagccctcaggcaattgaatcggtggagccagtgacagcagcttaaaagcgcttgcaaattgaaaaaaaaacacaagtcttgaaggatataattttgctgagaatggaaactagaactacggccagcaatcggaaacgagaagtcggtgcactgacagcagcagccagatttacctaaagggacttcacgacactgaatataaaatcagagttttataacacagaaccccaagtccaaactttgcccatgaaagtcctcttctaaacagaaaagttgggcaagcagctcttagaaagtttctgctttccatatacagtatgtatttgtttaaattatacaaatatgcaaggtcagcaagagttgtcaaggagttcttttttggaagaacaaattacactttactctaactttaacactctctctgggcataagtgcagagttccgggaccttagctccaaagatcatatttaaaagctttaatatcatctaaaatacaacccttcatatatagcatgccttgtaaataaagtcctgatgagttacacacacagagacacatacacacagagacacatacacacatgcaaaagaacatggtcttaaaaataaaacatctgcacctgcaaaagaaaaaaaaaatccccaagttcatatccatgctctatagcccttagccatagagaggatttaaaggaatcttctgtaatgacaccacggaagccctgcagaagtggaggatttagcataagtaccttgcaatagtttctactcatacagatatctgtgcaaatgcatccatctccccgagctatttttcagattccacagaattgcatattcagcaatttataaataactctcggttccgaaacaatgaaaattttaaagtgaagaacagttctaggcagaagcaaacagtacacaatttaaatagaattccccaatgacttcaaagagtaagaaatatttaccttcaagaaatcacaaaagcagcacttaaataattgggttggaagactgctgatttttcccattgcttctgaagtacaaagtctgaaaatgaattggttagcaggaataatgaagcaaaaagaaatccagagagatgggagatgttgagagcaatgtcacatttcaattttgaggactttattccattgcgcaggctctatctgctctgaatttagcagtgacagtgagatttagcaaacagaagagggatttagagaaaatcctcacatttatctacaaaacacagacactgtagacaggaaacagctgggggaacatttgccttctctctct

SEQ ID NO: 916318 - DNA, 4001 bp, Homo sapiens
gaaaagacctggctgttccaccagaggccagaagggggcgcacgaagccggagagctggggcagaagagcaacggatgtaggaggggggccaacagggacccaaaaggaatgtgtgtccctgctgtgaccttgctatgactcaacccacccctcccaggcctgagatgtggttacttctggggcactgcagtgggaacctctcccttctggtaccctgtgacccaggccagctcaaccccagtggtcccaggagcacatggattcaacccttaaccaagataggctgagggcagattaagaaggtgcaaggaatgaggggcttccaacctgcaggttgctcctggctctggagaaagtttccggagggtccggggagagctcaggactgggaaggggtgaggaaataagtcagggacaggaaaaggcagaaaggggagcatgtactgactgcttggaatttgcctaacatctaatcagatatcagaacccctgaagggatcctcttcctctgtgcctaaagacaagctcccagctaactaccactcacaacccaggagacatttcccctgcaatcctgagtctgatccttcttcctcaggatgcccacccctccccagaccttctccttcattccctacatttagcacccaaccatttagttccaaactgcctcctctcatccacccagaccaccttttaggaggacgcccagaagcctgcactcgggcatttggaactgaaagaaactccaagtgaattctccatcccctcccgtggaaggaacccagagcctctgggatgcgcagtttgcatttcctgccctccccatctccccgctgccccccatgttttcacggctgattcacttctgtcccacccacccagtgactcagcttctgctctcctccctggagcagggtggggtaggatgggtgaacgattctgagcaggtttaaatcataaccctgatttggcagattccctctttcccctactctttctcccctctcccctaacctacgccctagcctgccctcagtccctactcaagtctaatacaaccctggatttggggcctcttcggttctagacgcctcctgtttaggtgcttcgaacaccggtattaggaggaaaggagtcatttctcagtgtgtgcagaatttcagagtctggggttcccctccccttttctccaagtggaagctgagaacaacatttgggtcctttccccagcttggccgtctagggttgtaggagctgggcctgctggagcccatgggatggccctaaaaccctcccatttctccccctgcctcccccaagttcccacctgcacgcacactccatcaagggaaaataaatggagcaaaaaagaaggccgagagcgcagacaccttctgctgtatcaccaggtcccctggctgcacctcagcttcctgcacttgccccttctcccccacacaaatgtgccccccaaagtcggaagcgtcaagggccagggcggaaaggcttgccgggccacccactcccgtctccccaggaccctgcctggaggacgcgggtctcacgtgggcggggcaggggcggggcgcggactcaccagcaggcgcgcgggccggaaggcagcggcctcggccgagcagcagcgcccgcaaaggcgcctcgtcgtccttgggcggatggcactgcagtcctggggcgcagttaggggtgtagaccccgcactcctgcccctccctcctgagacagccctcagcttccgcgcagccctcggctggcgaccccccatcctcctcctccacgcagccccctggacaacccgcctgcaccccttgcccgcagcctgggcaccgcgccaaggcgcctcctgggctggcagcgagcagcagagctagcagcagcagcagcggtggcagcagcctgtggggggtcatggtcagggtttgtgccccgtcctctccttccagagcagtcgcagcgcagctgctgcccgccgccgcccctctgtcttaagtagccgccggccaggggccgggccctttaagagccaggtgaaggggggtgggggagagggcaggggcattccctaaactgggtgggactggagagggcccccccaacctgggtcctccccactcttctttccctctccctttccagtttctgtttacttcccaaattgctctgatttttcttgctttgttcccgggaatctcggcccggaatttgggagctgtacagctggctggagggactggagggtggggaggagcggaagaaggggaggacgggagtgcaatccacttagtgtgtatgtgtaggacgacgaggggcatgcagggacccggtggggagtgagaagacgggggctgaaagggaactgagaagagatggtgtgtgtggatcacaagaggagtgggcaaatgtggagggacagagaaaagatggagagggtggataacggggtcttgggaaattctactgctgatgggagaagtagaacagggcagaggagaggaagggcaaaattgggaaaggagtaagagaaagcacccttgaggtaagactatggagaaaaggggcccgaggggaaccagactggggtaagccaatgggggaagggccgggaggcagggagggatacaacttgaatgaaccgtaggagaccctagcattgtggtgggcgcatgcggagtctggaaggattggagagggctgtgtgcagggtgagaactggctgggaggcagggaaagggggaaattggcaggttgaaactagagagggagagaattaaaggaactcgtattcgggatgctcttggggacagtggccagagagcagaccccacccccctccccatccccgtccttcaggtaagctcgctcctccattcctctcctctcccagaatccgtttccttccctcccagtcatccatggggttttctagattcatcagactgtcttgtgcccaggggactttggggagggactactcagcatctttgcctacctacttgtccgccttcgctccaagggtcgggttccaccgctccccacccgccttccccaggcagtgtcccgcccatcccaggcactcctagccaggcctcacaagagagaggaagagggattgtttccttcggcaacccacacccacccaactctgggttatgcaacagggaccatctcattctttcctaaaacaagggctctgggcagtgactaagtttaaatgctgggccccaagcaacaatgtcagcaaggccttcttgaacttttaggtaaatagaaataatacgaacctcattgtcagcacagcccgcttcgccatgcaaccctgggaccctaggacatgtgtttggagaatggtgttttcctgtttccctgagatactgatgcagactggagaggcagggaggagagggttgtggggcagctgatgggagaagctactgctgatgggagaagtagaccagggcagaggagaggaagggcaaaattgggaaaggggtgagagaaagcaccccttccaccaaggctcttcaaccccctgccacaagctctgaccaagctccctggaaccaaggctgtcagagatgggttccagagtactggggtcctgctgcacaccctttatcactatttattttgtcctacacatggttctggctagggtcttagggtctttctcctggacttcgggttggtgctcctgaataagatggaaagcctgtgggaagttgggaaggggaaagagatggctgtgctcttgcaggatcccagtgtggctcttttttaaatttaaattttattttattttattttaagttctgggatacatgtgcagaatgtgcaggtttgttacataggtaaacatgtgccatgtggtttgctgcccgtcaacccaacacctaggtattaagtcccgcatacattagctatttgacctgatgctctccctcccctagcccctaccccgccacaggccccagtgtgt

SEQ ID NO: 916319 - DNA, 4001 bp, Homo sapiens
gagtgattctcctgcctcagcctcctgaatagctgggattgcaggtttgtgccaccaagcctggctaatttttgtattttttgtagagacagggtttcaccatgttggccagcctggtcttgaactcctgacctcatgatctgcccacctcggcctcccaaagtgctgggattacaggtgtgagccaccgcgcccagccgtaacaaatcttttaactctgaaaaatacactatttgggatgagtcaccagtaaagtataattccatatgtagtagcataaaaaatgtctagatgtccagggtctcttctaaaattctatcactctggaagattaacaacagtcttactaaataactttacacatgaatgaaaaatggagaaaaattctattaagatgccaatcttattaaaatgaaatgggctattccctcctcccgccagaaaaaaaaaggctgggaaaataaaattcacaagttggtttttttcttttttctttttttacgagttggttttaaggttatttctaatattcatttttcctaatgacaccaatatatcgccatttacctgattttaaaactgcaactggttagttttaagtgaacacaagtgctatgtttttgtagctttaccatattcaatctgtaacttacttaataaaagaccttaaattcataatgcatgcacggtgatcaaaatatgagcactcctccaagctctgctactataacgtttgctcctttgggagcataatgatatggttttcttttttttttttttttgagacggagtctcgctcggtcgcccaggctggagtgcagtgatgcgatcttggctcatagcaacctccgcctcccgggttcaagcgattctcctgcctcagcctccggaggaactgggactacaggcgcccgccaccacgcccggctgattattcgtatttttggtagagatggggtttcaccatgttggccaggctagtctcgaactcctgacctcaagtgatccacctgcctcggtctccaaacataatgatctgttttaaggttgcaagtatttccattaggtatttatggggtgagtagggtggggcagatgtgtcccggaatggggcacagcggacaggaagtaacggtttataacaacgtgaacgcttctgacgtgtagcgggagcttcagaaagcgtggccgaatctgcagctcttaacaaatggctcgttcccaaaccttagcctcaactccttctgagcgataggggcatgctaccagcacggggggaaatgagatacaagaaacgcccgaaagggaaaaacaaggctgggctgtttccttcctttggggtcaagacagaggcacagaaggcccaggtctgggaggttggatcacctccggctggatgttgagccgggtgggagcccaaacagcagggggcccacaggaggccggcccaggcagcctcgcgtccacttaccaggccaggcccaggcacgtccccagcgacagcaggctcaggcacgttcgggggtctgcccagcccccgcctccgctgctccgggccacgggggtcttcccgccctcgctccgcttcccgggctccgcagcaggggctcccttgggccccgacttcttccggctcttcacctcagacatgtctggagaccctaggacgacaagcccagggcagcttcttcaccagggggagcaggacgtggccgccttggcgttcgtgggaaccctgggcggtgaccgcgccccctcacagacttggcaccgcccagagcccagccccttccctctccccggcatcctcgttgcttcactgagtctttcagctgccagctccatagttcccctaggagaggtgggcggcgacctcaacccacagcgccttccactgcgatattgctccaaatccgaggaaattcaaactcccgggcgcgcgcaggccgacgggacccgaggaggaggggcaggacgaaggggtcgcgcgcgccacgtcgggcgcgccgccgctgcccgagtccggcattggtgggaacgcggcgcgtccctgaggcttagccacgccccgtccgcggggtaggcgggcacttctacgcgcgcgggcatgagccgtggcaggagtgcgcggcggcagcggtggccgccccttggggcttggggtgtgtttatttgcataagcgggcgcgcgccgtccgggctgggtggatccggcgggatttgactgctccgctgtccagaggcggagaagaagaggtagcgagtggacgtgactgctctatcccgggcaaaagggatagaaccagaggtggggagtctgggcagtcggcgacccgcgaagacttgaggtgccgcagcggcatccggagtagcgccgggctccctccggggtgcagccgccgtcgggggaagggcgccacaggccgggaagacctcctccctttgtgtccagtagtggggtccaccggagggcggcccgtgggccgggcctcaccgcggcgctccgggactgtggggtcaggctgcgttgggtggacgcccacctcgccaaccttcggaggtccctgggggtcttcgtgcgccccggggctgcagagatccaggggaggcgcctgtgaggcccggacctgccccggggcgaagggtatgtggcgagacagagccctgcacccctaattcccggtggaaaactcctgttgccgtttccctccaccggcctggagtctcccagtcttgtcccggcagtgccgccctccccactaagacctaggcgcaaaggcttgggtaagttgacctcctcgcttttctccccgagccaggttctttggaggcttggtagctgatttcagggactgagaatttgaggacatggaatatttgataaccatcctgctcctgtaccaggaagagaaattctgtaatgaggaagtagtaaacttggggttttcgtggataaacgtgcgctgttttctgttttacgtccatgaagagttttggctttccattttgttgtgggttacaaaaggttttgagacttagttcagataagttgtgcagttttaaaacgtatttaagatttgcatattttagtttaacaggactaggtgaaattggaaattagtttcagaaaaccagagtgtcttatttgcttagctattggacatcacctaaaaaattcattcattcttgttttttcacatcgaatttcattactataaattaaggaacattttatgtttaagaggacaaaaacgttattaacattttaaaaaatgagagttttgattcgaatcaataactttttatcagttttgtgcccctgctgggcattttgtaagccttgacaagcataggcaaatgccctacgtccgtccctgtttttccaagtgctacatttggtgacttcaaaaacagtcattgaagcttgataattattgcccccttctgtgagctccaagttacttgtgctctgtttttgcacttcgggcattcacattcccactctctctctctttttcttctttgagtagactgtgaattatttcaggcaaatgactcaatcttttctgtagtcttggtgtctgacatatagggaggggcacaaatgtgtattgaatgaatgaattgataaacccgtttagactctttcactctatacattgtgtaaagttctgttaatgttttgaaaacttgcagatattgtgaactgggttttatgcccatggaaaaatttgcattatatttgaaataaagttgctagaaacgtcaagtattttactataaaggctgttattctttcctcatgtcctcctggtctgagaaatcacatcagaaagtgtttcctgttgctttgtgggaaatgtgtttagcaaggaggacctagagctgacatcctccttgaacgagaactaatactcaatagtaacaatgctctattcactcttatgtttgataaggaaaacaagaagtctcttaatattaggacttcaatgtaatcacta

SEQ ID NO: 916320 - DNA, 4001 bp, Homo sapiens
atggcgtgaacctgggaggcggagcttgcagtgagccgagatcgcgccactgcactccagcctgggcgacagagcgagactccgtctcaaaaaaaaaaaaaaaaaaaagaaacactgagggaaaagcatcctttgtggctttcccaattaaggcccagaaacaggaagagaagcaggagtcacaccagtaattcaagaggctctttgatgctgttgccctccctaagattaaggtaaggggaaaaacaggatcaagtctactttcatggggctaaaatatatgtataatgaatctgtttcaggagtcagaaaggctttcttgggcaccaaggattttgaattctagctcaggggtgaggggactagagtaagatttaggaagtttaacagttcctctctcagccccagaaaccccagtgagggaatctcaaaagtctgggactcccaagaaatcccagactgtcaaagccaagaattaaggctgctcttaggtctctgagaaattttcttgctcaaagtcatcatagattggctgaacccccagagggcaaagccaaatcatgaggttcacattagaggaactgggaggtaggtaaaggctgaaaagcaggagggagagaaaggaactgggaaacaggccacaagctaaaggtgtttcatatgttaaaggaggctagcctccactcctgctgcctttccttgagacctttaaatagtggctacatctagggaatagccatgagcttggagaacatggagaacctccacacttctctgcaaggcacctcatcataactgctttccctttcttgaccacgggctccagggtggcaggatcctagcctgctagcagggaatagtgggtacaagagcaaagaaagacgcccatcctcagctcttttgtggggaggaagctgaggcccctcagatctctgttccaggctgaggcatctgcttgccaaggctcctcttccttaccttgattttctccactaccccttcccacccaggcctgtctcggcatttcaccccaggcagctctacctctatccccaaggcctaatcaagatgtcaccataggctcccactgtccaagtcgccgtctttgcttagcaacaccaaacaccctttcccatcctccgcaagtataaggaggaacgccccctcccccgctacacacacacacacacacacacacacacacacacacacacacagcccccatcctctccatctcctcaggcttgggagtagttactgaattggctccctagccccagcaccccccttcctccctccactagccgccttctgcctgaacttacattatccttcccttgccggtgagaccctggggtgcgaacgcggccgccgccttggaaacggcgagggagtgcgggtggtgtatgcatgtctgcgtctcagtggcaggcaggggtgagcccagccactcaccttccaggaagcgtggattcctggaagtgaggggaaccgccgtcatttcgcaggcagcagcagcggcacggtgagcagaggcccacggctgcagccagcaagagcagctcagcccagggtgtatgtgtgttgagtgtgtgtgtgtgtgtgtgtgtgagagagagagagagagagagggagagaaggagaggggagagcacgcttggatgtgcttggggagggggctggagagaatgtatatgtgtatatagtgggggagatgctaggctacagcatcccttttccaagacagtgaagggggtgggtggtgggtgtgtgcacagggagggaaaggcagatgctgttgcccctcgtgcccagcagacaaagaggaactgcacaacaaatgcctgagagaggcaagagtgtgtgcaagagagagagagagagatggatgggcctgcgggtgggagggagaaagggggggccctagggaaggcccaatcctctgccagctggggaagccaaggccccagaggtcatggggcccaggacacggacagcttcaaggctctcagagaggcagaaagcccctcccccaccgaactctttccctcctcctccaggaggaaggttgctctctagatgtggggactgacagcctcctcctttccagcagtgagagggcccagcagagtctggtgtcaggctagtgttgctccgtggccctgagacctttcagatcccgggcaaaaaggctggtacggtctccccatttcccccccttcctgtgcccctggggccccagcagccgaaagccctggatgaatccgccctctatcaggacaaggcctctgctcccttccctttcagaggagctgctcactgacaaactgacctactttggaagactacattttctgattccaagaatttgggggtgggaggggctgtgaaacttcgggctgcctacccctgaatccctttctactaaagttctctaaaacatttcacagtctcagaaaacttggggcaagccctgctcagtcaattaatggcaggagctgggtttcagcaactctgtttcccttgaaagataggaaaatggagggggtggttatctgtgccataaattaatagactcctgcttatctcccccttttccctgccccagaagggaatgatctgtacctttaaaaagagaaaaggggagaaaagatggattttctgaatcacattctgtgaggaattcaaatctcttggaagaacaggagagatacccttttcatcaagtggcctgatgagggaaggtcacctggcgtggagcagaagaactatgatggcctgtggaggcccgcagtgtgcttcgggagggctgcatgctgcagcctttccctctgcttccatatgactcttccaggagagatgggtcagtgatgagcgcagctatgcccagtcctaagaggggtacttttcagggctaatggtagccttactttgactttctcttttccctttctaaggtagctgctgacatctaaaattctcaaagtacagaggaggagttcctggcctccacttccattcaaaaaccatcctgtgcagaggccacttcttatctaggacatgccaatctgctgaaagcagggaaaacttggtttcatagcacggtgaagcaaatcacctccatgagtatccaatattctccataaacaggtttgaaaagagctccacaggatttgtagtttctcatttgcctgctttatggtagggactggattttatccatctgagtgttccccagcactaaagcagggtcccaagtgtacttgttgctcagtagtggttttctgaataggcttaactgagcaggaggtaggaggactggctcgctcctcacaaggccatgacttttgttctaataaagtctcttccaattaaatgagtctacctgatccctgtcattctgtcaagcatgtggcagatattgaatgcctttacccattccaactccttccctccttaaacaagaaaggggtcagagtcaacatcttaccttacattacccgggtgttgccaatgactctcatatgtgtgtctgacccatcttgctatctcctttagtgcatgccaataattccttcattggtcctactttagagtaaaaaataagctataggtcatttccaaaatggtgcttgggtttctgatagggatactcatcacatcaaaacccagttttggtttctattatttctttttttttgagacggagtctcactctgtcgccaggctggagtgcagtggcgtgatctcagctcactgcaacctccgcctcctgggttctcctgcctcagcctcctgagaagttgggactacaggcgtgagccaccacgcccagataatttttgtatttttagtagatatgaggcttcaccatgttggccaggatggtcctgatctcttgacttcgtgatctgcccacctcggcctcccaaagtgctgggattacaggcgtgagccacgtgcctggcctaatttttgtatttttagtagagagggggttt

SEQ ID NO: 916321 - DNA, 4001 bp, Homo sapiens
atcagtcctacctttttcactgtgtccttcagcttttgcacattcctctggatatgcaggtcatcaccttcaatatgctataaaacaataacaagcataactatcttaatgttgtgctgaaactttatgaacctccacacccatggaggtacagtacaattcacctggaattaaagctcttagtaattttgcccacaatgacctagatttcaacagtgacctagatttcctgagctcttgaattcccttggacgccagaatccagtcacttcccttacaagagacctctcttcatctttgggaaatcctactgaggtttgcatttgtggaaagagcggagtagtttatgcaaattctgtaaggaataaaacctcaatcgtatctccagaaaattgcatgcttagaacaagaaatgtacataaaacatctcatgtgaaaattaagccctcttcagtaagtcctagggccttttactgggcccactccactcaaactttttttcatagtttcaaatgttcagcggcatcaagttcacacgcctccgattttgtggcttcccatgacatcaacagggcaacagtctgccgacccaccaccgactttaagccttcccatttcccactttctcttctaatttctctccatgccatcccctcccctcaacaacttagactcaatggatccatttccacatctagatgtttttcccaacacctttctcatcttacgcaacctgagttgccttttttccgaagacaaaccaatgcggcttctgtacacttaagttccagaccccattcaccactataaactcaagatgtgactcagtcaaagcaaaagcaaatactctatgatcccaaatgactcctgataacactgctgccaagacacttcttcctgctagcttaggggtagggggaaggagagagagttggggtaagggggtctctgtggaaggagggaaggaggggtaggtgggcataggctgagagctgaacttacacatgtgcttagcctgttgctgagcctggccaggaagggcaccacctcctgcatataaggctggaacctatcagattgagggaacagcacttcttcaagggtgaagttcagcacctgcttcatcagatagcagcgctcactcatctgcaggtggaagggaaacagaaagggtcataagggataagacctaaaccatcatcaccaccaccccaagtacccatggacggcacacggccctgttcgtcacaactgtagcttacactgactccgtggaacagtttctccccaatgagacgaacgtctgtgttgttatcagccaagctagcctggaagagaagaaaagactaagggtctggacattgagcaaatagaaaaaaaatttatacatagacatgtgccccatcccgtctccccagagcaacatcataaagactaaaagcagaattcagatgtgtgcatgagtttagaacaatgcacagaggcataaaggaaaaaaaaaatcatcagatggattactgaatggccgctctttgggaaaaattcatcatatgtatcataaaggccaaaatggaaggaagaagttcaagaaaaaaaaaaaagccagattcccaaagagtctctgaaaaaacagaaaatttatctaccctcagggataaacagtgggttcctaaagctcttagagatgctctgaagaaaagtttaagaactatttggattccaagtagatccaacgagaaagagcaggattgagatgtatacctccttagccagcatgaaggtgcggttggtgatatagggctgctggaagttggacttgtcaagcctgcagtgggagctgatgggcgcagctgctcctccctgtaccaagagggccaagagaaggaggcagctggtggccagggtccccataaggaaagagctcacagatttctgcagggcggccattgcagacaattctaactcgagcaactggtgactggggaaggagaacctggtcgaagacaacgtgaaggaacaaaattagtcaagaagtatttcatcaaactaaccaattgtaccaagtttgccgaaacgcttacctgttctgaagattctgcttgtgacggggaaggtagaagctgctgcttttatagcccccaggatactgacttttttttaattgtgaaaaatatgacatcagcaattatctaatttccagtactgtcttctgagaacgacctaaccaccacaggagcccacaaaacaccacctctatcctttccaccttgagatgcaagtgtttccctaaaacgtcactattagagcccggagggtattttacagacaaatcccagaaattttctaaaccctacatatttttcaaagaacacaattgttttgtcttagtagagttcagatttagtataaaatgttttgatctcctatagtggctgagtaagcattttggtcacggactcattttcctaccagctttatagattcttatctcattggaggtgatcagaaaaaaaggacccatgtcctatatcctctgctttaaagtaaatggtaatgacagctaacagatcattccattattaaaataattttatctcatttttaaacatgctgaattctaaaccagacttatgtttcaaaaataactgtcttggctaatctaattattgttttcttccctttttggaactatttttaagtgatcataacaattaaggcagaagtaaatatatcttaaaattgtattaattgaattataatcaatatcaacttaagtttgtaaatactaatgctgaaaatctgatctccttttttcttaacatgtaaactttttttaaaataaaagaataccatggatatagttcatcttaaaattttacctaattctacacttcacacaagtctcaacataatatttccaaataatcctataacaactatatatgtgtgtgtatatatattatatatgtgtgtatactatatatatacatatatatgcaacattttatatatatacatatatacacacacacacatggatgtctgaagaagggaatataggaatatagaggttccgcgttaccttcaaattatttaaaaatacacctaaaactagactggaaattctcccgcagagcaaggaagcaaatgcaagtatcaaaatgcaaatacctattgctgagggaaggaatgtgaattagtgcaaatttgtataatcagatttttctcctcacaactagttaagatcaggagtgttgaagaactggaagtagggatgtaaataattgtaaaacctagaccactttttgagatggcacagacctaagcaaggtgccactgcaaagggtcggaaccacatgaggacactgagcatttgtgaaggtggccagaggagaaagaagcaaaaatgaagattagtgagagtaaaaaacaccacatgatcacacttgcatgtggaatctaaaacacttgaactcatagaaggaaagagtagaatggtggttgccaggggctgggtgggcaaggggcagcgagatggggagatgttacccaaaggatacaacatttcagttaaagaagaggaataagttgaagagctctattgtccatcatggtgatgatagttaagaacaatatatcgtatgcttaaaaatcacaaagagcatagattgtaaatgttctcattacaaaaaaaaatttcaagtatgtgaggtaatgcatatatgttaattcactcaatttagccattccacaatgcatgcgtatatcaaaacatatatgaaatcaacctaagtatccacagatggatggatgaatggataaagaaaatgtggtatatatacacaatggaatactattcagccataaaagaaatgtaatcctgtcatttgcaataacgtgaatgaacctgaaggacaccatgttaagtgaaataaatcagatgcggaaaaacaaatactgcatgatctcactgatatgtggaatctaaaaaataataatga

SEQ ID NO: 916322 - DNA, 4001 bp, Homo sapiens
atgagactccatctcaaaaaaaaaaaaaaaaaaaaaaaaaaaaagggattccaattgtcctttgagaggaaagtcccattattctaggatatttatcttcatttccctggaatgcccttcctgctcaaagctgaactctgacttttgatcctgcaatgatcaggactcccgtctttgatcagatatactcttggccaagaaagcagggaaggagacactggatcagggagcaagtgacccttaggtatgatcccacttcctaatctggtaatcccattctgcttgctcagccatataggaattaatactaaagagatcccagttattctatacaccagggggtcatgagaaaatatcattctccaccatagcccttcagaatagaagaaagggatgcatattgtagtctcttggccttatttttccatcgatttctctttcccaattgagcctagaaattagactcatatagccacaaaaataagactttattgaaaaaagtacataattcaatataaatacaataaataatcctccccaaactgtccccaggaggataaataatccccaaatttcccttcccatctaataaatactcaaccttatcataggtcagcatcacatgtcagtcagtattggtaattttcaacatatgcaggtcccactaaaattaatggactaattaacctgttggctcacaggtgcctggggtggtagatttatcttggccttgctgggccatggagatctgagtgccatccttgagctgctgcctttagggactcagggttgctgctccatgggcaaagacccgggcggctacagccacaaaggcctggaggctgcgaaggattttgaagcggagaaggagacgctgccatggctggctgggactgaggcttggaatctgctgagtctcccagtggtgaccctcaggctgaaaggacataggacacagtcagagaagactctaaacccttaacccccaaccctctgtctctgacacctgcaagcccccatcctccacgcccctacttcatacctgcaggagttggctgaggcccagtagggaggcatgaagctggcccacagggctatcagggagcagagaaggctcccctgtgaaaatatccgatcctagcagcttctcataaaaaatcagaccctggtggatcctttgcaagcagaactagggagaaaagaaagcaatgaaagaggacaccctcttcctactccattcactgaagactcacccagtttcttactattttcagacacaacttctggtttaccatggtacccagccatgttctcagtcccctctccttcattgcccagccacatcccagtggtacctgactgttgtccctgagtccttgggggtcacagccatctccacactggatatggggaacatcatttgtagtctcttcatctccctcttctcttagatcctggaatgaaggaagaggtggaaagaatgaagaagtaagatagtacttctgaagccaacctggaccctcaggcccatgactctcccaggaaccctactctcttgtcctctcttactccctaatggccttcaaccctccagcttccactcaaggtcacggtcttctgccacagccttggagagcctggactcctgttaggctccaggggctgccactcaccatgtgtcccactagtggatgtgcactccaggccagtgtgcagagcttctgtgaaagctgctggcactgagtccaggcagggctgctgcccccaggcacagctctgccctgagctgtccagggcagcagcaacagcagcattacagctctgctccccagcatctttttgccttcttctcaaatctggctggctctgcgccttgcaccagtcctggtggaatctctgcccacttccacttgctttgagcctgattctctctgttcagcgcgtctctggtttggttccctcagttgttcaccgagtttgtaagctgcttcctgttgtttttctccctttgtctctgagtcttttaaggtccctgcattgtaaggcccgccctttataccagcaggtgactcacagcaggtgggattcccctccctgcatcatccccctctgtggggagcccaggtatgcagcctcagttccaggggaaatgagtagtgtggttgctgtggctagaggcctgggatgggacacatgtgtaatgctctccaggaatcgaaatagctatagaaggggcggggatggggggcacagcggggatggggtgggaggggtaagggagaacaaatatttaaattaatctggtctcaagttccttcctgtttgatctttccctgatctttttgcctctcaaagctatacccctaccccaccccaaacctaatttcctcacttcctcctgcttgaggaaaaagcaaaacagagaaacatccattcatctcccaataggatggtgagctgtttgcaatgaagtttgattcctacctgatgccccctattaggaataaacgggcttctttttctcagttggaaacaacattatttcaactggatggtcctggtttcatgggagagaatgcgcatgaaggaacttggagaactgggaagccagtatgaggtcttattgctccccatttcaggcctcacagtggaggttagaaaggctcttgtgggaagagggttattgactaagaaccacctgactcctcaaccctagtggcccaagatttcataggctctataagagttggatgatgtttttttcaggactagtgcaaataaggcctggaagttcaacttagacattccagcacctagtcccatggcctcattctgacgtcatccaaattgttctgggaccctccactggggtcggggcagtcccagctttggaccccatggctaggaagcccaggagttctgggtagtcgaaggtgcactgtcaatgactctggctggtccttcagcttgttgcatccatgggtaaaatccactgacaccgatttcatcaccctccatgatgcaacatcgagtgaaacagctaagagtgtgaggttgggcgtgggagtggaaggtggtccaaagccgggactgccccgaccccagtggagggtcccagaacaatttcgaagacgtcagaatgaggccatcggtgaccacacagctggctcccaaagcctcccccaagaggttgacccttttcttctgagaaacttgtcctgaatggaggtctcccttcccttagagctattcaaaactgcccaatgacacttctggttcaaatattatgattctgtaggtatgagctaagagaagaaaaaaaaatattacgattctaagttaaatctaccaagggccgggtacagtggctcacgcctgtaatcccagtactttgggaggccgaggcaggcggatcatgaggtcaggagttcgagaccagcctggccatcatggtgaaatcctgtctctactaaaaatacaaaaatgagccagcacggtggtgggcgcctatagtcccagctactcgggaggctgaggcaagagaatcgcttgaagccaggaggcagaggttgcagtgagccgagatggcgccactgcactccagcctgggtgacagagcaagactctgtctcaaaaaaaaaaaaaaaaaaatggaaatctaccctttagattaaacatttccagcatcagagaattatctgagtttgggtgagaactgttttgcctctctccctaataaggtggacaccaatggaataaggaaaggggagggggcaggatagggagttcaccttacttgtgtacaacgtctcctatgttcttcccatctctggtccccattctgggagccctaaaagataagagatgaaagaaagatgaaaaggaggaggaagtagagcctgggggatgggatgagagggacaagggtgagttggaggcacagggctctgcctctttgtttcacttcctggtgctgcaggagttgggtaggaagaagggtt

SEQ ID NO: 916323 - DNA, 4001 bp, Homo sapiens
atgagagtttataaaaaaacatgcaatccaaacctaagtaagggtataacaaacacaaactaagcaaagaaatagagaacttaaatttggtggttttttttttttttttttgcttgtttttttctttttaacctagccgatctactcacactcataaaatgcctcatgtactctgggctgaaatttgggttacggagcactttagttgaccacaagaaaaaaacatcttaactcttaaaaaataaacaccccccccctctaatggcccagtgtttaagtctcagtgaccatgatgcccaggatgaagagctcctttccaactggcttcccaaggattgcaataaggctcccaacccaacctttgtaccatctgcaagctacaactgcaggaggctggagaaagcatacttggaccccaaccaagggcacagaaaagcttcaatattccccacagaggcaactcgactaacattgcacagattctggctcagtgtttttgttttgttttgttttgttttgttttgttttgttttgttttgttttctgcactggtctttattgctgtggaatttttcatagaaatgtgatcacttttaccttcttaattaattctccactgcttgctatgacagtgaccatactgaggcatcaaataatttaggtaccaaagaaggcatgtctatccctttttaagttttttactgagattatgccttaaaaggggcacaaatatttttttaaaaacataagtaaataagaaaaagggcatcagttagttattattgttatgggaaagaaggaaggaaggaaagagagagagaaagaaagaaaaggaagtaaagaaagaaggaaggaaggaaaagaaagaaagagagagggagggaaggagggtggaggaagagaaaggggagagggagggagggagagggaaggaagggagggagggagggaagaagggagagagggagagagggaggaagggagagaaagagagacttagaatagtgtttggcacaaagttggtactcaagaaatattaaatggatgaatggattacttgggaatcacataatgagagaatgattttaaagtatttatttgaaaaccatgtcatgttactttagctctcttcagtgtgttttatgagccattctttaagaaataataaatagcagcattctgagtaatgtacagttatttaatgctatttccctggtgatgacctctccatttggactacaagccaacaattacaaagctcgttttactcaccctttggtgtgagacagattcttacatgctgacttctaaacaggtttctaggatcaaatgcacagtatttgttgtgtatacttacacagtggctcaatttctgcctaaggctatgaaagtcctccacaaagcgtattttcttgcagccttgcaattgcagttgaccaaaaacgtcttccatgaagaaggacagaagctgttcttgaaattgacagtttttctaaaaataagatacaagaaattgcatatggtaaattatgaatcgttttttaatgtcccccgatcattacttaattactctctgaaaaaaatttaaatgcagggggaaataaacatcaaataagtggaaatgtaaaaaagaagaagactttctgacttaccataaactgcttttttgttttcttttttaataatcgtatattttttatgcggtcttcctacaataatacaaagagaaataagttgtatccaagattgtaaatgtccttgaggtcatgattttaagcagagcctaatacttactggaatcgttgctttgagccatgctgctttgatatagagagcgtcaacagcttgggacaatgttccccttgggtaacaacttttggtgaaggaagattgcttgtgcttggcaatggcaagagacagagtgactaacagcaacccacacctcaaaatgaaattcaccagcatttcccttcaccccactcagcgtgtgtcactcacagcagcccaagagatactaatgccggttagatgagaggataacctacttaatgtagccctcaaagccaccagtccaatgaggtgctgtgaaagataatttacagtttatatagaggaagatcactttggttgttctatttttttaagagcttgcttcatagtcaaaaaacgctgatcacaccatcaactgacattatttaaaagctcagccttactggtaagattgcgttctcatttccaaaagaattcagaatttcagttgcctatcacagcagcttgcattattttaaaaggcatgccaataaaaacaggatgatttccagggggctgtgtcataattttttaaaccccatgtgaaaaatctccttttctaaccagaatcccagaaaaaatttaacaagggggtagaaatgggcagccccaggaaatctgctcacgattcaaatgggtcttgtgtttattgcttgccacatccttcacccagcttcccccagaggccattattctgcagatagcagcgagaacatttccagtgcagaaacagtaactccccttaacatattcaagatatgtttggaactggacctgggactaaggtccacaatgtaataagttctctgtcatctctgtccaaatttaccactcagactttccttataactcccaacttccaggagagtgcaaattccttgaagaaagagaccgtatattttcacctttgaatacagcatctaccatggcacctcatctaaagaagtgcatccattattaattgagtaaatacttttgtcacatcatgacgtgctaccataactgctttattttttaaatttcttccattcacacatttttattaaagacttgcctacacaaaaaccagtgctaggtatgagggagccaccaaggaggattctccataaactcccatcctcatttctgtcccagttcttcctagacagtaaatatggctcattctgggtagcagccccaatataagaagagggcagcccagagtcatattctgagaagcagagataggtcactaaagcctagaatgaatagagttaatgtgtatcagggataagtcaacactagaaatctggttgtgagttaagagagtcatcaaaactagtcagtcaataacaagcatcagaacccaagactaaattccaaatgaaagcaagcagggctgtcaaaaaaacaaaaaaaaaacaaaaaaaaaacaaaaaaaaaacaaccaagaagaaaaagggaaaataagaaaaatgcttggactgatgtctgctgtttcaaaacatgagtggatctcttggaagaatccaagccttatttccccaggagcaagatcactggtaacgacacaccctatcaattgagatgagaactattcacaaaaaaactatagcagaagtcagctgactgggagtgctgagtgaagttcactgaaattttatgaaattcagaaaaagaaagaagtcgtttcagttgggagtggctgaaaggatgtttgaactaggacatgaaatacacaaagggatttatttatttatttatttatttatttgagcagaggaatgcctagtattataagttcctttggaaagaaacagtgtgaacttggagggatcaaaagctcaaatgcccttagagggcgaggattaatacaaacacactgggtgggtagataccagataattgcggctaatatgcttatatggtcaccagtcttaaagtctgtctaatcacatagcctgttaacacactgtgctataaacacagagtgcaataaaaggatgacacaaaacacctcccagagccatatactgccgtgagcagccaatttcagatccctggtgtgtaccaacaaaacttgtggctaatattgataactcaagtggctaatattgataaattaagttgatgtgggttctggctattttttaacttctggtagttacatttccataaataccttacatccctcaaatcatcatcacacaagg

SEQ ID NO: 916324 - DNA, 4001 bp, Homo sapiens
ataccaagactaataacaataacctaatgtttttcaaggtaattcacaaattcacatctcagccctcccgggactagcccatatgaggggtccctgagattattcattggaaaaatgtacttaaggaatcacggcagagttcccacacttagctgtcggtcatctttttaaggctccttaagttcctgccaatccgaaaggaagagatggccttaagtggtggcctgttgggctccagaggtcaatgattttagtgcgaggtccatgcactctgaaaactgttgagaaatagtcaggatgaagcgtttacattcatgggtgtctgttggcacagaaatgtttgtttctggtgcatcttgaaatatgagtttgtcgaggtgctctatgatctcatcaataacagatttgttgtctagctgtctgattgtcttgagatatgcccggatggctgggctgtggatgttgtttggcggctgggcgtcagggctgagacacggcagcgtgtaattctgggacacgagcacgcccttctcttcctccacctgtggaatgaggagaaatggtcagtgttgggtttgcaatgacagctgcaagtcttaacagtgaatgtttgcatgcttcctccgtaacccgcctcgttgatatatttatctgatcaatgtcacaaccctatgaggctgtgccatcaccaaccccatttccagatgaaactagagcttaggtggctgcagtcctgaagcctgtgctcagaaccactgatccatccagctgaggcctcccagccttccagaacccactctcacgtgctcagggtggtgggaattgcagcacatctggccttccatggcagctccccgccctttgggactctgtgttaaagccacgcacgctccacttataaaggagagtgttaggcttgtccggaaaggcctccgagatgcaggcgagagttttccccaacaaaccaaggagtccggaccactccctcccttcctctttctaagtactaactagagtcagaccaaattgccagcagcacctcatcaacctgaactgcccagtcatcttgggttggtaacaacctctgccttttataaaagccaaggctaaggtctaaataccaaggcagatgagaagagtaatgccaattttatgaattgtttccaagtttgggcatttgtttgtttgatcaaagctatcttggctgggcacagtggctcacgcctgtaatcccagcactttgggaggccaaggcaggcggatcacttgaggtcaggagttcaagaccagcctggccaacgtggagaaactctgtctctactaaaaatatgaaaattagctgggcgtggtggcgcatgcctgtagtcccagctactcgggaggctgaggcaggagaatcgcttgaacccaggaagcagaggttgcagtgagccaagattgcaccactgcactccagcctgggtgacagagtaagactctgtctcaaaaaaaaaaaaaaagccatctttgcctgtctagtttcccccatcccttcctggcatagctacagccctggtttcaggtccggagagaggagcctctttggagggcaatggaaggcatttttaagaaatcgtttagaaaagaaatctctaggacactcacatctttcaaaagcatcttcgagagggactgtaattcctcgactattttctgtacatcatcacttggtcgtagtaaacggacgggcaacgtgtgggaggccagccagcctcccaggcagcagaacagaaagagcacagacgtcgaggggcctggagagagaacgatgccgtgagcgcatacatcacacacccctgcccaccctggctccatccctgcagccctgctgagccaaccctgggggtagtgcttccagaatcttcctggtgagataagatgatgcccaagactccggaagcaccaggaccagtgatacctgagtgagaggccatggcgagagagagcaaggccagcttcagtgggggcttctggagccagatgtgttcgccatggctgcctggaggtatataaagggccagggtgaggagaaagagcagtcagcgtcccgcccatggcaaaaccatttactcagcttttctccagaaaacactcaaaagttctactggccacggctgagtgaaagggctgaatggaaatgctgaggttaccctccaggtgggcagatgcctgactcagacacacacatacttcacaagaaggcacatgaatgcatctttgccattcttcttggaaggagcctgttgatttgactagacaaaattttgaagcccagggttgacagacacgaccataccaccaaggagcgggtgacttccaggagttcaaggccagcggccacagggaatttctggggaggaaatgcgaagccggcatgagatgtgcagaatgcggtatctctggaaatttctgcagcatatgcccacgccggtgtgcagggacggccccataactgctgtgaatgtggcgggtcgaaggcttcatctcaactccatgtggccttggacatcactggactctccatcgtgcctctgcaatctcagggcccagaaccagagactgtgatccagagttattgcttgaaatccttgttcatatcttttttcttttttttttttttgagatggagtcttgctctgtcacccaggctggagtgcggtggcgtgatcactgcaacctctgtctcctgggctcaagcaattctcatgcctcagtctcagcctcccaagtagctgggactacaggcacgtgccaccatgcccagctaatttttgtatttttagtagaaatggggtttcgccatgttggtcaagctggtctctaactcctgacctcaggtgatctgcctgcctcggcttcccaaagtgctggaattacaggcatgagccactgcgccagcctagaaactttattgcttttctttctttctttctttctttctttttttttgagacagagtcttgctctgtcgcctgggctggagtgcagtagcgcaatctcggctcactgcaacctccacttcccaggttcaagcaattctcttgcctcagcctcctgagtggctgggattacaggcgcccaccaccacgcacagctaatttttgtatttttagtagagacggggttcactatgttggccaggctggtctcaaacgcctgaccttgtgatccacctgcctccgcctctcaaagtgctgggattacaggtgcgagccaccactctggccttagaaactatttctaagttcattagctttctttttctttctttttttttttttttgagacagggtctcattctgtcacccaggccagagtgcagtggcatcatcacaactcacggcagccccgatcccctgggctcaagtgatcctcctacctcagcctcccaaatagctgggaccacaggcacaaatcactatgctaatttttttttttcttttttgagacagagtttcgctcttgttgcccaggctggagtgcaatagcacgatctcggctcactgcaacctccgcctcctgggttcaagcgattctcctgccttagcctcccgagaagctgggattacaggcacccaccaccacgccgggctaatttttgtatttttagtagagacggggtttcaccatgttggccaggctggcctctatctcctgacctcaggtgatctgcccgcctcagattcccaaactgctgggattataggcatgagcgactgcacccggcctccttattcatattttagtgccagctttgatcaggccattttatagggtatcgggaatagcggtgaagaagttagagttcctgcccttgtgggcccgtcattgctgtgggctgcggacaatagcaacaacattcataaataagctagaaagcactgtgacggttggagagtgacgggcaggatactttaagtcaggtgatcagcaaaagtctctctgagaggtgacattgaaga

SEQ ID NO: 916325 - DNA, 4001 bp, Homo sapiens
gctggagtgcagtggcatgatctcggcccactgcaacctccacctcccaggttcaagcgattctcctgccttagcctcctaagtagctgggactacaggggcacaccaccacacctggctattttttttatttttagtagagacggggtttcaccatgttagccaggctggtctcgatctcctgacctcatgatccgcctgcctcagcctcccaaagtgttgggattacaggcatgagccaccgtgcctggccaccagcctttgtttttttttttttttttttttttgagagggacacggagtctttctctgtcacccaggctggagtgcagtggtatgtatgatcttagctcactgcaatcttcacctgctgggttcaagtgattctcctgactcagcctcccaagtagctgggattacagtcacatgccaccatgcccagctaatttttttttttttttaaagtagagactgggcttcaccatgttggacagggtgatctcaaactcctgacctcaagtgatctgcccgccttggcctcccaaagtgctgagattacaggcatgagctactgtgcccagcctgtctacctcactttctaagcaggaagaagccaccttagattcttccttctctctcaaccactcagtcattcagtcagtcctttcatatttaactcctaaatacttctgtaactccctaaaatcaggttcttatctctgtcctggaatgttatcactaattgatctctgttatcaacaatatcatgctccaatttaccatatattagtcattttcctctataaaaatcatactctactttaaaatgcaaacttcttcgtttggcttaaaagaccttgtccaatctagcctcagcctctttctccagtctcctttctcaatttcttaccttagattcataaatatcaaatacgctgacctctgagtcataaatatcaaacacccttgaccttgccacaaacccatcacagtacctttgcggatgctttccccaacctggaattccttttttctctcctcactggcaaataaccttcaagaccctattcaaacatcacctccgctgtaaagcttttcctacatccccaggtaattaccccccttttctccagggttgcctaccaagtgtcctttttaatgtatttccattatctcacttgtcacagtgttttataattatttgcagaatctgtttcctactagatcgtgagcttcttgagggcaggagccttgtcttactcatttttctatccctagtgcctgccattatgtctgacccatagcaggacctcaataaatatttgttgaataaatgactccgggccctaaaacaaatgtaagcgcacagagcaataggctttctgcaggggtggtttacataaatcgcataaacaccagattttcatttgatgggaattagatctttactccatgaagagaagcgttctagttcatcatctgacagtggtcactcatcaccaccactctcaaccccatgagaagccacttttgaggaagaatggagtggaggagaggtctttaccgcttctccaaatggcagtgtgtgataacgattctgaacgactatggggaaaaaaatctaccgaggctggagaccctggagaatgggggcagcaactatcttcctggccatgcacactagcccttcaagacacgtctctaacccccacaccgcacccctccctcgtctacacccatcagcggggcctcgatcctgctgccccgccccctctttctccgcaccctccaatatttcctgccacagaaccgcttcataattgtgaccttctcgtcactggaacttaagggctacagatcctctcatccctgatccccgcaccactctgcagccccgacccccacctccagcctgctcttactgtccagataatgttccaaatacatccccgcagccatctcgaagcaaaacaaagcaacttccgatccgccccggaagtgactgtaacgcgacaggggccgaagccattttgcggctaaagcctttccgcccttaaaaggagaacttccgcccttaaaaggagaacttccgcccttaaaggagaacttccgcccttactatattaccgccggtacacatccgcccgacactgaaacttttccttttgcatggtagccacgaccgcccacagtgaggcggctgtagcccgcttccgcccttacagacaccccaggacgcgaccgagacaggtatgacgtcactggaggtcgccattttgcattctctagcaaacttttttccctccaaaacgggaatgtatggtaatccgtgcaggggtaactgttcactttaggctcatattgcgtaaacataccttctcagcaactggaagatccaactttttttccctcttttgcagaatgacttttttcaagccagttagtttcttaaggaagttggggaagagtatcaggccttgagacatttaaaccgtctgaatttctattcactcacacaaacaccatctcccccagcattatttttttaacttgagaaagatgatcacctttctacttataaatacaaagaatgactcataataaagctataattctgcacatcttttgtcagagctcctgtacgttacactagaatacactttcacatataaaatattacttcctgccttgccctcttgcttttttttttttttttttgagacagaattttcactcttattgcccaggctggagtgcaatggcgtgatcatggctcaccgcaacctccacctcccgggttcaagtgattcttctgtctcagcctcccgtgtagctgggattacaggtatgcaccatcacgccagactaattttgtatttttagtagagatggggtttctccatgtcggtgaggctggtctcgaacttccgacctcaggtgatctgcccacctcagcctctcaaagtgctgggattacaggtgcgaaccactgtgcctggcccctcttgctactctctaagggggaaatctcgtgtttttgttttccttttgtttatatgtgatgttagcatcataattctgaagggattgagggatgcagcagtatcactactgggctagttggctagttagttgctagccatcactctagtcagctatggtagagtgatttctatggttttcatcagaatgggaagcagtcaagggtatgagaggctgccaacacactaggctgtcaacacactgccaacacaaaggccataacctaatagtggtgttagtaagatagtattttagagatagctgccacccctcacacttttcgtaccctcacacatccttcataagaattaccaatgtcttacggcaagtttttaaagagacagactttcagctatataatttctaccaaatatgtggagaagaggaacttccaacccggggcggattggaagttgctttgttttgcttcgagatggatgcagggatgtatttgaaacattatctggacagtaagagcaggctggaggagggggttcaggggctgtagagtggtgggggtatcagagctgaaaggatctgtagcctgtaaaccccaggtttactagtgtgcaggtagtaagatacagcaatagaatccgggaaactgctctaattacaaaagtcatgcttttcggtaacttgatctctgtgcctgttttactatacaatgagactactacctccctcatagggttgttggaataagtgagtgtgagtgtatccataaaaagagtagattctagttctaatactggtgatgaagttagggccattagggccttttcaagagttggtgagagtgggaggaaaaagcagtaaatatgcagggagctaagaaacattggcatatttggtcatatgtgatacattcattggtattacacaacatattgagacaccatcttaggtgcccacacaggatatctagcactaaattaagtgggctttatttatcccag

SEQ ID NO: 916326 - DNA, 4001 bp, Homo sapiens
caaaaaataaaataaaataaaataaaaaataaaaaaaattagccaggcatgatggcgcatacctgtagtcccagctacttgggaggctgaggtgggaggatcacctgagcttgagcctgggaggttgaggctgcaatgagctgtgatcataccactgcattccagcctgggtgacagatgaagactctgtctcaaaaaaaaaaaaaaaaaaagaaaaagaaaaggccaggcacagtggctcacacttgtaatcccagcactttgggaggccgaggcaggcggatcacgaggtcaggagttcgagaccagcgtggccaacatagtgaaatcccatctctactaaaaatacaaaaattagccgggtatggtgacacacgcctgtagtcccagctactcgggaggctgaggtgggagaactgcttgaacccaggaggcagaggttgcagtgacctgagaccatgccattgcactccagcctgggtgacagagtgagactctttcaaaaaaaaaaaaaaaaagttttttaaaaaagagacagggttgccgggcgcggtggctcacgcctgtaatcccagcactttgggaggctgaggtgggaggatcacgaggtcaggagtttgagatcggcttggccaacacggtgaaacccagtctctactaaaaatacaaaaattagctgggtgtggtggcgggcacctgtaatcctggctactcaagaggctggggcaggagaattccttgaactcaggaggtggaggttgcagtgagccgagatcacgccactgcactccagcctgggtgacagagcaagactccgtctcaggaaaaaaaaaaaaaagggtcttgctatgttgctcaggctggtctcgaactcctggcttcaagtgatcctcctgccttctgagtagctgggattacaggcaggagccactgtgcccagcccctttatccatctttctgagtcccattttgaccctgttctctgtgatatggggacctgaggtatatatgggaacatgacatatggtgaggtattgcagtcctggtgttttattttttcttcttttactcaaatgaggcatctggaggagaggggaagggaggggctagatcctggggccagagaaaggagagactcccacctcccagtcgctgtgtacaggcccaggaagtggatgggctcacaccacagcctgtgggtttgtggggcctgcagagagaggagccggaggagatgacggcagccaatctcaaaagaagtgaaatttaccagctttccagctgcctattggtcaggtctgagctaccagagtgaccccagagggatgtgggggttgtcgggacacctgggtaaggagattatagcctgtgggaagcaggggttggatggtttttggggaaggagtcagaggtaagtctggcgaggaaacttttcctttccttgaggggtcaagttctggggaagagctacagatcaggaacccacctgtctcagcaaagctgatgatttcacattcctgttccctgttgtcctctagaagtgccccctgtgggaccccgtggaggtgctgcagtgcagtcctcaaagcagctctggacacagggcggttcagtgttgggcgctgggtgaggtgcagcttgtccaagatgcttctcttggccagatcaagaagcagctcccgctggctctccagttccaaggtgggccccccacatgctggacactgaccgccagctctgggagtggccactgtggttggagccaggaggagaaaggccagaagcaatgaggaggtcattgctggggaaggcccttcttgagcaatacagactcagggctcagggtctcaacagctgtggtctcaactctgtcctggctgccagaggccctggaagaagtgtgtgtccagctggcatggctccttgttgcaggggacagagcagcagccaaacgtctgacttgaaaatgaagccagttacaggtagaacttggcagaatctgccaacgcatagtcagtgaaagtacagagtgggggatgtgaggagaggttggtttgtttagggaaagacacgtccctgggccaatgttgggagacagttgttatccatgtgagctgccaggcctggggttcaaaggtgagagattaaattcctcctcagatctctacccttgctgggaatcctggggatggtggaaagggacagatcacaggttttgggaaagaatgttaaagggagactctcaaacaagaaggggtcattggcaaggcactttagctcactgtcacgcatgaacaattgagagttgcattcttttttgcctggtgtttctcaaagcccatccccatccctccatcctccctcctggggttctcaatccagccttatttgttagccctggttgagttttgcccaagaggtctcaaaactatgaagtctgaaggttaagggaagggaggcacagtgttctagccatgtctttgatgctctcagagggaactcctaaggtggggaaagggcttgagttccagatttgctcaccctttggggtttttttctgtcttggaaaagaagttttgagattccctttttttttttttcttttgagatggcgtctcactctgtcgcccaggctggagtgcagtggcataatttcagctcactgcaacctctgcctcccgggttctagcagttctcctgcctcagcctcctaagtagctgggattacaggtgcgtgccaccatgcctggttaatttttgtatttttagtagagacggggtttcaccatgttgttcaggctggtcttgaactcctgaccttgtgatccacccgcctcggcctcccaacatgctgggattacaggcgtgagccaccgtgcctggccaggagtataggttttaaatccaggtattcttggttgttgttcttcagttcttgcacttgtctcagaaacatttcaggctttcattctgtgtcatggcactgagaaaataaaacaattttaatctgggaaatgcaagtctttgaagattatcaggctcagagagacattaaaatgagacagcagaccaggcatggcggctcaagcctataatcccagcactttaggaggccaaagcgggcaaatcatttgaactcacgagttcaagaccagactgggcaacatagccagaccctatccatactaaaataaaaaataaataaataaaataaaatttaaaaaaagctgggagtggtggtgtgttcctgtagtcccagctactcaggaggctgagactggaggatcatttgagcccaggaggttgaaggtgcagtgagctgtaattgtactgctgcacacctgcctgggaaatagagtgagagcctgtctcaaaaaaataaataaaaaataaataaataaaatgagagggcaatcatgtcctacttcctgcttttgagctatgtattcatctcttgaaattgcttgctattgccacaagtaactataaattaacataataatgctgcactggacactataacctagatcctatagcttaacaatctatagccaatcactaatcaatgttatttctgtaaaccaacaagaatacccgacaactttgtatcagtctactccctgtctccttcttttttgcccttaaaaatgtgcttgtaggctgggcgtgatggctcacgtctgtaattccagcactttgggaggctgaagtgggcagttcacttgaggtcaggagttcgagacgagcctggccagcatggtgataccccatctgtactaaaaataccaaagaaaaataaaaaaataaataaaataaaaataagccgggcgtggtggcacatgcctgtagtcccagctacctgagaggctgaggcaggagaatcacttgaacccgggaggtggaggttgcagtgagctgagatcatgccactgcactccagcctgggcgacagagcaagactccgtctcaaaaaaaataaaaaaaaatctggaactttggtt

SEQ ID NO: 916327 - DNA, 4001 bp, Homo sapiens
tctccctcttgaccttcccttaaggtacctcaacagcccttaccctgggccagcctgcttaccctgcttcaagcctgctggaccatctatctgcttcctcctcccctcacttgaggactttctcatcttgggagaggctaagtaatttttctctgccttccctccctccctccctagtccctgacatcttctcacaggacttagggcaggaaatcatgctttctgggtagacccctttagaagaaacgctttacccatctcccaacacatcagccaacctggaataagccagagtctcagacaagaaagtgcccatttgggtcccataggggtcaagtgagtcatattgccaggtggttgttgggttggggtgtggatcaggaatctgatgcctccagtcacagatgccctgtgcctgggaaacttcatcttggtctcttcactccaaagccccaggtcctcttgctagctgcagccacaggcctccaccaccatatctggcacatccgtcttgaccacattgccattatgatccaggtagaggagagagaggggccttcgggcagtagggacacaacaggaggtactggcaggccaaggattgttggctttgaggaggctgaagacggcagaatggaaagaggcagcaatgcctgggctgccagccaggtggggagggcactgcccactgcagtaattcagctggtacccctcgggctgcagtatccagtcccgccatcccagttcctggaagtctacgtaatggtctcgcctgcaacataagggggtcgcaggctcacaggtgggggtcctcctcctggcccggcctgctccaggctcattggctcggatcttaagctctaggaagggctgctggtgtcctgctgtgtccaagagccgcctcggttgtccagtaactgtgctgttgccttctaggggtctgcagtctagttgcagtttcaggacaccagacttctcacccctcaagccactagagggcagagttaaggtatgccagcccaggttggtgatgtggtgctcagccaggagagtgcgggacccttggcgcctcctccttggtccccatcggaagatcctcaagcaaagagtgccaggaagggtggggagcacgtgcagccacaggcgggcatggtacaggtggtgggaccgaggagtggacaggtgaaaagtgagcagggagctgtaggctgaagtggagtctgcccgaaagacagaaaagggaaagaaaatgtgagtagagatgaagctctcctctgagactccccaagccctgcccactgctctccctcgaacctacctctagaaaagtagagactgctttgtgtcctctgcaaccagtccctgccccagctcctccttctcctgccacaccccactccctctgctgctcctgccaggctccccttctgcctccctttccctgtctgctctttgcctgttgctctctccctcacccacctgtgacagtagcaaagctgatgacctcctccccattccctggagccacactccctggctgtagtctccggagggctctggtcagcgctgcctggggtggaggatgagttattctgggacgactggtcaggtgcaacccatccaggatttgctgcttggctagctccagcaccagagctcgttctgcttggggtgccagtttggagcccccacaggagggacacacagaccctgtcccctgtgctcgcaccagtgcccacagcagcaccagccagagctggacatcagggagccgcatgctcctggtgaatggccctggttcaggagcctcggatggcagttgctccgtctgttgagtctgattgctgggggccaatgagggcacagtgacagcagacaccactgccacacctacccttggccaagggtacagccacctgtcttctattgtctgggactcaggaaggctgaaagtagatcatctgatggatagctgtgcttgaccctcacagctcatgtctggctactgacctggggcctctttagagccagctgcctgggtcttccaaacctagtggtcagccagccgacctaccctctgagtcccaggattggccagctgtgctgcccatcaggcccctgcagggggtggaggtcctcctccccatcagctcaggtttcaccatctggccatggtgactgggcctgaagtaggggtatgggggtgggggggtgcaatgtggacacgcatgatgcaagaaagaggatgatttcacatgctcagtccccaaggtctgggacttgggggagggaacgccttatgagccaggtggggaagggcaattttccctcatacctctagtctttctagcttcaccactgctgcagcagtttccatgaggcagctgtgagttccagtgggtattcctctggggcccttaggccagaaggaaaattctggtctctttatttctagcactggggctaggacagggatgagggtttgggcgggtaggagaatggagccctcttgctcaggcccaggtggcagtgccacgaggcacagaagtcaccccctgaccctgcctgtgctggccgcccagagtccagttggcctggagcatgatgtggagcatgatgtggaggagggccagagccggcgggggttggggcggggaacgtgttcctgtgatgtctggggaagcccagagaggtggtggtggtggtgatgcaatcttacacagggcagagtccatcaggactgtcagggggcatgacacttgggagggcctatacccagctgccacttctctttcaagggactgtgagagttgcctaaatttggggcatcctagaagtagtgccaggcctcctttttttcttacatttttaaaatttaaattttattttattttactgaggtaaggtctcaatctgttgttcaggctggagtgtagtggcacaatcatagctcactgcagccttgaattcctgggctcagacaatccttctgcctcagcctccttagtagttgggactacaggtgcgcaccaccacacctggctaatttttaaatttcccacagagacagggtctcgctatgttgcccaggctggtcttgaactcctgggctcaagcaatccacttgcctcagcctcctaaagtgctgaggttacaggcgtgagccaccgcaccacccttcaggcctgttaatgggggtagaaaatgggagctctaagagcttttgacaacaaagcaaggcaaatacagcagtcttggttcccagtctcagccctcctgaccacattttctcactgtctttattttattttattttattttattttttgaggctgagtctcgctctgtcgcccaggctggagtgcagtggcacaatctcggctcactgcaagctccacctcccgggttcacaccattcttctgcctcagcctcccgagtcgctgggactacaggtgccagccaccacgcccggctagttttttgcatttttagtagagacggggtttcactgtgttagccaggatggtctccatctcccgacctcatgatctgcccgcctcggcctcccaaagtgctgggattacaggcatgagccaccgcacctgacctattttttattttattttttatgtttttgagacagggtcttactctgtcatccaggctggagtgtggtggcctgatcacagctcactgcagccttgacctcctgggttaagtgattcttccacctcagcttccagagtagctaagtctacaggtgcgtgccaccacaccaaccacaccacaccacaccacacaggctaatttattttttattcttttgtagagacagggtcttgctgtgttgcccagggtggtctcaagctcctgggctcaagcgatcctctcacctcagcgtcccaaggcgctaggattatagacatgagccaccacacccagtcctcactggctttaaatggggggggacccagacccctccacattgaattcatgaagg

SEQ ID NO: 916328 - DNA, 4001 bp, Homo sapiens
atagtattattgcagatcaaaatgaaacacatcttttccctatcaaatggacaaacttagaattaagtgtgtacccataacaggcattctcagtcactgcttattaaagtgtaactgagggcacactttattgcagagcactctgcaagattagtgaaaagccttccatgtttctagtttatccaaagaaaataatcatatatgtgcacaaaaatttaagtacattcttaagagttaaaacactaaaaaattaaagcctaaacatccagcaagtaaaacattcaacaaaaatgacagtataggccaggcgcggtggctcacgcctgtaatcccagcactttgggaggccgaggtgggtggatcacgaggtcaggagatcgagaccatcctggccaacaccgtgaaaccctgtctctactaaaaaaaaaaacaaaaaaaacaaaaaaaaaattagccgggcgtggtggcgagcacctgtagtcccagctactcaggaggctgaggcaggaggatggtgtgaacccgggaggcggagcttgcagtgagccaagatcatgccactgcactccagcctgggtgacagaaggagactctgtctcaaaaaaaaaaaaaaggaaaagaaaagaaaaaaagacagtataaaagcattcataatcataaaaatatttgtaagttttaagtgaaaactgaatttcaaaatattatcaatacgttttttttcttttttgagatagggtcttgctctgtcccccaagcatagtttgctgcagcctcaaactaccagtgatccccccacctcagcttcccaagtagctggcacatgctaccacatctagctatttttcttttttctttacattttgtagagtcaaggtcccactatgttgcatagattggtcttgaactcctggcctcaagtgatcctcccagcttggcctcccaaagtgctaggattacatgtgtgagacaccatgcccagccaacgtatactacttttataaattaaatatgttgtatatagatgcagaggaaaaaaagactaaagaaataaagttttaaaaacagttttcatttttggtaggatttaaattgcttatctaagctttctaaaaatggtattatgaattattttattaatttattttattaaagtagtaaattttttcaaagagcagtcagggataatgcatcagtctaccgcaaacattccaaacccgtttcccctatttttcttgggaaaagctttttcttacaggaggaacggtcctgtcgataatagttcggaagatctccatccatgttgtcatggtttggttattcactagctgaagaggcaatgcatactggaaaagagaagaacaacatgaacagtaattcctcccatccaaaaaaatcagcaattttatctatattgtaaggctaaaatatatgaaagggctaacatttgagaatgaaaatagcaatcttgtatggttcaacctaacttaaaacagattcatacgaccatatagaacttaaatttttaaatttagaagactacctgccatgagttgtttcttgggtctactttttaaaaggaaaaacaaatgaataccactgaggtctcatttattcagcatgagattctaagtgagtgatttttatgacttacccctttgagggtcaaactttccattttaaccaccttgatgaaaatatttatttcattaaacactcatgaaacatttttttaaattactttcctctacactgtagcataataactacagtccactttgtactaaacagatatatggctcacctctgctgtactgtgagttgcagaagacggatattgcctccacatccattcagtacaaaacatgctacatgctacagacataataagatagacaatctttgccctcacgaagcttacactctaactggaaaaaatgtatataaagtcatgcaccacataacaaatgtttcggtcagtgacagactgcatatacaacaatggtcccataagattagaacacagctgaaagattcttatcgcctagtgacatagtaaccatcttaaagtcacagcacaatgcattactcaaatatttgtggtgatgctggtgcaaacaaacctactgaattgccagctgtataaagtatagcaattttatacagtacgtaactggtaatgacaactatgctactagtttatatttttactacacaatacttttcatcattagagtgtactccttctacttttttttttaagttatctaaaacagcctctggtaggtctttcaggagtattccagaaggcattgttatcatagatgacagctccatgcatgttattgcccctgaaatgaagacactccagcaggacagaatacagaagtggaagacagtgatattgatgatcctgaccctgcataggcctaggctaatgtgtgtgtgtcttagtttttaatgaaaaagtttgaaaaaaaataaaattctaaaatataaaaccttttaaaatatggatataaagaaaatattattgtacagttgtacaacatgttaatattttaaactaagtgttagtacaacagagtcaaaaagttaaaaattttaaagtttggccaggcgtggtggctcacgcctgtaatctcagcactttgggaggccaaggcaggcggaacatgaggtcaggagtttgagaccagcctggccaaaacagtgaaaccccgtctctactaagaatacaaaaaattagccaggcatggtggcaggcgcctgtaaatcgaggctgaggcaggagaactgcttgaacccgggaggcggaggtggcagtgagccgagattgtgccactgcactccagcccgggcgacagagggagactccatctcaaaaaaaaaaaaaaaaaaatttaaagtttatgaagtaaaaaagttacagtaagctaagctagggttaatttattattgcagataaattttataaatttagtgtagcctaaatgttcaacatttataagcatagactaacgtcctaggccttcacattcactcactactacctcacccacagcaacttccagtcctgcaagttccattcatggtaagtaccctatacaggagtgctttttaaaaaatatcttatactgcatttttagcatatcttttctattacttaccattgagttacagctgctttcagtatttggtacagtaacatgtacaggtttgcagccagggagcaacacacagcctaggtatgtagtaggctatagcatctaggtttgtgtaagtacactctacaatgttcacagagggacaaaaattacttaacaatgcattttctcagaatgcatccccaaagttaagtaacacatgactgtacatgtacaaaggtaggaataagagaagaaggtgaggagatgaagggctttatgggctatattaagaagtttcaaatgcactttattctaagtgcatttggaagccatttggatttgatatagggaacagaggagaagtaggctgagggttaggctgagcttatgtatagaatatccaagtgtcctgtacaaatattatgctacttagacaagatctgttgtatcatacttttattttatttgaggcggagtctcgctctgtcacccaggctgcagtgcaatggtgcaatctcagatcactgcaacctccgcctcctgggtttgagcaattctctcacctcagcctctggaatagctggaattagaggcacccgccatcatttctggctaatttttgtatttttctagagatggggtttcaccatgttggccaggctggtcttgaactccagacctcaggtgacccacccaccttggcctcccaacgtgctgggattacagacctgacccactgcacccggctgctcatacttttaaaaacaaaattgtctgctccttctcatattatcgctttttacttatgtcagcattgtaatagtggctcctaatgccttctaaatttctacttcc

SEQ ID NO: 916329 - DNA, 4001 bp, Homo sapiens
tctataacatcaactgtacttatatactgatgaatcagaaagaaatgaaggttaggtgaagggcagggaagtgtaacctgatatcaaaggaacacctggcctcattgtgagaagggggtcataaacaggccaactcccctgttcatattagtagactgcaaattcagctcctgctttgttcttcctaactaacccctggattactattcttccagccagccaacatacagtacttttactctgcaaagcctgggacaggtactgactttaacttccccctattctaagtgacagtccatttctttttcaggcaccagtgcattatctttgggcattagttcaacccaacctcctctccattggcagtgtcttcactctcccttttatctctggggaatcctgcatttatacctactccaaactccacctaggtttcctattaaaataatccctttcaaagattcccaacacgcagctttttaaagtcaattccaacagaaacatttacttaggacagtcacacttcagtcacacttcgggaggcacagaatcacctgggggagctagttaaaatacaactggtcccacccccacagtttctgattcgttaagtctggactgaagccccgtaatttgcataatttgtaagttctcaggtgatgctgaagctccaggtcctgggcaacgctttgagaacagctgattttggaatatttacattttacaagtcatcacaacctaaaacagctgttgctccatcccagtggtagctcttaatccctactttttagtaagaggtctgtgattcttaagtaccggtagggaagaagaaataagctggagtttgggatcattaaaattttgaagtgtgggggtaacgctggaaagacgtcaaggctaattaggaagaacaggagacggagaaaagaaagaagtcttacacattttagcattcataagaaatttctccaacacatcttactttgatgtgtcttagataaagcagtatcaccatgaaaactgcctattcttcccagagcactctcccaacagcactgcccagcgctccgcaaaactcggccaatcggtgtcaaaacagtcctgccaacccgacaggaggaggcggtgggcagcgtgctccacagcaacacctaaaaagggctgggtttggaaaaaagctgaactcagatttgaactgtaagtaaaattcccacctgctccccaagtccgcgcacttaaggaaaataaatcacaccctgaaaacactagcacaggttgcaaaaactgcttcttgcggaccaagtaggcagaacaaactgccctggagaagggagacgacacgaaaaggtgcaaaggtggccaacaggtgcgcgagctgttcggcaaagatcctgggagccctgctccactggaccggggggcagcggggtcggagagcgggaccagccgtgaggcgtcagccccagcccggtgggggtgaggacgaggggcgccggggagagggagcccggccagccggcaggggcgccccttcggcggaagagggtcgccgaagaccctctcctcacctggttgagctcgttctcggctgcaatccgcaacttcgggtcgatggtgcccttcagcgcctggatgatccggttgaggtccatctccccgggtgggggctccgcggcccccggaacagtaggccggactgcagctttagttttcttttgaccctctcagcctcctcttccgcgacccctggattacctcacaccccaccccccgccaccgtcgccacctgcggccacttgctgcgccactctgactccgcgccccctgtcctccctttttcccccccacaactcgctctccattcaccgttttacgacagccggtgggaggcgggagaaggaagaagaggaagcagagcttcctttacggcggcctcttcccccgggcgtgatgctatgaccgcctcccgtcggcggccgccatgctgctgtacggaaaacggcctaggcttctttcccggaaaggaacccgcgctcccgaactcaggcaggcggccgctatgcttccgtacggtaaacagcctcccgcctcttcccaggtgaggaaacttgagctggccgggagtctgcttacagctgcttccaaattaagcatatctggatggtgtgacactttttgttagtccgagaactgtatgggcatcgcaactgggcctgttccaagatagacttgttgggaccttcaaatcatgtaccttacaggaggacagggttcctccgtgtgtgggagtcatcgttcattcattcattcgctttcactgaacatttgttaaacatatatttttgaaccagagtactaggatttttaggtaccacattataacaagatgaattccatgcaagttaatgtgaaggaattcacaacctgatagatgagacaaatataaacaaaaaaaatttacagtgtagaaatgataggggagtgctgggaagggaagagcgtggtccctttaaatgatagggatgggcgaagtgaagtgctgggtagaggagtgtgtggtcccttgctagggctccacgcccaccgacctaggtgaggactgacactcctgccttccagcccaaatgttgcatttcccaagaccaccctggcctgccactcccccatactgtgcctatgaaaaccccagaccctagcaggcaggtacacaggcagccagacgtccagaggagcataagggtggaagaagaggagctcgctggcacatccgcaggccattcacgggcagaacgatgcggaggttggcctgggcagtcggaaaagagcccgggccgccaagcggcctaactccagaggaaaaccatttcccttctgggtccctcatctgctgagggctacttccactcaataaaactttgcactcattctccaagcccacgtgtgatccaattcttctggtacaccaaggcaagaacccaggatacagaaagctcgctgtctgtgcgacaaggtagagggtctaattgagctggttaacacaagccccctaaaggcaaactgaaagagcatcctgtaacacacacccactggggcttcaggagctgtaaacattcacccccagactctgtcaaggggtcggagccccacagcctgccggtctgtatgcttctctagaggtctgagcagcggggcactgaagaagcgagccacacccccaatgcacgccctgtgagggggacaagggaacctctcccatttcagaaagacaaaggtcacagaaactgaaaactacatccctgagagttttatgaaaaattttcagaccttctcaaaaatgtagtgaaaggtaagcagaaaagttatactgtttctatccactgtggccatatctggcgccacaatttcaatggcatgaaaatatcaaggagctggttcttcctgaggttaacccagaagagagggttctaattacatttaataaagatgatgatgtgggcaaaacacagctgaggggctgtgatcttttcaggagcagataattaagatagattgggtcaattaactgagttcaattgagagagtagaaaacatgtggctgaaaacttggtggcttgaaagcttccccctcagttggatgcaaaagtgcttcacagtgaatttaacatgtctaattgcttccagtattgcccctctttaatccattattcacactatcatcagaagaaagtttctgaaaagttaatattactatgtctcttccttgatttctcatcaatttcaaaataaaatataaacttagcactccagagtcttatgaacactatttcactaaaccactctcttggacatcatgaatgtctaaaaaattttttatctctgaaaatcttaactccaatatcctcttttataattagaactaattcttccatttctctcttcctcaaaaattctaagcttgttttccaattcaatcactacttcagttcttagtctatccatta

SEQ ID NO: 916330 - DNA, 4001 bp, Homo sapiens
gcacgatctcggctcactgcaacctccgcctcctgggttcaggtgattctcctgcctcagcctcccaaatggctgggattacagggacccgccagcatgccctgctaatttttgtatttttagtagagacggggttttgctatgttggccaggctggtctcgaactcctgacctcaggtgatccacctgcctgtgcctcctacagtgctgggattacaggcacgagccactgtgcctggcctatgtttaactttttaagaaactgccaactatatttcagattggtggtaccaattggtattctgctgtacctaccggcaacatatgaaagctacagtttgtttatttatctacatgatgatacttggtattgtctttttgatttttaaatgtctactcaactcttttgcccattaaaaaaattgagttgtcctcttattgagttataagagttatttttatattctatatacaactcttttatgacacatgatttgcaaatatttcctccatgtctgtgtctgtggctgatcttttcattttcttatgaaaatatcttttgaacctcaaagttttttttttatatatttttttgagacagggtttttcgctctgtcgcccaggctggagtgcagtagtgcaatcatggctcaccgcaacctccgcctcttgcgatcaagcaattctcccacctcagccttatttatttatttatttatttatttattttttgagctggagtctcgctctatcacccagactggagtgcagtggcacgatctcggctcgctgcaacctccaccacccgggttcaagaaattctcccgctcagcctcctgagtagctgggatcacaggcacacgccaccaggcccggctaatttttgtatttttagtagagacagggtttcaccatgttggccaggctagtcgcaaactcctggcctcaggtgatctgctggcccaggtgatctgctggcctcggcctcccaaagtgctgggattacaggctgagccaccgcgcccggcccttagcctcatttaatcatcacaagaaactctctgtcttcagtaggtacaatgagatcacatcttaaggatggagatgggagttaaattccaaagttaggataaaggcaaaagtggtgtaataaaaattacctaatttatttatttatttgagacagagtcttgctctgttgcccgggctggagtgcaatggcgctatcttggcttactgcaacctaagtctcccgggttcaagtgattctcgtgccttagcctcccgagtagttgggattacaggtgcgcctccatgctcagctaatttttgtattttcagtagagatggggtttcaccatactggctaggctggcctagaactcctgacctcaagtgatctgcccgcctcggcctcccaaagtgctgggattacaggcgtgagccaccatgctcggcaaaaacaacaacaacaacaacaaaacaaacaaacaaaactacctaatttaaacactgaagtgagattgcctgctcaccgaggaacgtatggccgttgggtgaaatgggaggggacttataaactcccctcccacccacagctcccatgtttgacttgaaataagttaactacgatatgactctgcttgactgttgtcctcctcgttttagggatgagggagtggagccatgaagtgggcaggtagaagggcagaatggaggccggctccctgcaggttgtggagcgaaaggtccagactaaggcaggagctgagggacagggtcctgaagctgagacgagatcgcagcgggggcttctaattcctcagggagccaaaggacagagggctgaaccctattccacatctcccccgatccgcgaccctttcccaactggctactcacctgctctgaccgctccaggtttccctagccacagttaccgccgcggtccctgcgttgctaggttacccgccaatctcagaaggcgagactcggtgtctgactgacctttcttttcaccattcaatttattgttccgctcagttgtccccacctcctgaagtctgaccaatcagaagcaccgccattttgacctttcaccaatggaaagacttgggactccctctgggttggactcaacgagtaaggcggggaacaagggaggagtaaggggcgtggattcttcgtcccgccccttcttaaggaggcgggcagggagtaccgcatcggcggcgggcgagacctgcggaaggacgtgatagttggccaatcagagttcatcacggtagcccagttagccagtaggacgctgtgaaggggaaatggggcggggccagcggggttgagaggacggtaggcggtggataggagagctggcgcagctgccctggtggcagtggctgaagtggcggcggcttcggcggctgcggcggctgcaacagcttcgggctcggggttttggcggcggcgccggcgggctaggctgcgcggtgcggaccccggcgcgcggtccgggttgctggggcggcgcgtgtaagaatccgagggatgcgacggcttggcccgagggagagggcagggatcaggggtcagaggacgcggagtaaggggttgcggcgcagcactctggtgtgggaggtgggccgtacgggcccagagggggcgcagggaagtctccaccgcgcttctctccgtccagcccgggccggggctttgcaccctctctcctcgcccccgacttcttagggcgaccctcacgtgggctcccagccaggggctgggagcacgtggagctggagccagctgtcctgcctccttcttcctccctccctcgctcttctccctggcgcccttaggtgaccccacaggagtcttgtgcctgggtcaggctgccccagcggacagcgggatggtagctgaacctcttcccctaggccctttccccagcgctggccagttgggtcctctgtagaggcagaagcaaagcccgcggagggaacactggaccaggacgcaggagtcccgggttctagccctactcctccactgtgtgaccttgggcaagtctcttcccctctctgggcctcatttttgtctgtctggaaaaatgacgtgtttgaattcaaatcaggggactggttctagtcgtaggtgtatatagggtaatggttaagcaggcagggtccctgattcagactgcctgggttgaaacttataaaaggcaagttaaccactccaagcttcaatttcctcattcctaaagtggggatattagctaagataggatttttcaacagcagctcagttgacattttgagccacataattctgtttcgggaggtctcacctgtgcattgaagcaagttcagtggcatacctggactccacccaccagcaatccccccactcccaagttgtgacagtcaagatgtctccagacattgccgatgtccccatgggggcaaaaatcaccccagttgaaagccagtgggcaaaggcagtacaggcaggcaagcagtcatatattaaacagttaaacaaccgtgttgaagcatttgaatgcgaggactttaatctatggtggcagatatcatgaaaattatgcatgaacaacccccctgcctctttttttttagctcatcattaatggtagtgtattttatgtgtggcccaagatagttcttccagcgtggcccagggaagccaaaaggttggacagccgtgagttaaaacatagaaaccactagccattatgataatggtaacattaagaaacctcttctctgtgagttaataaattctcctgccttcaaagtaaacatgggagataattgtcaaagctgagtaatggatacaaggaagttcacgtatatattctctgcacttttgagaatgtttgaaaatatctgtggtaaaaagttaaaccaaaacgacaatacaaccataattcttaagactgccaaatagtagtgtctcatctgggatttcctcttctgcctttc

SEQ ID NO: 916331 - DNA, 4001 bp, Homo sapiens
ccaagccagatcatgttagaccttcacctcttagatcctgtggttttgatcaacgtgctctgtgagctaccctgccctaacccaacttctctaactctaccacagatggtaaaagaaaatgagttttgaaggaatacagcaaatattcacaagtatctcccagacttaatgcacctggatgaagatgagattctcagctctacttccccctccccattcccttatgcatcaccattgtcaaggtcaggtgctgaccagggacaatttcccttgaactgttctttgtttagttctccatcacttgcctaatcagagaaaagaagcagacatggccacagcctttccagtacagaggagagaacatcccagacactttcatatcttcttcccatattcctagttcatggacctcctgagtgaagaaagagcttgaagttctaggaactgagaggttaacatttctctcaggacccaaggcaagatttcagtgatcaccagataaccgggaaaaaagggtttgcagttgctggccttaacagggagatttaaacaggcatggcatctgaataccaactccatctgccaactgtcccccatgtcattgctccctttcaacaacggccaaacaccctgtatgaaaaaccctccttgagttggaggaaaaagctgtaaccagactgagtcctcaagccatgcctgagtcctccattggtttgatgggatgttcccttgcacctcttcggctctgcgggaattcagaggaagggtgtccaatcaggtcagagaagagaaagcttccctaaatgagccactcctagctgtggctcccacttcaccagctaaagagccacattttctcttcctctgcctccagctcccttggtttcccacatcactcctgcttttcaggtttgtccccggcctcctggattcccctctaccccagtcctactcttcctgggccccagcctttttaaagctcttcacatgcctctttccaagccttcagcttttctcacatctcagtctccatgcaaatacttttactacccaaacttccttccaaattttttctcacttaaaaagattccttcaatggttctcttttctacagtttaatcttcactcgaacttcaacccagcctaaccccgtttaaatgctgtcagttcccagtatcaccaatcgcttaacacccacctccttcctcctttgctcctactaatggtctggttactcctttttgctccagcattccccaaaaccttctcaagcagggatatcgttccctcatttacccaaaatctcctttgcacacttctggcgccttcaggccacatcactccggtcctttagactcctacgcacccaacgtccccgtctctccctcacacccacttgcttcccttgctcccaccacaacagtgcccatctcctctccccgctcactcaggtctcctgctcaggacgcccttgccgagggcggagggggatttgtgctgaaggagggctccggcagcagcgcagcaactcgggggacgctccttctccttgtcagtcacggccccttgtgtccccagatgcttgtggggcgactggggtgtgtgagccctgctgccagggccccgctggggctgctccaggagctgtccgtggtgctgacgcggcggccgatcgggcgcgggatgcggcgcggctgctgagcgctgtccctggtcctggagaggttcctgggccctggcggcggcggcaggagcggtggccggagcggccggcagcggggccgatgacggggggacgagcccgggcggaggctgggcttgcagcagctgctggtgctcccacaggctgcggttctcagcgctcagctcgtccagccgccgctccagctcgtcgatacgctctcgctgggtgtggatgaggctctgctggttctgcacgatggccgtgagctccttgaggtagagcacggcgcgcaccggattctccagcaggctctccatgccgcccgccgccgcctgcgccctgcctgcgcctgggctggcggcggggagcgcgagggcgcgggagcccagcagcccagcggtcggctcgcctccctctcccaccggcccagcctccctccccccgccggcgccgcgtcactgccaccccgaccttcacacacgcatcgcggggcggggcggctgcgcaaggccccacccccaccccaccccctacctccagacctccccaactcctcgcctccccacctcgctgcctcttggcgtcagcgaaggctctgctgcctgcagggcagagaggagagggaggaggccagcgagagggagcctctgtcggggcgtgggaggaaagcaagataacgcaggcgacccgagaaggacggtgaatctgactggccagactgggaagtaggcgaaggggaagcagcgatactgggaaggtgcggtgggacctgtaggagaagagaaacagaaaagaaaggaagagaaggggagaggccagcagagaggaagcagaaaaagggaaggtggggccaagaaagagaaatgtgctggaggacaggaaggcgtggggccctgaagggacgcgaattcttttttcccaggtccaggccttccagaggctggggttcatctagagacctgctgaggaggggccacactcgcctcttttgctcgcagcaatctattctgccaggggattccctggaacacaagaatcctggggctctaagggaccctaaagagcgtctggtcctgctccttccttcatccgtgacgaaacttgggatgggaaggctgttcatgctgggtttcctctgggagtgagacctcaagacaactgtggcagttcctgatagaaacactaaataaacgaggtcctctgtggcaagggctaacgcttccagaagcttctgaatagatcattctatttgacaaacagttataaaatgcacactattaccaaacactgtgctagatggtggtaagagaagcatgactagaatggaatgttaggctttttgaagcttataaataagtgggtgaaattggtcatgattaactttgacgtatgatagtggtggtgagtaatcaggcagaggtttgcccagagtgctataggagccagcagcttggagatccagggaggcttcttacaggaagtgacccttggtgtgggaagggttttccataaagggaagacagcatgagcaaaagctcagagacattaatcagcaccgattgaatcattcattcatgtctacaataatcaccactcactaggtgcaaagtaatgtacagaatctatgcaagccacatctagcatagataataagttatcatttctataatcaagttgattccaatctcatagagtagatatgccatgcacatgaataagtaaaacacaactcaagatttctgtaagagctcttcaagccaagtgccatagagttcaggggagggagaggattcatttgactgtgttgatctgataagttctgacagaggtgttactcaagttgggccacgaagaatgggaaatatttcaacaggtagacagaacagggggccagatatgagaaagatacatcaggcagcagggaaaaaactaatgaatggaaatagagcacttggtttaaattaatttggcagggaaatatccctttccttttcttttcctttacttttttttttttttaaagtcttgtctgtcaccgaggctggagtgcagtggcaggatcatagcttactccatccttgacctcctgggatcaaggaatcctctagcctcagcttcctgagtaggtgggactacagatgcataccaccatgccccgtgaaggaaatgagttgttctttcctcttttataggaatgggatgggaaggaggaagggctatgagtacgcttcgcatgtttgttattgtgttgttccgttcttcacacacatgtccatcaggctccctgtcaaccttccattcccccagggtaggcata

SEQ ID NO: 916332 - DNA, 4001 bp, Homo sapiens
tacaagtacaggtggccagaagccagagtccttcaagtgaaagagccctgaggctttagctgacctcatgtgtgataggtcccatctgtggctggggctgagaaagccagtgggtccctagccaccatccaaagctaggcggggggtgagggagggcctccctgtgcccaaagctggtctggccacagcccctgcgctgcagggctcactcccagctccctctgtgttctcggagagcagtaacccaggtgaggcagggccacccgcagaaccatgaggagcaggaagtgccaggatcaggtatgttctcctgaaagtagatggcggaggggtgtcagtggactggaaggcaagggaagggaaggatggctatctgccttcaaatatttgaaagggtgtgaagtcaaacagggaaggagtcctgttcagagccccttagaagatgccggggtcagggtggggggtggtgaggcctctcaccttcaaagagcaccttctgccactggaagggtcccaaagtgacagcaaccaccccgcgtcgagccctcactgcgtgccaggcactcggcttgcctgacgctttactggcatcacccctgaattttcccagcaatcccaggagggtggtaccattcgtattccttattttacgaacgggaaacgcgaggctctcattgcttgagatcacacagctagtgaacgactgagtcgagattcaaacccagggccctgctcagaactattatgccgcaccgtaggctgaggagacctacagccctgggaattctaagactgtgatgcgataaaacacaaacataaacatgagaaggccaagataaggctgggagttttaaatttattttttttttttgctgaggtgtcttgggtacaaggaagacaggaaaggtggatgctgagtagaatttgtacctcggtgtcaccgtcctcatccccgacccctcctagccgcccccgcctcaatgtccccttcttctccaaggcaatctactcgcaccatcacactagccccggctgcggcccgtggaggccgaggaggggcgcgcacccagcacccagcacccggcccgaaggccgcggccccgatgctccccgggctggcggcgggcggtgccgcagcgccgaagccccttccgagccccctcgggccgggaacgcgggaggaggcggcgccctgcgccgggaggccccagacaccgtgggcgggcggctgtgcgcgggggttggggcgcggggaggcgggggcgcccgggccgcgcttcccttcgcgggtgactcagcagccgccttcctcagcggggcggcgggggcgcgcggaggctgtgggcacgcggcttccccgcgccggggtgcaggtcctcgccgccgcccccgcgaggaagtgcgaggctggacgctgggagggggcgcgtgggccgggagattccttctcgcctgccggctgccagccggcccgcccacgccgccgagatcccgactccacgttccctccccacgtaggagtcggggcagcgcacggaggcggaaaggctttccccaggctggcccggcgagggtcgggggcgcagggactgaggggacaccccaggggggccagctgcacccccgccctcccctcctgctgctcccgggttttacgcactcacggtcggagggagccggctggagatttctggggtcttagatgtggaagtccgtgcagaatttacctcgttctgccccagggcccccgggtacctgccaccttttgttcttgaaagggagagatgcccctctgctgagccagctggagcgtcctttctgtggctcttgccgtgtagaagtcttttttcgtatctaagctcggtccctcctgctgcggtgacccccagacagctctgcttcgccagactcggcgactgggtagagtgggcaagaaggaggaccaagaacgtccccactgagcaggaggggaaatcaaggcccagagaaggggaggggcttccttcaagcttatagctgggggtgtgtgagagaggtgctgacctcagtactcaggagttccggcttctaggtcagagtccagctgcttgaaaagataatattcctccctggtgctgcccagcgcagtgcctctacctgtctctggaaatccctttggccttctctgatgggttcttaccatgcgttaagtcgcatcaagactgtcggagatgccagatgatgccggttcggaagcatccagggtaaagaccgggctgtgcgcgggaaacacggaggctagacccaagcaggaaattcccacccgctttgcagagtttttgtagctgctgtttttaaataatcattggttgatttgatgcattgaatgaaaattgtggtagataggaatcattcatcaaggaagaaattgtggaactcccttgtctctctgcctgggatggggcgtgcattcctgattggaggcaggtggttggctggtttgacctggtgcatccaaagccctgagaggtcattggtaccaggccctggccacagctaggccgagatatcctgcagggaaaatcacactacagctttgtgtgtgtctggccgccccgtacctgagcttccagacactatacctccgtagagttcagtggcacagctcctgtacctgtccccttccacacagccttcttcccaggagctcacgcctctggggcctggtctcccgcatgctccagacagagtgggtatggaggcgtggtagatttgccccattttacagaggggaagaaccaggaggatctggctagccaatggagatgaaacacttcatgcagagaaaggaaaaggaactgggagtgctgatggcgtgaccaggccaggggtcattgggagatactgagataaagctatgctgatctttgctgtgaagcctatgcatctttagtatagtgtgggttgtcctccaactcccccagcccaagtcagtaacacacagttgcccacgcagtcgtgcccactcaggtccacaaacgcctgcgcaccacctgctcaccgtcccgtcacggtattgacacttccctgaacacagctgatcctgcctggtaaggggcctggaatctgggtgctgctggttcatgaccccggaatccagctctttcctctcttttcccccagagatacggccacaatgccagcctcctttccctcctgccttcataggcccattgcccgtttctcactccacctgctgaggccttgtgtgtgtgtgtgtgtgtgtgtgtgtgtgtgtgtgtgtgtgtgtgatgaaactctcactgcagagatttgttcttaatgcagcttcctgggctgacagagtggtcagaggctgggggcagagggagtagagggctctccctgctcatagctaggattggggtcggttctgtttattgccgggggcagtcttctcctcacccctcatccgtctcacaccccaaccagcctgaagaactgaacctctgagagcagctttccgcatgggctcagcttcaggacagtgagctgtgctgttggacccaggggtcctcccttctgcccaactcttcctcagccctgataccacaacccacctccactcaacaatccatgagcctgcctgggccctacagacggagagtttatgtattcaaccagtatttatcatgcaccttctaggtgttgagtttgactctcatctcccatccccttcaggctcgtgcgacaccaacctctgctgcctgccagctcttcctgcccacatcttcctgccccatagcaaaccccaacagagtcatgtgacatttcaccatccaaaaaattattttaagatcctagaaaggagcaaacaagcttatcacacatcatgatgctctttaacttcttgctttatgtcttccacacatgaagttcgttggaaaagtatcccttctacagcccaaagacttactattccatgaccagtcagtggaagtgccctgtgtccctcccctttc

SEQ ID NO: 916333 - DNA, 4001 bp, Homo sapiens
aatacccccttttaggtagctcaactacagcttccccatatcaacagcctccaatcaggacacagctgaagccttcttctcccaccctcctccatcctctgtctgcttttgagtctctgccaaacacaagcaatggtgctggctcccttgctttgaaaaaaatagcttttgtttgttctcatttgggtggtcctcattcattttcaccactaggaaaatagggctgcatgcttgaaatggatcactgaattgttctttgatgccagaaatgtctgtactttagggaggctgttagatgtggccagaaagaacacagcagtaaggggagaagtgtagagtagctggggttaaggacataagccttggatccagactaccatggttcagatcctggctcttccatttccagctggtgaacctgaacaagttacttaaccaatttgtaccagtttcctgacctgttaaaaaaacactggcgatgataatgactcacagagtaattggagaagttatatgagacaagccatgtaaagcatgaatatctggatttcaatgctatcaacagaaagagagagaataatctgcctcactaatttaccacacccacctggccccattcaccaacattaaactggactaaaaacacttttctttctcaaagtcagtaactctaggaaatcaacgggtataaatactgtccacgccaaaatccatctcaaaaagatctgatggggaagtgaccttatccctcaaaatccctcaaatgcacactggaaatctcgttttctagaaatcagacttttttttttttcttaagggccataacttaaaattacagagcttaaaatatataaacattttttgtataaccagaagcccattgctacaattcaaagactgtcaccatactgttcatcagtaacaaagaaaactctcctcttaggccttctgctagtcctggtaagaaaaatcctatttcagaccattaaagctaagttattttgacataatcatgattcttttcaataaacattaaacatgacattgtggaatatcaaatctaaccaaaaatgcctgtacttaacaaaacgaagatttttgtccgaattatctctggctacactcaacacttccagcaggcagttgctcaactttccaatgtctgcataaaatacagttctgaagccaatttttttagattaaaataaaaagccaccctttagcataaaccttcattcaacgaaattgggtaaataagatttaattaagaaaattaggagccgcgttcattgcaaaccgtagtttactttagcatttcacttgtaattaagttaggggcttagggatgcattgaaaacaccaaaggataagtatctcaaagttctaaaaatgtctcaatactaaaatgatgttctggggtgattttgcaaggaccagaagacatcatacattgcgaacccagtgagggtggcatcgcggacgaacagaagatgctttcacgctggttatctgtctttcccaggcctcggctcccttgactttgcagcgatacccaaaattctttgaaagagaagggagggaaggcatctgggtcccagggagtctctgcatccaacccaggaaaggagggggccggctccctggcgggaacttcccggaggccgcgccagccccgcgagggaccccagccatgcagggcgacgccgagcgggccccgcggcgcgctgggctcccccgccgcccccggccggtccccgccgactcacccaggccgcgccagcccagcgcgccgtcgcagctgtccagaacagcgcagagctctccgagcagcgcgggcggcaggtcgaacagcagcgtgtgcgccgacagcgcgccgcgggccccacagttccccgccatggctcggctgcccgagccccggggacgaggcggagtccaggtccctgcacgcctgcgacaggccgttacacaaccgcggaaatcctgcttccacgacggcagcagagccctaggaacacgccgttctccggtcactgcaggggcggtgcccacgtgacgcaaggcgcgcctcgcccgagatgcccctgcgtccgcctggccaggcctgggggttacccgacccgggttctcccttcgctggctttgcgccccttcacacctctgcggtggggacggagctgccgagacaagcagagtgcgaactggagaaagcccagagctcagagctcccaggagcccaccgtgccccacggctaggcggtctcctggtgtggacggctagcggtgtcattacttcttacaaaagtttatttttgaaagcttctcccttccttccttcttcccttcctttcttttcttccttttttctttgttttgagtcaggttctcactctgtcgcccaggcaggagcgcagtggcgctatctcagctcacggagcctccacctattgggctcaagcgatcctcccacctcagcctcccgagtagctgggaccacagtcgcacgccaccacgtccggctaattattttttttcgtttttcgtagagagggagtgtcgttatgctgcccaggctggtttcaaactcctggcctcaagcgatcctcccacctccggcttcccaaagtgctgggattcggggtgttagccactgtcccggactacttcttttttatcctgtcagaaaaactatccatgttcatcgaggaacacttggaaaacccagaaaaaaactgaaaaaagaagataatcactcacaaccccactcagcccatcacactctaaaagttttgacacattttcctcccaacttttactgaatttaaacagataaaaatgtacatatatgggattattattggaaaagatgaatgtagataccaacaagagaaaaacagaaaagacaccaaatcagcgtaaaattatgttcgttttcttcacgaggcggcctctcctccatacacctacttggttttaataaattttcttcctcatgggcttccttgatgaaatatcgttccatcattttttccttcctcaaagtgcttcacacaatcttcctttttgccttcaacatggagtttaagtaaaattgttgttttgaaatcttcacggagtttaagtaaaattgttgtttcaaaatcttctaggtcacatgaggcatgttaccagtgacaaaaagttgttttgaaagtggtgagaaaaatctcagccttagtgactggaagagtgggcagtggccatcaagtgaaaacaccagaggtgttttgaaacctctcagattgtagtctttggaatagctgcccctagagatcacgagtgatgaaacactatcatttcatgcccctacctgaatggttttgccagcgaaaatacttcataaaaatgtatctgaaaactggcaaagcccatactgtgtgggcaagaatttcgatatcccgttgttcaaggttttattgtcaatctgtacacactgtacacctacctaccttccttccttccttccttccttccctcctttcttccttccttccctcctttctttcttatttgttttttttagtcgctctgattgcccaggttggggtgcaatggtgcgatctcggctcactgcaacttccaccccctgggctcaagccatcctcccacctcagcctccagtacagctgggactacaggtgcatgccaccatgcctggctaacctttgtagtttttgtagagacggggttttcccatgttgctcaatctggtctcaaactcctgggctcaagtgatccacctccctaggcctcccaaggttctgggattacaggcatgagccaccacacccggccctctatacatctcttaaagggactacctgaacatgctgagcaacagaggcaaaaggccattaattatttggtagcttttgaattgctactacagggaggcaaactcactcagaggaaacaggaaatcactgcagatgagggaagcaatcagaaaggcctgctttacc

SEQ ID NO: 916334 - DNA, 4001 bp, Homo sapiens
ctagatactgctccaggcccctggagatgaagcattaggaaaattagagaaaaaaaacaaaacaaaaccaaaacctgaattcatggagtttatattctaatggaggaaggaaggcaataagcaaataaataaactctatagtatgttagatggtgccaagtgaaatgaaagaacaaaacgaaatagagaaaaggttgtaattataaatatggtagtcacaggaagcctcaataagaaggtgccatttgattaaaggtcaaaaagaaggagaaagccagccactggactatctgtgggaaaagtttgtggacaaaacgaaatgtaaatgcaaaggttggaactgggcccactgggcaacagcaaggacatggtgagactgcagaggagggaacaggcaagtagcagatgaggtcagaaaggtaaaggggccaggtcttcaagggccttagagtttttgtattgactttgtttatcctctgggtgagatgtagatgctggaagttttgagaaaagagacatgctctgtactcatgtcttagaaggatactggggctgctgggaataaaggatgttggagtaaggacagagaagcaagaaagaagcatttaggagagcctaccaataagccaggtgggacgtgctgcaggctgggaccagggtcgtagcagagcaagtgcagaagtcctaggattctgaggtggagccaatagaaagctatgggctgatgtggagagtgagaagacagcataaccaagtttaccgatatttactgagatagagaaggctgaggaaggagcaagtttggcctggaatatcagaagctcagtttggagaggtagaaagcaaacttcaaatgaacgctctgcaggaaaacagaagaaatttgaacttcccgatagccctcttcaaggaccactccaagaaagggaaaaggcagattttagtatcctctgcttaccaggggccttgggcagttacgtttttgaagcactaatagcgccgtttgttcccattctaaatgctcaaagtgctttctcgctttctcagggtttgcttttttttttttttttttcttttgagacggagtctccctctgttgcccaggctggagtgtagtggcacgatctcggctcactgcaacctctgcctcctgggttcaagcgattctcctgcctcagcccccggagtagctggcattacgggcgcccgccactatgccagctaaattttgtatcttagtagagacaggggtttcaccatgttggccaggctggtctcgaactcctgacctcaagcgatccgcccgcctgggcctcccaaagtgctgggattacaagcatgagccaccgcacctggacagggtttgcttttatccctttgtctccctctggcttccaagctgacaggtacacttttttcccccatctgcgaatgtactcatctgatcccataagccgcctccactttctaattccctggaagcttggaggccggagaaacaagcgaattacaatcgtgtggaggctcagcgagctgctggcgccacaggcatctgtcaggtgctggcctgacttcctggttctggggaaaagagacttcatttcgcagtcgggttcacggaatccagggcctgagaggtgagaaacttgaggtccgactgcgccccagaacagctgggtgacgtccctccaagcctcaggctcttcctcagggccgacgaacttcttgattaccggggacctacccaagtctttcttctggagtaagctctgtcaaaggaacccacttcctctctaacttttctcacggatgataaagagatttccgttccgcagccgaccccagcaaccctggggcagaggtgccgaggcctggaagcggacctcggacgacgtttgaccgaggcattaaggcggggaatgccttacctgcccgggcgcgggctgctgaagccggcgacagaagaaccagccgaactaggaagcgccgcgaaggggcggggcctgccgggttggccccgccccacttccccgatgggcttcatcttggcgcctccaggcggctccacaaagtgagaaactccacgtattgcgtagggcgcgtctttacgtgggcgcctgcccctttaattacgcccctgtcggaggctgaaacacttaaggcttccgggcatgcgcacagcgttgtgcaaatgaatgccttccactgaaccgaggtagacggggtcgagtttcttgcgcgatggtgggcttgtatgtgtgtgtgtgtgtgtgtgtgtggggggggggggtgacgaggttggcattgaggatccataccctttgcgcccaaagaaaggtgacgtggactagtgtcgtgcctttggacaggcagagtaagaggagggagaagaaacaggtagagctgctggccttgtcggggacacctttggacgtgctggagggcaacgacgccctagttttctgtgaagttaagtagcttctgcaggactgggttcagtatttctagtaccttctcaggatccctcctccgccaacgaattcctcaaccacgggccaagcaaactactcccccgcccactgtcagcagcagtctctgttgaatgggaatactgcaccttcaggcttaacgccacgtgggctcctttgctgtcctccaggtcagttccactcttctaccaggatgctggaattacattctccccaagtttccctacctgtttcacttgcttagaatgtctgtcttcctccttttttctgggagaaagaaaagatcattattctttcagggccaatccctacagctatgttcttgaccatgctgttttgtttttgaactcctctaactgttactccatcggatacatcttgctcatttccatcagaatcatcttacaattccaaaagcatgttttggaattgtgtcacttttctactcaaacactaacagtagccatccattgaccacccaatagattctaagtccttgtcagggcattcaacatcttccataatctggtactaactcagctacattttccagcactgtagtctccctgcattcccatccccactgctctgtatctggactgcttgtttttcttgcacacattgcatgttttgtttgtacattacttgtgaggtctctgcctcatttctatctcttgaactatggaggacttagatggccacttcttgcattatgcctcttctaattatcttccacttcattcctacagctcttattttgtactagttatttcatttatttaacaatagtatttattgcagacctaccatgtgcttgacactgttcaaaatgtgtgatcatcagtagtaaataaggcagacaaggttactcctcacgtggaactaacattctctttggaggagatatacaataaataataaagaaaaactttacctagaactgctatgcagaaaattaaatagggttttgtgaaagagaatcacttgctgggcacggtggctcacgcctgtaaccccagcactttgggaggccgaggcgggtggatcacgaggtcaggagttcaagaccaccctggccaatatggtgaaaccccatctctactaaaaaaatacaagaattagccgggcgtggtggcgcgcccctgtggtcccagctactcgggaggctgaagtaggagaatcgctcgaactcgggaggcggaggttgcagtgagccgagatcatgccactgcactccagcctggacgacagagtgagacttcgtctcaaaaaaaaagagaatcacttgcaggttcctgtagattattggtcaggaaaaacttctctgaggaaatgaatcctaaaagatgcagctatatgattggggagggaacaatttaaacaacaggaacagttagcacaaaactattgaagaaggccagagtagctggagtatagtgggtaatggggtaaaggtacaaatgagtttggagaataagcagggtccctaatcttagatgtccttggaagcca

SEQ ID NO: 916335 - DNA, 4001 bp, Homo sapiens
tatctaatgtaggggccttttgtgccacgttgatttatggcattctttagttgtttctcgagtgggagtctcacgtctgggggactttgtgccaccagacagcaaggggctgcagactatgaatctatccctccttccccgccaaaaaaccccccaaacaaaacaaaaacattacgcatgttggttacaagcctgactcccctatgcactcctaaagcagtaacagaaacggtctcctcgtgctggggcctatgtgccaggaaccatgccaggactccacgcacagtatcctttgtaagggacagctgagagccccccatttacacctggggaaacaggttcagagaggcgcagtgactagcccaaggtcatctggccagggcagcggagtggctgaagccggagcccgctccgggggtgtgtctgtccctggactcagaaagacaagtcccaacaggaccctgcctcctgggctgttggcgaatttaaaattgggacgcacgaagtcgcggccagcggcggggccccctggaagtcgccgcccgatgagcggtaactgttgtttatcagttgcagtgagcctcactgcgcagcaagggaaagcgagtcagggcaaagacgtgggaggggacagctcccagtcctagctgcgcagaaccccgcggccgcccctccagcccaggcctccgctgagtcggcattccgcgcgtccctcttttgtccctaccttcttgtgatagagtcgggccggggccgacagctcccgggcgggcaggcgggggctccgcagcagcagagccgatgccgcccgcctcagacggaaagccccagccgccgccatcttgccggcttgcgcctgcgccagtccagagcgacgccgaggggcggggcgcgtctgcgagtcggctccgagctgggagcgcgcctctctgacgtcaccgaagctttgcgcctgcgctttaccgctccgtgcacgcgtccgccttctggccccgccttgaccacgcctctcgggggcgggcggggtcgggagcgggaaggtctgaagtcgctggagggcttgtcctgggtgctggattctggttgagacaggacctcagggcttctgcagtgtggggctcaagttcgctttcacaaatcccgctgcgggaatgcggcgcagaggagcaccgagtccacttttcctaaccctattttgcagctaaggaagccgagattcagggcagtttagtaagtccgtccaaggtcgctaaggacttatgttcaattagaattcgaacttgggtaatcctgggttagaatcctggttcggttccttcctggctgtgtgtccctagacgaatggtaccggctcgctgagtctgaatcttcccttttgtattaattcgaggacaattgcttcatcatgaagccagcatctgtgtcgagtacctactatgtgtcaaggcgctctactagacccggggatccaacggaaagcaaaacagacataattcctgcccattaagcctgctaatgagggagcaaggtagagatagagacacacaccaatactttcctacctcaaaaatgggaagcttaagaaggaaacgaataccatgtcctgattgaaaaaaaatgaatatgtctatttttctctctaaaacaacagcaaactcaatttatatgtcagtgcctagcaattaagaatttctaaagaaatgcgtattaatgtaatttactgttggtttgcagtatgtgatcttataaaaccggaaaactcacgtgtatttaacgtctactaggtaccagacgtttacataaaggggaggaatctgggaaatggatttttctcttgaatggtgaaatcgatccttccccgaggacctgcagttttctttgcgtttgaggcgcagttgctggggagagtaaacccaagcgccaggtcacactaggcgataagtaaggcatttaatcgaagaatcactttgaccttctcaagatggcgccaaattcttcactacagacatcactctcgctccatgacttcctctatggcttccacttcctgcccaaagacccaacttctgtccgaagttgtgacggaacgcatgccattataatgagtttttatatctggtgggagcttttacagggtataaaataatgtgaatttagtgtatgtggagattttcctgttatctaagttcccagtttctctttcaatggcaagaaaacgggtttttgataaggcgcgcgccgcgggcagcttctgcctcagcgggtcttcggcggccgcgggaagacccgagagtcattagaagcgcaagatggcgactgcggccgaaacctcggcttcagaacccgaggctgagtccaaggctgggcccaaggctgacggagaggaggatgaggttaaggcggctaggacaaggaggaaggtgttatcgcgggctgtggccgctgcgacatacaagaccatggggccagcgtgggatcagcaggaggaaggcgtgagcgagagcgatggggatgagtacgccatggcttcctccgcggagagctcccccggggagtacgagtgggaatatgacgaagaggaggagaaaaaccagctggagattgagagactggaggagcaggtgggcccgggggtgggcagcgggcatcttccagtctttcaggtcctcgggtccccatgtcctggcccgcctccctagtcctcggcggcgataaagccgccaaggctgcaaacccgcttttcgtgacagtagctcctgtcggatttgagtgcttactgcctgcccattgccttgcaaacgttatctcattgaatcctcgccacgaccctgtgaaggaagccctgttatctatccccattttactggaggaaactgaggctcgtggaggaaagtttcttgctcaagataacacttcctgcaagtcaggccttgtactttgatcccattccagaactcccactcttaaccacacgtccaacagtagaaataaactcattcgcaagagagtgttattttgttatgtaggaatgacggcgatgatgaaacttgtggtaagaaaaatattgaccgcgatggtgataatagaaatggaaaggtttctggttctggaggttaaggcctcagttctagctgttcaactcttgtatgtgcttgtaagaatttcttaatttctctcaccctctcgacttccttatctgcagattgggagcaacaatttctgcataatataattgttgtaacagtaactatagctcagtgcctagcatctagtcataacatggtctctcacttgtaaccttatgaggtggtgatatctactgtataatccaggatctcagcaggaaataggtggcacatttaaattaggatgatctgagagaaactcaataaaggtgtgggtagggaaatcgggagtgaaggtttagtatcccatagctggtaactccagaacctggtgtccatctttgggccggaaggggtgaagggtgtgatctgaattgtgtggagagggcacctgagacctgctgataactttgttcaagggaagcagccccagtttcctgtcaaggattgaggtgggggaagaaataccctgacctctctttcttcctcccaccaaacttctgctggtgcctcctgctgggcagacccatctggaagctggagagccaggaaacctgtgcatgaggtctatactcggggacacagggcagggaggagagggtagggtgttttttggagggggcaaacagaagagatggagcacattctctctttttttttttttttttttttttgagacagagtctcgccctgtcacccagactggagtgcaatggcaccatctcgtgtcactgcaacctctgccgccctggttcaagcgattctcctgcctcagcctccccagtagctgggatccaggcacgcaccattgcgcccggctgatttctgtatttttagtagagacggggtttcaccatgttggtcaggctgctcttg

SEQ ID NO: 916336 - DNA, 4001 bp, Homo sapiens
ctaggctcaaatgatccttccatctcagcttcccaaagtgctgagattacaggcgtgagccatcacacccggccagtgcctacattgttctaagtgttgagaatatagcagtggaaaaaacagattaaaacattcctacccctatggagcttatagtaatggagcttacaactcaggtgaaaaaaaatggtagtatatctaacattgcagaagtgagtgtgtaatagtgtaattctttcagataagtacaatttcaaaaaagctggtgctataaacctataaaaaaagggaatgcttttaaacaaagaaggcaatcagataaaatggaaaataatgtatatctgaaggtgctttgtcaatttactgtttaaaagtatggcctggtgaggttgcttacacctgtaattccagcactttgggacactgaggccagtgtactgcttgaagccagaggtttgagaacagcctggttaacacagtgagacctcatctctacaaaactttaaaaaaattagccagacatggtggcaggcacctgtagtcccagctacgcaggaggttggggcagtagaatcatttgagcccaggagttcaaggctgcagtgagctacgattgcaccactgcactccagcctgggcaacagagtgagaccctgtctctataaaaaacaaaaaaattttaaaaattcctcctctaattttctcataaaattggactgcttggcagttcatgaagaaacacgaaagcccagaaaacataacacaaatttatgagaataactctttcctccccagagagggtagagccaaaaaaggcctcataagataccttctgcatcacagcactagggggcggtgggaaataagtacaggacagttaaggaactgtgaagcagggaggccgagtaggaagatagggcagagggtagaagggggcaatacagtgctttgcattagaactatgaaatagatgataaatgaaaagataaagtctgcaaaaaaaagagcatcagacactattccctttaatgctccaccggagaatcctctccatactttagtcaatgcatctcattacattttattatccggtgactattacacagcttgattatgagctatctgaggactggaactctctcgttcatttttgaattcctagaatgtagcagagtccttggtgcataatgagcagttcagtaaagatttgcagaaaaacagaataaaatactaacaccaccaccaccaccactaacacttaagtgagcactaaactgtgtgccaggcattgttttacctgcttgacctgtggtaatttatttaaaaaacgagaagggctgggcacgatggctcaggcctgtagtcccagcactttgggccaacatggtgaaaccccacctctactaaaaacacaaaaattagtcgggcgtggtggcgggcgcctgtaatcccagccccttgggaggctgaggtaggagaatcgctcgagcccgggaggcagaggttgcggtgagccgaaatcaagccactgcactccagcctgggtgacagacggagcctgtctcaaaaaacaaacaaaacctcccaaggaacaaaaccaaccacgaacactgaagctatcaataaagtttttctctctagcgctccaaactagccacagcgcgcatgctcacgctcacgtggcacgctcgggcggcctcttccacttcccttgccccgtccctgcacagatccaggctgtctcttgcggtgcgcatgcacctaccgtatcgttatcaacgtctccgaggcagattgcgtgcgggaagaggctcccgctgaactccagcgccacgcgctgcacgtagctaactgacctcatggcacctccaagagcagagggagcggagaggcccagtaaatattccctgaacccccgtcgcgacagccgccagagcggaaggccacctaaggcagcaagttacgtcactgcctgaacctccaatctctgcctcttcctcctttaaccttacagaggaggcgggtcttccgggcttggaggcgggcttcccaactctgatgtgagtgacaggcccacgggccactccttttctccacagggctgcagaccgtgggtaaaccaaccctgacgggggtcgatctgttcccttggcaacagggctcccaagggcttgacctaataaccttgacctttttcctttgtttccctggcaatgaagattcctagccatcagaccattcctgagaatcttactaatcttcgtaataactgataattgcatggttttgaaaagtgtttttaaaaaactacccattaggagtgaaaacaatgtagtgagttgcaatcagcatataaaaaattaaatacaatagtaatataccaagtgactcccaggtagtaaggtaagtacagtttttgtgaaactcttgtttcaattgtatatacttatatgtgtatactggcttataatgtaaaaaaaattttttttttcagtgtatgtgttttctggtcaatagtttaaaagccacctgctgcaaagcacatttcacatatttcacataattagttcagccactatgcgagctttttttttttttggctgaggaaaacaggttcagcaagattaagtaaaatggcagaaggaaggattgtggggcggggtgcgtgctcaaaccagaattgtttgatcccaaaccctagggcctctccatcatttactatcatagttcgtaggagagtcttcaggctggaagtgaaggttgcctggattccggatctgctctgtcttgtggccccccagcacaaagctcttgcatctcaacctcagtagccttactcttgtagcacagatgggactgtcactctcatggctggcttcttgggatactttctttccatgttgaatccagttctgcctttctttggggtgcctcgtcaatcagggcaatatttatgaaatcatacaggtgttcaatacatttttagatttaggtctaaaaacccaggctgactcgcacttggtgtttcaaaaaaaaaaaaaaaatgattctaccttatctgggattttggaccaggggctgttcctttttatcttttttttttttatttttatttttatttttttttgagacagagtctcgctctgttgcccaggctgtagtgcagtggcgcaatctcggctcactgcaacctctgcctcccaggttcaagcagttctcctgcctcagcctcccgagtagctgagactacaggcgagcgccaccacgcccagctaatttttaatttaatttaatttaattttttttttttttgagacggagtctcgctctgtcacccaggctggagtgcagtggtgcgatctcggctcgctgcaagctccgcctcccgggctcaagccattctcctgcctcagcctccggagtagctgggactacaagcgcccgctaccactcaaggagaattttttgtatttttagtagagacggcgtttcaccgtgttagccaggatggtctcgatctcctgacctcgtgatccacccgcctcggccttccaaagtgctgggattacaggcatgagccaccggcgcccggccgcccagctaatttttgtacttttagtagagacggggtttcaccatgttggccagaatggtcttgatctcttgacctcttgatctgcccgcctcggcctcccaaagtgctggaattacaggcgtgagccactgcgcccggccccttttttctttttctttcttttttttctttgagagtcttgctctggagtgcagtggtgcgatctgggctcattgcaacctccgcctcccaggctcgagatcttgtgtctcagcctcccaggtaggtgggattacaagcgtgagccaccatgcccggcttgtccctactttctatgtctgtacatagtgggaggaggctggagggcaagaccttttcttgggggaagggggtggcagattttttcctagatgtcccagtggatctg

SEQ ID NO: 916337 - DNA, 4001 bp, Homo sapiens
aatttaggggaggggggagtaaagagaaggttaaatgccagacaactagatactctgatctgcgggaggagacctcatccccttcctccttccctcttttctactccattagggctgtgataagaagtttgagggaacctgggggagaccaggcctggcagaggctccaggccagggtgatgatgcaatggggtttgggcaaaaggccaggggggtggggtgggggttgggtggggaccttgaatagcccagaacaacagtcggggcctaatcatttttcttttctcccatccccaagtcctccagacaaaggagaatttgcctttctccccagttgtattagctagattaaccccttttctccaaaaactatagggactgagtagagatcagttaactgtctcatgtgtaaaaacaggtcgcttctgacagaattcccctcaaaccctgagatcctggggttggggtgggggtgagcagtaggaagctcccagctcagagatgtagaagaaaaaggattacaccagtcattgtggaggaccaggaatctggcatctatggcctagcccaggagcaaccacctacctctcttgcttcccaatctccccgccatcccacatttaaacagacacccttggttctaatgttgcttccactctaactcctgtttcccaagcctgtcagtaccccattttctaggcactcggggtccgggtctgcttatcactgtgctgagttgggaataaggatcctcctttgagatttccagggtcctgagtccttcattctgacgttcttggccccacggagcccccgtctccccagcttccgaccccagccccagaagtcccggtctcagcacagctccagccgaccagctacaggaaaccagcttttctcttcctcccaagagccagaggaagagggaaaccgcccaccccccttcacgcgcgcacacacccctcccgacacatcccagcacccgcccttggctgagttcgcccccagccccagggccccagtgccagggtccccgcactcgcccccagttctcggatcccctcgcctgaacagagattgggggcggagggaggagtaggagacagaggagaaaggagagggagccgccgtcctctctcgggtctttccccggtctgagttgaggggggaggggaggatgaggctggcccccatttaaccttccgaccccctcagtctttgactttcctcctactacacgtagctcattcggcttctacccgttctctcgccgcacaatggcccctacggatcccgaggtctcctggagcccccaaaagcccttcccggcctctgcgccccctctgcgcccccacccgccccaggtcccagcagcccacagacttcagccagagaccctcagctctccattcacgcgctctcctctcccttggcccggagacccctgcccagacttctccagctccgtgtcctctccccaccggacacatgtctccccactgatctcaaacgccagggcccctcctcacccgccacggtgccctccctactccagcgcgggcccccaactctagccagggcccccaactgcagctctattccttacaaactccaccctcaaacttaagccctggtcccctccagaccccagccgcgcccccagtctccaggcggctcccccacccccatcccgtctccagccctcctcactcacccgtctgttcccggccggtaaaactccactgagaatccgaagaaggagcccgggggccccgagagtactgctggggcctccgcgtctaagttgaagcccccgaccctgggtggcggcggcagcagcagcaacagcagcggcagcagcgggggtcggcgccgggggccccagcgcagctgcacggcgtggagaggggactctggcgtccggctccccatagcgcccgctcttccctgtcctggggccaccgacccggagccgcttcctaaacctcccagaggcgaatgactcaacgcggggaggagtttgccaaactcccggctgagccctccccccgcctgccgagggggctggcgggggggcattcctgggtccctggaactctgagcccgcgtcccccacccctaaggggcgtggggggggggcgcacccctccaaccccctttccccagccccagctggaagccggttgtctggactgggttagactgggcgggtttgggttcttccccctcctctctgcttccccctccttcctccccattcctttccagatgtacaacgtaaacgctcggaaaacgagtcggaaaagggagcggagaatttcctaatgaggaaaggaatcacctctggtgggcggaggaagcctgtatatgtgtgtggggtctccctcagtgctttagggaggagactttggggtctaaagagacaggagactcctctggcgtccggccaactgggattcccccttgccttccggggccgccgggtgcctgggttctggccagctggatttgggacacaacagttgaggtacagagacagcgttcgcagtcagcttgctagaggacctacacgggctcctcaagttccgctgcttcctcctccaagcttgctagtattgaaaacccaggagtttggggtcattcatcaggaggattctgctccagtttgcccccttcttggtcctagggtatgtaaacctctgctgagccccttccttggatctgacagttgaccaaaagcctgcgagtggctggcccctcagtacctgcttgattaaactggccgggttcctacaaacctggagaattgtgagaggtggtggtggtggtggaaagtcttgcaaagggacccaaccttcagctcctaatggctgtaaacgctgggagctctggccaggcacggtggctcacacctgtaatcccagcactttgggatgccgaggtgagcagatcacctgaggccaggagttcaagaccagcctggccaacatggcaaaacccatctccactaaaaatacaaaaattatccagatgtggtggtccgcacctgtaatcccagctactcgggaagctgaggcaggataattacttgaacccaggaggcagagactgcaatgagccgcgattgcaccactgcactctagcctgggtgacagagcaagactgtatccaaaaaaaaaaaaaaaaaaaaaatccaaaaaccaaaaaccaaaaaaacaatgggagcggaaagccaggaccccattcttcccagattcccctgtggaagtagaggaagggactctagaaagggaaggcagtgaccccctgcccacctcttccccaagctcaggctctgtgtgatgagatcacttttcaggattctagcctttatcttagtctgggggaggggactacaagtcctttcagtctctttcctccaggactcctcactttccagaataataccctgtcaataatatcctgtcaaccctgtcccttctgttctccagtcccctgccccacttcgggctgaaaggctcagaataagagtgcccagagtcaatgtttttttcctgccatgactctccccctcactctgctactccacttcctgtcccaaatcacccatctgcttttttaaaagcccccctccagagccagctgcagcccaagggagaggctggctggccagactgtggggcaatgctggcccgtatcccattctcacatctgcaagtcctgaccctttcttaggtgaggaacccagggaatctctgggtcaggatctttaagcccagcattgccaaaaaggcaacctttaggtgagagctactcaagccatgggctgggaaccccctttgggaggagaagggctgaggcctgattgctttttagcccagcaaaacacgtgtgtgaaccaaacactctcctttctcagtctaggcaaactctttagattttcccaggatttgggagattaggggtgggggtggggaggggtgcagggaaggaggtgtgtg

SEQ ID NO: 916338 - DNA, 4001 bp, Homo sapiens
ctaaggcaggccacctgcaactcaaaagctagggactgagcaggtgcctggcctctcacataccccccgccccccagcagcagagcaccccctgctggagcaaaagcagggtgaggcagtcaggccctctgggaaaggccccagcttggctctgggagacggaaccaggggccaccttcagagaggagggggaaatgacaagagaccaagctattaaaaataacctagaatttgcctggaaatagcttagagagttcagcatgtcctaaaaaggcctccagtcctcgaactctgacagatggagaaggagggaggaagggagggagggagcaaaggtgaatgaggaagcagatggtaaacagaagaggagatgaagtccgttgctttctatctctcccaaagttttggggaccaccgaccctgctaccagatgatagggataatggaagaagaaagattagagctaggcccccactccccaagcaagtgaggagaaatgagctcttgtccctgccccctgcccccagaccgacagtagaggcagaagacagtcccagtggacagcattgatcccagtaatggatacttaatgtggcttaggcactggttgaagagagaaaagccccctagcaggagcaggtgagaagctttcttcacctctggcctccctttttacaatcagacatgtagcaagagccaaggatacaggcaacatgaccagtcacaggcccctcacaaaagtatatccatctcccatgggtcctgaactgattagaaaaaattagaattgtcctccaccccttactcctcctggcccttcccagctgctgagattcctggagttggaaatttgctaaggaggaggaaggggagcagcctggccagcatccttcctggatctctctcactgctacagctgctgcggctactactactgctactagtactttgagggttcagtttgctgccactctctatcaccaagccacctactgcaggttggcagacctgcagatcctctcccaatcttcccgtggtcttaagccacagaagtggaagctctctcctggccttccagtgccctgctgccctcattccatccatggcaatgctctagcaggaagttatttctggagtctgccctgcatgcatccctctcatggcaccctcaacttctatgtcctttccatctcctcccattctaagcagagacagacagtctccctcccttggggaattcagcccttggaagaagcaggggagccagaggccctggggctggatcaaggatgcaagttgggggaaaggcccagaagaaggagatggttcgctgccaagacaagaaccttgctttccaactcatccctaaagcaaaatactggtctcagggccgggaagtgcagcttcagacgcaagccagatgaggcaaggctccaggttgggatgtgggatgtctgtgggcagtctaggtcttggtggggctagaaaacagagaaatgaggaggcccacagagtggggagggggacgatctgtggctcgggcatggcgactctgggcgggtgcggtgactcaccagctctggggtcggggctgcaactgccggtgcagggccacagagaagccgaagaggctgcctggctcgccctccttgcgcaaggcacccatcacgtccagattgaaggcgacagcccgtgagaagagcagttcgacgagcagggagccaaaaaggtagcaaatcccggaggccccccaagggtcgcggctccgagccccggccatgggacgatccctgcgcgagctcccagcgaatgcaagggaaatctcgcacgccccaagccccaggtccccccaggcgcgtctctggtctccaaagtctcgttggtctttcagacgtctcccagacgttcgccccgccagccctcccgcccgcccgccgctccgccaccccgccgccccagcaccggctaggacaactacagcagccgcagctccggcgcccactccggctcccgcctcctctcccggggacgccactcaggccccgcctccggccccgcccctcgctcccgcggcaggtggagacccaagcccgtctccaaggggatgcccaggctggtggctgggatggaaactagccttgctgaccccccaccaccacgccccccaagcccagcaccgtctccggctccgcccctgcgcggcgctctcctccccttctcccccaaccccatccccaccccgggagtggtggaggcggcgccttggaatgcggagggagagaagtacagatagaaagagaggggctgaaacagaggaaggagggtaagagatgagaagttgggaagacgctaaaagacaacctgggaagagagatgtgcagatagagaggaaatgaaaggggagccgtcctgggcctgggtgcagcgtggcatcttagtgctccctgttcccccatggtcacatagagcactctttctgctgttgggatcagaccgctgccctcccccatcctatcccatcccccgcccccagcccggcaatgaccacagcagtgctagccacatcgtcaggattcaagggaacagagaaaaagaggcaagaagagagagagaaactcgggagatacggggagcaaatggagaaatggaaaaaggaaaggaatagagaggaagaaagaagggcaagagattaattgacaagggatggaatgaagggagaaaagaaaacgactggggatgattacaggaagaggaaattaagcagtggggaggggagtgggtgtcaaagaaggcaaagatgaaagagactggacccaagaggcagagggatgtaaagggtgtccccagctaccagacccgtcccaggactgcacatttcctatccatgaaaggggatgggagggggcagagtcctggactggctcagcaggacctgggtggggctgagatgggatctccacagggacccattggcctgtccctcttcctctccctttccctcaggctgggacagaggcaagggggtggggggacactttccaactctctgctatttataactccgatacagaaatggggccagaaggagagacaggaaataatttggcataatgggaacctcgaatgctcccacttccccttcctactccccttgcttactggtgttggtcttgtgaatatacatctgtccatcttcccttctctctctcactatctgattttgtctcatcccaaattctattttgtcatcattcttgtctctgccacacttggaatctttctcagagtatttctcaatgtttctagtgttgtctctgcccttcaaacactatcatattcttacgattctttcttctctttccctttcttaaaagttccaataagtgtcctacctccttcctcttcctgtgttctgtctttcctacttcattgttcaggattatacttctttgaaaacaaaaaaaaagtgggttcttactctgctgccctgggacagtctttgccttggataagttaacagacatttggaagtctggccctctgttttccaatactacacctgtggctatcccctccagagcactaacacatctctaaacaggtactataaggaaatacatatgctgtcagcagggctggcaccaggattctactttcaccatgccctccccatcctttttaatatctcagagccccagacagtagagaagagctgacatgggaatgcagaattgcaaaattaggacagaactgggactactgactccctgcccaggtccccccgcccccgacccagctcaaaatgcctttagagcccaagctgcctcctatctgcacctgcagcttctgcctgtctccattcccactccactggcttctgtgatccagggctgaaatcagatgccaagaatctgcttctgacctcctctctccaaatatttgagaagtcacctcaccaccacaggaggaaagatcaggaaagaagagagagagaggccacc

SEQ ID NO: 916339 - DNA, 4001 bp, Homo sapiens
agctgagatggcaccactgcactccagcctgggtgacagagactccacatcagaaaaaaagaaaaaaaaaagaaactagaaggatccagagaatgcggtaagctcaatattaaaataaataaactgttagagaacttcttgtatttcagtcaagagcttaggaattagttaaattaaaaattaatgctgagctgggcacagtggctcatgcctgcaatcccagcactttgagaggccaaggcaggaggatcacttgagcccaggagttggagaccagcctgggcaacatagggagacccccatctctacaaaaaatagaaaagttagccaaatctgtggtcccagctactcaggaggctaggcgggagtgtcacttgagcccaggaggtgaaggctgcagtgagccatgatcttgccactgcactccagcctgggtgatagagtgagaccctgtctccaaacaaaaaatgctgaaactgtattattccactcgcataccattctcaaaatgacaaaactatagaaatgaagaccagattactggctgccaggggacaaggatggaggggggtggggacaaacataaaggaatagcacaagggggttcctttgtggtgatgggttttgtatcttgattgtggtggtgattatccaaatctatacaagatataaaactgcacagaactacaaacaaacaaataaatgcatgtaaaaaatggtgaaaactgagtgaggtctgcaggccagttaacaatactgtaccaatatcaactttttggttttgattttatgctacagttacataagatgtcaccattaggggaaactgagtgaaaggtacacaagacttcatgtgctatttttacaacttcctctgatctataattatttcaaaataatttccaagccagacatggtaatcccagcactttgggagggagggaggtggatcacttgaggtcaggagtttgagaccagcctggccaatatgacaaaaacccatctctactaaaaatacaaaaatcagctgggcgtggtggtacacacctgtaatcccagctactcaggaggctgaggcacaagaatcgcttgaacccagaaggcggagcctgcagtgagcagagatagcaccactgcactccagcctgggggacacagtgagactctgcctcaaaaaaaaaaaaaaatttaaaaattttgtgcttctaaggataccactaacaaagtaaaatgataatccatggaatagattatccactccactccatggaatagattaatacactgtacttcagcctgggcaacagagtgagactctgtctcaaaaaaaaagaaaaagaaaaagaaatgtggctagtatgactgagaaactgaactttttaaataaattaaatgtaaaaatgaaagattaataatctttataaaaatttccaaaattttagacgttgagaaatgtccagatccagccaagattttagccctttagcttttgtatgagtggaagctgaggctttctccagctccttcccttttcaacatcttcttccccactttgagatcagtatttttcagctccctcaaatcacactttttgcaactgttgtctctagcttacaagcaaacacttccagaacacacacttcagggctaacttctccctccacctcatctggcaacagagccttggagcttatgtcccaaggtcaggcttttccgtcccaacatgcacaccatgagaacttttttacttcactcacctctccagcactggaatccttctgcctgcctctgaattctggttgtagtcaaagcttgaaccatgggagtggctgggaggaaaagaacataaatgtgattgagggaattcagtggggaaacagcttgaccgctccggtctttgacgatccaaaagaaacccttaacacttgagaaggactgggaggtcacttaccaaagggagccatttggactgtctcaagggccccctttctttgagcactggcttcaggccaacatttggaacttagccacaccaccaccaaccccctctcttgaagcccagccagatctcccagtatgtgaagccttgtctactcactctgtgtcctccctcagccctcatccaacccctaacaactcagcagcttccagccctgtttggcccagccagtcagtttggagcttgctaattaaagctaactctgaaagagacctcaaaagaagagggaaatgagtgaagaaaggagtgtggagttgcattcattcagtccaagggaaaataatctgagtaggaaatcgtaaggagaggtgagcagaaagagacttcaaatttcaagagtcattctccagatagatatgtatgcgacttgtgtccatctctaccaaggacaagtgaagctgagcttcaactgcagcagaaactaaggttagacagtgaacaataaaggcccagaaaaagaacagatggaggataaccctagagagatcagatggggacactagatacagataccccatgtcctctgctcagctctagggcaaaggaacagccagtgtgtgggagagaagggagaggctaatgtctgcagaatcctggcagtctctacaccgattgtgaaaatgtcaggcagttgtgccaagaagggtgagggtaatacaggatgggcctgacactctccctgagttggcctaatcttaacatttagactcacttttgagacccccccaacactaacccccattagccctcaccctctgtttcacttatcccatgtcaccattatcttgacacttccaacccatgtccttctcttccaggccccacagctctggaggtgaggcaccaggcatttccaatctgcctctattttgcttgctcactgcagttggaagctggagccagagagtggggaggacagagccaggctgctctgtgatgctctcactcttcccacttctattgattagcccttctctggagcagagcctcttctcaaacactcctcccctgccaggattctctacagctcatgcccagcaagctagaggggcataatgattagagacagagagattcccagaaaagtgctctgggtctaccctcctggggtctcaactgtggtttatgcagtatacagcggtaagactcaggctctggagtcagatagcctggatttgtatcctagctctaccactaatgaactctattacttaactgccttgtacctcagattcttcatctgcaaatttgggatactcgtaataatatttcacagaactgttctagggattaaatgaatacatacatgtaaagtgcttgactatgatgagtactaagaaatgtttagaaagaagatacagtacacatataatttagacacatacacacagtatctaacgtttttattagaatttttattttggcacttaaaatgttttgctttatgctgccacttaagcatttcatgtgcttctcctcactaatcctttgacagttgcacatctcccaggatttgggatgctattctgcaaatagttgaatgaatcattgatcagtaattctcaaatcttactcagaaaattcaagaatgttttcttctaatgcaatcagcacccatttctcctccccctgcaagtaaatataatgacgtcaacttcaactatgccaatgaatcacaaaatgagagaatgccaaagctggaaatagttttagatatggtttagcccagtgagtttcaaccctggatacacattagaatcaccagaacagcttttaaaatatactgataaggccaggcacggtggctcacacctgtaatcccagcactttgggaggccgaggcgggcagattacctgaggtcaggagttcaagaccagtctaaccaacacggtgaaatgccatctctactaaaaatacaaaaattaggccgggcgcggtggctcacgcctgtaatcccagcactttgggaggccgaggcgggcggatcacgaggtcaggaga

SEQ ID NO: 916340 - DNA, 4001 bp, Homo sapiens
ccgagtagctggtactacaggcgcatgctaccatgtctggctaattatttttgtattattttgcagagatggggcttccccatgttgcccaggctggtctagaactcctgagctcaagcgacccacctgcctcggcctcccaaattgccgtgattacaggcgtgagccatcacccccagccaaatgtcatgtatttatcatttcacacgtctgcaactgaatctgtaggataaatccctagcagaggacgtgcaggataactagataggtatcatttgtaatactggtgtgtatttcatctacattctcatgctaagaaatatatatatataggtgggtattgccaacataaactcttcaggacttgtactggtccacattcccatcagcaatgtatgagaaaggccaactaactccttgtcataaaccatttgcatcttcttcagcctgggcccagagtcaggtccagatactctgcacagagtgtgggaaaggggtggggtgttgagtccttgaatgtcctggtcctgctccccaccacctgtgacctcaggcgccatatataacggagcctccacccctcggggagaggccagtcccagctcagcctcagcgtaacctcagccctgcttgctctgcatgcctgtggtcagggaggctggagatgctgcaacccaaagccgggttttgactcatctctcacaagtggagccccggctgccgcataggtttttcagagaccttaggcccactcatctccccttaaagggggccctgggacttcctggacagccctttcctacctttctttccaattatcctctcttctcccctccttgagaatacatgttctgccacctatttctctgtctgcttctctgtctctctctggctcctttcatttcaaaacttctattgcatctctctgctgcttttctctgctccacttcttcatagggctattttacttccttttcccctctgttcctaactatagaatggctgaatctactactccatcccactctttttacaaatggaaacctaaattccatgaggccagggtcacccagtgaactaggggcagggcaggacagggcagggccaggcctctgctgtgctttctcctttcctccctccaacccaggcactatctccatcaaaagttgtgttctctccccactagccctggtgggctctgcctaatcccatttctctttccttaggggtattctgcagtcttcccttctctctctgggaccaagtggttatttccatttttctggactccattctgactccagtacacaccctgtgacccccctcagcagctgagaaacagagcctcttccaaacccatccctaccttccaaatcaagcagaaccctctgctgcccactgggagtcacaaggaggggacggaactgagctgctgggcctcagtgtcccaggacagtggagtctgtgaccaaggtgccgattaggaagaagtctgagctgaaggcagagcattagggatagcagctgggggtgatgttggaagaaccctccctcagtataatcggtatacctgccctacttcggtatagtccttggcacatggcaggcactcagatgacagcactcatatacatccctgcctccagacccactcatgggaaactgatgcaggagagattgggcttttggagaggtggaggtgggggtactgtgaaactggaggagggaaccaggtcaggggatcttaggaatgcagaaaggagttcagagcctttctcaagtctggacaggaccctcggtatccaggtcagagccctcttcccaagaggttgggaccaggtgggccagagcttgtaaggagaggaggcagaagggctggtgccctggtactcacaggtgcgtgcagagcagtccttcctctggcggcagcagcagcctttgtgtactgatctgggagacggcagaggaggaagtgacactccccagggtggggaagatttggggttggtgggggtgactgatctagaaggtggtgcagataggggtggggctgagccaagggagtggacaatacagagatctggaagaaagaagcccatttattgaacccctgtcatgtgttgaacgtaacatattacaattaaccctcacaacaatctcataagataggggttaatattcccccaagccccaattttacagatgcagagattgaggcttggaagcaggaaataaagaattttgcccaaggtcccacagctagtaagtagctagtctaggatttaaaaaaaaaaaagaaaaaagatttttattttaaatttttattattttattttttttattttaatttaatttaacttttgagacagggtcttgctctgtttcccaggcacaatctcagctcactgtcccatggcacaatctcagctcactgcaaactccgcctcccaggttcaagcgattctcctgcctcagcctcccgaatagctgggattacaggggtgcactaccatgcccagcaacgttttatattcttaatagagacggggtttcaccatgttggccaggctggtctcaaactcttgacctcaattgatctgcccacctcggcctcccaaagtgctgggattacaggtgtgggccaccatgcccagcctgttttttatttttgagacagggtcttgctgtgttgcccaggctggtctgtaactcctggactcaagcaatcctcccactttggcctcctgagtagctgggattacaggcacactcggctggtctgggatttaaatccaggtctgcctgcctccaaaattcatgatctctccatttacttatataggaaggaacatgataggagggaataggggcagtaagtactgtagagaggccagaaattacagacttgttcattttgaaaacccaggatacattatataagtgtgcttgactacataggctctggagccaagttgctagagttcaaatcctggctctactacttactagtagtaaggagcttagctgagttacttaaacctgcctgcagctgttttctcatctgtccagcaagactcacaggattgtcgtgagaattaaaagagataattcatatcaattgcctacaagactacctggcacatactaagtaagggcttgataagagaattagtagggatgagaagtagcagaggtgagaagtgaagaggctttgagaaattcaaggtccacacaactggaaacttggaagagagaggcatagggccaggctcagagcatgtgattggggaaccaggagccaacacagtagtggatcctgggaaaggggtggaggaggtgaactgggagaagcagagagtgcaggaacaacagctgaagccaaggcaaggatgaagcccgtagggagagcaggaaaatattaatgggatttgctcctggcccatacagatcactaagagctttgagagggaactagacatgaggtctgtgttcacaggtcgatctcccctaccagaaggagcactccttgtaggcagggactggctctacaaggcttccctgctggagccaccacacctagccaagtgcccatcttatagtaggtgctcaataaatgtcagatggattgcagaggtgtagctgctaggaggggacaattggagaggaggggctctttctctgggtgggcttggctggcctcaggctatgggatagccaggacctatacccttcccccacaaccaggggttaccacggcaatgaccctccttccccacaggccctgtggtttcctctagagcttctttcactttcttcttctgctttccgccctccactcttctctcccctactcccacatcctcaacttttttgtcataaccacaggtcaccaatgaagagagccaggaacaaggtaggcaaggcactgtcccagggaaggtaggacacggaggaggggcttgaggggagtcacagagggcgaagggaagagtacagggtgc

SEQ ID NO: 916341 - DNA, 4001 bp, Homo sapiens
aacccagcagaagcgcttggcactaacgtgtttttcctaccacgctttagttgcataagaaagtaacactgatggaaaagggattgaattaaatctacctcccttctttcactcattagggggaatgcacaagtaacaggaactgtggaagtactggtgacttccacgtcccagtgcttggtaggcagcagtccgttataacacagctcgaagtcactgtcccgggtcgttgcaggttaagtcatctgccccaaagcctaacagctgaaaacagtagccagacaggagtggaaacaccagttccacagcctgaaatgtagggcggggggacctaagtgttgaaacaacgaggtaacaaaaaatttcctgtgcatcaaaatatactgcagcgtgcaattaaactgcacactgctattcccaatcagaacagagaaaacaaggaagtcctatttaaccatttggcacactgttttatatataaatatatatatatattctacataaaatatataaatatatattctacataaaatatataaatatatattctacataaaatatataaatatatattctacataaaatatataaatatatattatacataaaatatataaatatatattatacataaaatatataaatatatattatacataaaatatataaatatattaatatatatttccctcattcataaacatatatacatatatgtgtatatatatatatatttttccccccattcaactcgaatctcaagaactcttcacttggctaaattccaagagaggctcagcatttcagtgggccaaggcctgggaaggagagatagcaggtctgagttctagaacccaggaagccctcagagacgtccaagggccacagcgctgcagatgcccctagggctgcccaggccagtggggcgagtcctggttcggcaaggccaaaaggaaactgctccagcgaagaggggacggtgagctcctcccgcaggacaacgccacactttggctcaccacatcgcttgagtttcatgtccaaggccacggacttttatcgactgctctttcaaacccggcactgagagaccaggggctgaggacggtagcgagaaacggtggaaaaggggggtgttttgttttaccttccagggaaaacaagcacacattttaatcaaaacaacccagggagaagccagcgaagacctcttcgccgggcccgtctccgggcttctgaatcacttcctcctttctgatgtgtctctgagcttgagattacgaagttgctgagaaagtcttgcctctcagggcagcttcctgcgagcgggcgagcgagagagcggagcgcacggcgctgtccgcgggcgccgaccctgcccggccgggccaccacgcgcggcagcgggaggaccgggcggcggaggagggacagggactggttcccaggacccggagcgcgagcgctgcccagccctcgtctcccgcttaccccaaggtgctgatgaagccgttgaccgagccctccgcgtacagggacacgatgtcccctatgtagaggaagctggacattttctcagtcatgctgcttcatgttccacagtggacgtccctcttcttccctgcgccctcgccgccctctctccagggagccgccgcggcagaagcggatcggatcgcgggactacagcggccaagagccgcggcggagggcacggcccgagccactgagcgtcgcggctcagccgtgcgtgcgcgccggggaagccagaccggggccaagccgcagctgcggacaccccgcgaagagcgcagcccaggcgcccagagaagccgcagccgccgccgcctccccggcaggtttcctgttcctttctgaagttttctctccaacacctttgctcctcctcctcctccttccctctccgctccccactccgtgtccactccctgctctgcgacccgctgcggccgtcacagccgcccggcgggagctggaagtggccgagccccctcggtcccctcaggggaatttttggaccaggtgccggtgcccattgggcgaggaggaggagaggagccctggagaggtgggggggcggccaatcagggagcagcggccgggggcggagctgggccggggcggggcgaccctcgggaggccgggccacccgggaagcctctgctgccgccgcaccggcccgcgcggggacgcgacgctgggcggcgctggaggggcggcgggggaccccggcgggggagcgggcgcgtgcggccgccctggagaggccggacctggggcgcgacagtcgctgcctgggaactcgaagaagcttgatgggggcagggagggtgagaggtggcggccgggcgagcgcactgtaggacccgagcacaatggagagagcccccgaactgctggagatgaaaaggtggagccccagcggggtgggtaatttgctggccaaggaagaggtaggcgttgaagtaaaggaaaaaaatacaaataaaaaataaatgcatgatgaagaaagtagaagagaggaaggaagagagtgagggaaggaggatgatctcgatttcgttatgtagtttgggtggtctttttcctcttcttttctcaagtacgcggcgttaatgaaactcgacccgtccgctgatgtccaggtggacgcgagcctccaaggaggtaaacgtcacttggccaagccagtttttgtagccaaccttcagcggtgagggctcagtggagctgagctttaagcctccgaggccgcgcctcctgcgcttcgttaactccaagccgaggttaaccttccacccccatcagcccaaggtccccggctcaagacaaccctggcttgtttacgtttaaagctgctgactcttaaagctccagccgttataagcaaaacgcagctagacacttttccacgccttctctgttgcttctgtagccctcttcttagaacatgattttaaaagccttttgctcttcccttctagaagacacagtggaggcaaactgtatggcggttttgataccagccacctaatttaaaagtgctacataagtaatccccacagagcaaagtttgtagaaaggcagaggaacttggggtgtgcagaagcatgttgtgtcaaattgtgcaactgaccaaaatgtaacttacagtcagatgtcttacatgtcttacagttcaaagatggtttagattgagacttataatcacataatagaaaatgaaagaattagcccagaattcaaaaggccaggcgcagcgactcacgcctgtaatcccagcactttgagagactgaggcgggaggatcacttggggtcaggagttcaagaccagcttggccaacatggcgaaaccccatctctactaaaaatacaaaaattagccggacgtggtggcacaggcctataatcccagctactctggaggctgaggcaggagaattgcttgaagctgggaggcagaggttgcagtgagcagagatggcgccactgcactccaacctgggcgacagagcaagactccgtctcaaaaaaacaaaagtttgtgtttaaaaagcctgctagatagaagggaatagacactgaatccaggaaacaccagtgcaaagcctgtgtgtgttgagataaactggacccagtcattgtaatagcatgcagctgacagatctccttttatgtgtccttctttgtaaaaagttacttgacaacttagaaatgcctgttacataatccagcccttctctgtctacacacattatatcactgttgggggccaccaagacattgggcataggagttattaaaaagctgagacagaacaacatagtgaccctggaaatggaagtttctgtttatccaagagatctgtgcattacattgtattgttccccatattgcacggcactactgtgctatacatccagtggatgctcaattattgatcaaagtcatgaatgatctttgttttaagtcacaaac

SEQ ID NO: 916342 - DNA, 4001 bp, Homo sapiens
gtctatgttgccaagtctggtctggaactcccaggctcaagtgatcctcccacctcagcctcccaagtagtggggactacatgtccacgccactatgcccagcgagttttttaatcttctgtagagacggggtctcactgtattgcctgggttggtctccaactcctggcctcaagtgatcctcctcccgtggcctcccaaagtgctgggattacaggcatgagccactgcgaccagccagggacacaattttaaaactataagatacgtaaaaaattatctagtcaggttatgtttttgcatggatacctttgcatacatgatgaaaactatgaagcctcttacagaagaatacacacatatataactttgcatgttatttaacaaaattcatggacagccaaatagagccacacacccctccattaagaagaattttaggggccaggtgcggtggctcactcctgtaatcccaacactctgggaggccgaggcggatggatcacctgaggtcagcagttcaaaacaagcctggccaacatggtgaaaccccgtctctactaaaaagtacaaaaattagccgggcatagtggcgcacgccttaagtcccaactacttaggaggcaggagaatcgcttgaacctggaaggaggaggttgcagtgagccgagatctccactgcactccagcctggggaataaagcaagaatctgtgcgccgcccccccgccaaaaaattaactttagggccgggcgcggtcgctcacgcctgtaatcccagcactctgggaggccgagatgggaggataccttgaggccaggagtttgagaccggcctggtcaaaatagcaagaccccatctctcttaaaaaaaaaaaaaaaaaaaaaaagactaatttagaatatgcctttattttacagataagggaaaagaaccaaagaggtgaactaagtaatccaactcaagggtctttccagtcttcaccgttttttcagttttccaaggatacaaccataaccccaaatttacaaggacaaaatctcaaacgcggcagctatgctgaagcccgcatcatatcacataccccctcgctttaagaaaaacgacatatatatctatacatatatacccatctttcttctctggctttggggcagcattgggacatctttttccattcttcgtcgatatataactacactgcttgaagggtgcattcttgtcttcaaggatatgcttaatgcaaaactcctgcccctccagacgagggtgagagcatggacgatgagtgaatgcacaagacagaggttcctgagacctgggcactggagtgatcctcccccgattggttggcaagacgtgaatccgaatcctgttcataaccaaaacctgcggggtcaaacgaaagaccaaaaagcccttacccttcccgaaaattcctgctccacacagatcgcgcggacagtttccaaaggacatgcagaagtcgtccccgtaaggtacgctccgtaagtccccgccgccctccccaagtctccacaggcatctgtggctttgcctccctttagcgtgtccctccatgcccggccccaccccgaaccacaccacgctgaatgtatcttcaggactcgcacagctgcagcacgaagggaagcgacaacaccagccccacgcggcggccacgccgcctccccgcacgccgcctttgtcccggcctgcctcagagcgcacgactgggcctggcctcggaagcctatgcgagcgccattttgtcctacggctccagtcaccggagatcctggctcctggaagcctgcaggaaggagactgactctgacactgctttgaggcggagtagcagctctgagctgacaaaaagagcgaaatagcagcccaaccgcaagagcttagaggaaagagcaccgccatcttacctcaggagctgcgctgcgccgcactctgccgcgccgctcgcccttctctagtggcgccagcggctctcagatcggcctcgcccctttccggactcctggctactcattggctaccgctcgtatgacaggatgtcgccattggccgagaccaactacctatcgtgtctgggagggcggagcgctgagaaaatgcgaggttggggtggctaagacagactgtctgtcagcaactccgcccggaggagagtgagccggggaagggggcggagagcgggctgcggggcgggttgccagctaatatttttccaccttgcagcgtggctcgttttccggctacttttggaccctcagtctgtggtcctaggctgctgttccctcaccactgtacacagctagtataaaatcagacagacaggccgggcgcggtggctcacgcctgtaatcccaacactttgggaggctgaggctggcagatcacctgaggtcgggagctcgagtccagcctgagcaacatggagaaacgccgtctctactaaaaatacaaaattagccgggcgtggtggtgcacgcctgtaattccagctactcgggaggctgagacaggagaatctcttgaacctgggaggcggagattgcggtgagccgatatcgcgccattgcactccagcctgggcaacaagagcgaaactccgtctcaaaaaaatatataaataaaaaataaatcagacagaggctggaggatcactgtttacacataaaaagtctttagctttcttttgtgaacagttcaatacatgtactgaacatttggtatagagaacactgagaaacattttttgggtgtttactgattctgggaattacatgtataaagtcattgaatttttcaaagcaaccctaagaggtacaggttagtattatgtccattttacagataagaggactgaggaacagaatgggaccatagctattaaatgggaaaggaagacgaatttgaacccagcccgcattctttatcccttattgcctcttatatagtaaagagcattggactgagaataaggaaatatttgttctagtttagggctgcttctcataactgtgtgccctgtctttaaaattccatgctaaataatgcaggtatcataaaaatgacagacacaataccaatcataccatcctttaaggatttttagtttaaaagcatctttctgtcatctccaccacttgtagaaatgattcctagctttcttcccataacccttctagacattttttgctttccagcatctcttatctcctcactgtcagtttaagaaagatgttttatccatgcctaacgagcaagtgagcatgagtcccagtggaagtgaacataaagattccacagccctcaagaaaaacactaaggctgggcgtcatggttcaccactgtaatcccagcactttgaaaagctgaggtgggaagatcacctgagctcaggagttcgatcccagcctgggcaatatggagacacctcatctcaaataaataaataaataaataaataaataaataaataaatacactataggaccgataaattattaaaaaaaaaaaaaaaccttgggggttgtgctgtttccagagactagagcagccctagaagaaggcctgaaattcattcattcaacgaatatttattgagcacctaagtgccaggagagaacaaggaagataaccctgctctcttggagtgaacattctaggatagctttggattatggatgcaatacaaacataatattaataacaatgatttatatacataagcaaacagaccaaccctcaggagtacgaaaaaagatgttttgttataaacaccctataattaaaaaacagccagaggcagtcatgtcacagaaaatttgggaatccgaatctgcaaccaaatgtagtaatatcaaaaagcaacattaaaactactgtagtgaacaatatgaagagacacaggaatagatggggaagaaacaaaagactttctttcaatgaatttactgaaggtcttagttgaaaaaagaatcctt

SEQ ID NO: 916343 - DNA, 4001 bp, Homo sapiens
tgaccatgacggagacgatggcgatgaccctggcgggccccgagctctcggggtactcgaagagcagccacacctggcgctggtactccttctcgggcagagggcgctcctcctccttgatgaagccctcgtcctcccggaacttctccatggcctcctcgcccaactcgtaaaacttgatctcctcggagaacatgtccaggggcacgttgaccggcctccgcaggcggccgccggactggtagtagtagaggatggcgtcgaagctgggccggttgcggtcgaagaagtactcgttcctcagggggtcgaagtagcgcatgcgtttcttagggttgcccagcagcgtgttggggaactgcgccagggtcttgagctgcgtctcgaagcgcagcccggagatgttgatcaccacgcgctcgcagcactcgtggtcgtcgtggtcggcctgccgggggtagctgccatcctgggggtggcccggggcggccgaagcctcgtccacgttctccccagacatcaccgtcatggtggaagccgggcgcgggggtgggaggccaggagagagcccggggtgggaagcagccagggaccaggggtgggggggacccaagcggcccccccaccggagcgcgcgtctccctcacgcccagggggaggtgcttcaacacgagcaggtcgggagatctgcgactttgcctctcgctgccttcccctccaccctgcctttcactcagtttggaatccccctcgcctgcgggccgggtgcagctttttgcagagggttgggtttgggtttgggggtttgttggttttctgttgttgttgtttagatatttcttcctgatcccaggtgccttaacgcagtgccgttctagcggactgggccattgcttcgggggtcgccctggcctcccctcccctccgagagccttcctaggacccggtgcagtgccggctcggcagatccccacgcctgccaccctctctgcttctcctcggctctcccccctcctacccctcttcgcctgccgccttctaagctcccaccagggcgatcgatgcacgctgcagagaaatagaaagtgatacgggggtagaaaatcagaagcattcagatgggacggacctacagacaccgaagaacacagacctctagcttgagaaagcactggacgtttgctagggctatcacacacacacggacagacgacacgcagacacccggaaatccaagtttggggctcttccatcccactttccccaatgcccaacagccgatctgtttacaacttcgttaaactagagatcggaaaagcgccgagagacgccgggggaagctcagggtcccggacagcatccccgcacccccggcctcccccacccggtccccccaacccccgcttctgcatccccgagctggggaaccccctacctggccggctggcttggcgcaggggcggtgctgagtcagcggagagcccgagtgggaatgcggcaggtcgtctttgcagtgccctggcgggagccgcggcggccgccgcagcagcatccgagacgcgccgggcaaactcgccgccctggtccactcgtccgacgcccctctcagttggacaatcgctttacggagcagctacggcgaaaatgttccttccctacccccattctcaccggttgccagcaacctggagacgccgtcctctctccggtgcagggagttccggaggatgcggggcggaaaagcaaaataccaccctctctcgaagctccgaggcaaatgacgataaacagcactctcgccccctcctaacactatgggagcccttgattcgatcccgaaggaggcgggcgggcgagagcctggatctacatggctctccagttcccttcgctctccgcaccccagcgcggacctcgccaaggctacgcggcgcgccaggagcccttaggagcttggagtggagcagggtgcgtgcggcggcgggtccgctcggtccatttctgggcgctgcaagatcagcagaaacctgagaaagcgcctggaataccgagcagcgattggcccacccgggcgtgggttggggagggcgggggagggcaggagcgaggaggtggatggaaaatatgagggggtggtttggaagagagcggggttgtcattcagttcccacccttgccagcacagctttttcctctcctaccagaaaagccgaccgctaactctacttcccctgtggcccgccgccccgcccacgaacggcccctagcggctcgcgaccttccccgggaatttcacattggaaatggtcaggtccgacgcaatgcaggcggtggtgtttctggcaaaactcctccgacgggtttgcttttgtgcagtcccacagtaaccctcttcgatcgcactgctctgcgccccatcccgctcctcccccaagaaggcccttgctctctgcggggcccacccagcttcccccgccggctggactcgcagagctgcagactttgggcagagctgtgcagatgaggatccctgggtttgttccatgtagttttactgggcggcggcggtactaagagcctgtccctctttaacctacgatgggacttgaagttttcttacgatccgattattctgaaatacagggaatgtgacttgtgggggaccgaaggcttcgtgggtttgtggggttgtctgccaacttggtgctaattgggaataatctgagaagcaagtcgcctactcacctcccaccctatgtccctcctcccgcagcctttttccccagcctagtgcctccacagggccactttcaaagcttgcaatttatttggaaagggtcccccgcagaggcgcatggcagcaggagccgggggcgtgtgccttgccctgcgagtgcggctggagctgcgcccccagaggcgctgcatctccgcgcctgcagcgcgagaaaaggcagcaggcagcttggtacctccagggctgcggagtctctaaggaggctgcaagagcccagagtcgccgctgattggctcctcccgcggccttgggaccacccttctcaccaccgttgcctcccgcctacaccacccacctccttaatcaaagccaatgattgcatccttcccgctctattgtggctagtggaaagcaggggcccctgcgggattgcccaggcagtgcaacagtccctgtctggaactagttaaatccttcctccagattcagacgccagcattcctttcagaaaaacaaaagtgtatgttccctcccctccttcagatccgtaccccagcttttctttcatgaacaatgagttctcttatactcctccttcccatattaaactcttcccctttcccaccttccacacgcatatccctcaatctcaatagctccagggatccctacctttctgcactgctgttctaatgcaaataaatatattttttaaaaaaatttaaaaataaaaacaaagatataaatatgaagctcccagctgaagtactgccaagtcttttggttttgttgctgctgccactgctagaaccctactggggataaccctacgagacaagggttttctgaccatatcctagcactactgagcttccctattctccactttatctgtccttatcttgtacctccctcttcctataacccattgccttcctttaaatgtccctaagactgtcatcttcctagcttcttgtgaatgcatgtgccctgactcagcattaggagattgccttactacaagggattcacagattggatgagatcccaggttcctaaattccgggttttattggggggcatattaggaaatcttccacatctctgatagatgtgtttacagcaggactggacctccaagggactggaagaaaattgtgagctgggaactcagcattctcctcctcctcctccttcttcctcttcctcttcttcctcttgttcttctttgagacagagtgtagtagtgtaatcatagctcacc

SEQ ID NO: 916344 - DNA, 4001 bp, Homo sapiens
ttggccttgacgttacacttctctagggggcagctgccccttcgggcactgtctgcattctccagggtccccccagccttgcagaaggatcccctgctcccgctgaccttccgctggactcctctgtccagccccggcccctggctctgagtgccctgctcttccttaaggactgccggctcctcgtgatccgtttcccggtggtagaagtagttgaagttggagacgatgacgggcacaggcagggcaatggtgaggaccccggcgatggcacacagcgagcccacgatcttgcccccaacagtgatgggcctcatgtccccgtagcccacagtggtcatggtgaccactgcccaccagaaggcgtcagggatgctagagaaatgggttccctggttgtcagcctctgcgaagtagacggcactggagaagaggatgaccccgatgaagaggaagaagatgagcagccccagctccctcatggaggcctgcaaggtcttgcccaggatctgcagccccttggagtggcgggagagcttgaagatgcggaacacccggaccaggcggatgactcggaggatggccagggacatggcctgctgcccattctggccgcctcctccaccccctggctgctgctctgccagttcggtgcccagggtgatgaagtaggggaagatggccaccacatcgatgatgttcatgatgttccgggagaaccctgccttgctggggcaggcgaagaagcgcacgagcagctcgaaggtgaaccagatgacgcacgtggtctccacgatgaagaaggggtcggccagggtcctgggcaggagcggtgccaccgtagggccagagggcggggccatgaccccgctgccgttggccccaggggcgggcgcgggaggctggtggggcgccggagggtggcggagcagctcacgttcatccctgaactcaggcagggtctccaagcagaaggtgatgatggagatgaggataaccaagaccgagacgatggcgatggcccgcgcggacccagagctctccggatactcgaagataagccacacctggcgctggaactcgttgcggggcaggggcttctcctcttctttaatgaagccctcatcctcgcggaagcgctccatggcctcgtcccccagctggtagaagcgtatctcgtccgcgaacacgtccagggagacgttgaccggcctccgcaggcggcccccggactggtagtagtagaggataccgtcgaagctgggccggttgcggtcgaagaagtactcgttcctcagggggtcgaagtagcgcaggcgcttggcggggtcccccaggagtgtgttggggaactgcgccagggtgcccagctgcgtctcaaagcgcagcccggagatgttgatgtggacgcgctggtggtgcagggacgccgtgcccagagcctggtcctccaccgtgcccaggccgggatcgccttcttcctcctcgtcctcgggaggcggccgtcgaggccgtggcagctcctctggcagcggaggcaagggccgcactcccgggtccggcagcggaggcaagggccgcactcccgagtccgcgtctctctgcgcgccgcgcccctttggcgccggctccttgggcccatcgctgagcccagccgtcgggggacactggagctctccccctgtggcctggccgcagcctgcccgggcctcatcgcctcctctgacggtcatggcaccgccgttctccaggggcaccagggcgatctccatggcgcgggagcagagggcatgctgcgccccagctgaccggctcccgcgccccctactcacgctccgcgggcgcctggcgtcaggctccgctccagcggtcggccggcccctctctggggagagctggggttgctggcgcgatcccctcgcttggccctgacgtcaagaagccgctgccctgctctctgcctctctctcttctggcagcccgttaccaagcagccgaaaagcctccttccagcagatgcaaccttcagccgcccctctctggctgcgccgcgcttggcctccaccctcggcgcctcccccgccttcccctcctctccccctcctcccgcttcccctcccgggtctcgtggcagcgggtgtctccccggagggcgcagctggggcccctagcaagggaaaggaggggctgagaagggtgcagcccagcggagggagggaaggagtggggaggatggaggaacaggttgtaccgacagcgctgaaattcccagggcaaccagatgagaatagctctggatttcagttcacctgggaacccgctggaagccgagtggactccaggaggaacgaagtgccttgggctaaagggacgaggctttgagctgagtcggagtatgagagacagagacgggagacaccagtcctttttattttggagaaataacggtatttctttgggaaggattacagaagggaggggggccacgtagttacggaccttgaaatacatgtatcaatggagaagcatctctcttcccgtcttcctacagatccacaaaaatgtacaagggggttggaaccctgcaggattcccatgccctagcctgtttccagtacagacctggtggcagcccaggcaagcagcctagtcaggagatgagctgtctggtctcaacccagcagaacccctccacccgctccaacgaatcccatttgcaaaaaccacagcagggaaggggagaagcgatttttacaatcctggtgagggctaatcctgcctggtgaatcttggaccgagcaactgcatctaggtccatgaaggagactgagggtggaggtggcttatgagagggagccagggaggttgtccaatctccaaggctggagcattcccaagaatggaataataacaaccaatacttacttggctctcattatgcaccagcccactctcagcactttacaaatattgtctctgtgtattcctacagcaacctattttgtaagtactattatcatcaccattttataaatgaagaaactgaggcacagagagattgacagactcacccaggcttatgcaggtggaaactgatgatgctggaactcaaactcaaacaatcagagtttggcccttgtcccctatatttcactcctctatagaaatgcataatcccttttcctgatacaagcactccctcactccaacatctggcctgagaactttagttccctgctgcagaaggcaggatgatggctgatataacatattaatctttctaggttgggacactaggaaatcttcccctgccctgtctcaacccctgcagggttttagcaggcattggtaaccaagaggaatctgtttcaaggtgtgtgtctggaactgccagacacagtctccagaagtttcttggttttaaattatcataaagtggctgtgtttttgaatgtctgttttcattgtctatttttgtttctgcatattgcttcagatttatatgcgtgaagttaggacctcttgtcaatgaatgtctctatccaaagggtgtgatttggaaacttggtcctgggtgcacaagtgtgtgttgcaatagcagcgcatagacacacaaacttgggtcaaggtttgagaagtatgtgtgcatatggctttttaagagtttatatgtgaaggtggatgtgaatttggtgtgcgtaagtattttcattctgtgtgactgtgcatattgttggctgtctttgcagacgtgcatgagtgaggaagggtatgaacatgaaaatcagtatgtgaaggcatcactggttaaccacagggccttgcatcccctttccccatatctgtgccatccctgcttcatctccagtgggctttcattcttctctggctctgaggttgccagtcaggatcaggtatttttcctggggagcctgggacttactgagcttgcagacagtgaggtcagagacccatgacagtcttgtctactgattcatgca

SEQ ID NO: 916345 - DNA, 4001 bp, Homo sapiens
gcagccccagctccctcatggaggcctgcaaggtcttgcccaggatctgcagccccttggagtggcgggagagcttgaagatgcggaacacccggaccaggcggatgactcggaggatggccagggacatggcctgctgcccattctggccgcctcctccactggctggttgctgctcctgctgctgcaccagctcagtgcccagggtgatgaagtaggggaagatagccaccaagtcaatgatgttcatgatgttccggaagaaggccggcttgctagggcaggcggagaagcgcaccaggagctcaaaagtgaaccagacaatgcacagcgtctccaccagaaagaaggggtctgtaaagaaggagcccccaagagtactgagtgaggaggagcccccggtccccatttccccaggggtgatgccatgatgaaatgtgtaggaatcgtcttcatcctcctcttcctcctgactccccctggaaactggggagactcgactcacaccaccattgtttccacctcgaccatctacacggaactggggtaaggtctccaggcaaaagatgactatggagatgagaatgaccaacacggagacgatggcgatgcccctggccggcccagagctctctgggtactcaaagagcagccacacctggcgctggaagggctgggagggcagcggcttctcgtcctcgccaccttcgggcaggcagccctcgtcctcccggaaggccgccagggcctcgtcccccagctggtagaagcggatctcctccaggaaaatgtccaggggcacgttgaccggcctccgcaggcggcccccagactggtagtagtagaggatggcgtcgaagctgggccggttgcggtcgaagaagtactcgttcctcagggggtcgaagaagcggactcgccggccagggtctccgagcagcgtgtccggaaacagcgacagggtgcgcaattgtgtctcaaagcgcagcccggagatattgatcaccagccgctcgctactacagcagcccccgcccccgccggcctccgggaagtctcccgcatcctgttgctctccctccggcccacggacctcccccggcgccgccagcgtaagggatttctccgatctcatgccccctcggaggtgcgctccccgccactaggacggcgcccacgacacaatctctggagcgcggcacccgctccccagctcccggctgcgccctctttagggtggggcccgcgctcctcccggttcgcggtctgacctggccgttgggtccgtgagccctaaagccctggtccctgcaaggctgggtctggggaggtgacctgggcgctggggatttggttctgcgcttcccgttacccgcgcccgggtgctagagcttactgggatgcccggaaccgcacacaggcgcgtgtgaaattggctgcccgaaaagacgcgtggcttcgcccccagcggtgcctgagacccggctcccggacgcagaggtccgccctccagccgggctagctcttcccagttcccactgcgctcctccagccgctccggacccccggctgccgctggtaccgaagcgccagatgcgcctccctccggctcggcaaagactcctggcggggctcggcctccgccctgcgtccaccgcggggctgggtccggccaaggtcgcggttccggccgccacagccgccacctcctccctaggagccgcgccgcaggcctcgcagagggcccggggctgccccggcgcccgagcgcggggacccacctccccacggctcaaggcttcgctgccgccgccgcagctgcagcggctcggctctccgctctgcccttccttcccaacacacactctccaagtgacgtggcaggccccgcctgctgccccctcccaccccactcccacatcacacccctcgcccagccaggggctgccgcgagccagggcgccatggaaatagacgcacacttgcctcaccagtaagctttcccgcgctctcctggcacgcctctcgctttcacacgttcacattcgcgcccccctccacaagcgccggcaccctaataccacaccccctccacccccgcagtcggctcttctcatttcaatttaccgagttgacctgcgcagtgtatttcatcaataagaagacacaccccgccccaccacacaatacggagcactgtgcatccactcatacagaaatctaaagaaaacattaaatcatacattcttctgtcttcaggaagacccgtttgccaacctctccaatatctacaggaaaaaaaaaatagagaaagtatttttgagatgccttgagagcttccgatttaaattccaatataattctccgtctacctttgcaagcctgggagggcggggctgcaactctcccagaattgcaaagggatggtagagaaagggtggcaagtcaatcaatgcctttcccatcagaagatttccaggggagtcctgagagcctgaggcaacaaccccagtgaggaaggacccagaagatggaagcacctcagagatacctcagcccagggcacagtgcaccctggggatcctttgctcccaaccaccccgaaggatgcatctggaatttctgcttattgggtgaccaaaaaaagggagaagagggtgagtggaaaaggggtatgtaagagtgttgattgaaaaaataatagctacatttactgggcattgaatatgtgccagccacattctaggtgctttcccagaaagatgtcctctccttgtaggccatgttacaacaaagacccctttggcagtactggagtagggcaaagtttgttgttagggaccagctgactcttccctaactctccagcaagaaggtgataagaatggttttccatccatttctgtctttcttcacgagaccagacaagttggggtctggtagaggaagactcaactgatcttttcagactgacacttccaggtagggttgacatttgcttctctgtgcctcagtttcctcttttctggctggctgtagccaaaatgaattggctaacaactacaaagtgtttttgtgtagcttctggtgcatattagatcattagtatgcattcattgaggttaatgatgagaatgacacataaaggtgctctcaaaccacaggatgcatctgagagttctttgtattgcacggagtattttaaaaccacagtggttctcagcagcattcactctcagagagttggaggaaggagagaaccaaggctcctggatgtgtcgggaagggatcaggtgttgagtgggtaagaaatgtgctagtattagaactcactgcatgctcattctccagtcttgctcctcaccagttgagccaggcaacagcctctgctccctttctgtgcttgcacagctgatttctggcaccaacgccctgtgggcttttttgatcccccaggatagaaatcaaaagagatcacagcatacagtagcaaagagaaagattttatgaaagcttatggacataagggaccaaacaccaagaaaggaagtgggttgctctccaaagtcaaggtgtgggttccctttgtggaggtctgcagtaaggggaagtcagggcatgtagaggtgaggtttttcgggcacatgtacggtggcttaagatgctgcttcatacaacatatgtctcattagcatcttaaatctccacctgtgggcatgatttttagtactaaaataaggaaaagttcatgatgaggtgaaagttaagcctagctaggcacgtagggcctcagaaaggtccttagttctctaaagcaaggggttaattaatttgtggttaatagcttcttgggcctttgatgctgactggctgggagttacagcttgagtaaagggcttttgttcttttttctccaaaccacatcacaacaggaaagcagccagcttgcccatctcatgcttgcctgtctcatttccactcctttctctcaccttgcatgt

SEQ ID NO: 916346 - DNA, 4001 bp, Homo sapiens
cgaagcagccgcctggcccgggggacagcgggggcgctctcggcggcggcgacagtggaggcggcgacggctgcagcttgtcgcccgccgtggtcaagcagtcgcctgggggctcggaggaggcaagaagggccaggcgtgttccaggcagggtcttgagggtgctgcggtaggtttcgtgccgggtgcccccgacattgaggatcaccctctcgttgttctcgatcttgcccatctctgtgactcagacatgactagggggaggcaaacacagcgccgagttaaagatcttagccgtcaaagacacaccatgacccccaccaccaacccagagcgagtccagggatgcagagttggcagacaggcacggggcaaagaccctccccgggaggggatcagcgtccagcgctgtccccgcctcttgcatcaaacctttcccaggtttccagagaactacagagatagcagtcctagtctttcttgacctttcatgacaccgttttccctgcctcccgctttcctttcttttggctctgatctcttcaccttcatcttttcaccttccactcttcctcttttctgttcccactcaagtccaacctgctcccagcccctaaccccctctctgcctccccaaacacactctctctccctctaaacctactttctccccctcctttgccccattctctcctcctcccctggttggcctctcattcccactctccaagaccctcctctttctccccttcccctagcttggatgcaattctcttaggcagggagttttcctcaggcaacttggcagtgttgggtgagagcacaccctccccccaccctgtgaagagcccggattccacacccaccctaggtcaaccccggacccctctctactccctagcgctcagggagtgccttctgagcaacctgttctaggatcacctctacacctgctcacagaccaagcaaaaagacaacacagaagtcagagaaaaaaaaaatctctgctgttgcttttcacctaggagacctctgacttatttcctcattcgatttccttttcacgttattattattattgttgttgatattattattacttgggaaaggaaacaactaactaagatccatctttaagaatagaagtgatcaatgcatcccacccatcccccttcccaagaaaaacaaatcccttagtgggtggagggtgggggatttgctttctaggaggggcgaggctcggggaaaagctgcttggaggcacaccccctgggtccctgagctgaaagtctcgctgacagtgtccctgtttccagcctcccagccacctctccccagggcttcatctctacattcctattgcggaaaggcggagcggggggatgctggcctgcagggtcaacatgccctttccaggaaatcgcccctttcaccacccccgcccccatttccagataccttaacgagaccgagagaaaagtggttctgctttggtttccgagtggacgaggttctctgggcagcgggactgagtcttggcgcccaggtgagccgcccttctccgacgagaaactacttgttggcgttttccggattcaggtggttgagccgcttccctgggcgctggggtgggggagaaagcccccgccggccgccggccgcgctccccgccttcattctgtgatctgcggatttgccagtcgccaacctccgcgcccagagtcaccatcgcgcagggttgggcaaaccatggagctcggggcgggtccagccggcactgcccgacccctccgggagcgggcagatcggctggccgtgaatggagtggagactggccgcaggtcaggagagctcaccacttgaaggtgaagtcgccctgctcggattccatctgcagattttgtttctcccccaaatcagccactgctggagctgtcccttcagcaccactcgccatcaacctcccgccgccatccgaagcacagggctcaggaaagagtgggtgggtgggtctggagaagctatgtgtaccaaccaggttcacatatttttcttccgtgaagctctgtctccaccctctctggagcttctgcctgccttatttacaccccactctccacaccctctctctccccccacccctcgctatgccccacccctcccaacaagtgagagaatctaaaaccaattgcattttttttttctcaatgacagttggccggagagagaggtctactaacaggtgacagtaaatattgttttttatgtcttatgcatagctctggcttgctttttcaaatcaaatgtcagtctccagccaccacaccacggttatctaaagcaaaacaagttttagaagtttatcccaggaagatagtgctttacaaagtacaagctccagggtttctttttgtctgaagctgaagagaaaatccacagatacccaagtatccaagtaattttttaataagccaatttcaccctttctcaagttttcattgccccttgtattagtttgctagggctgccataagaaagtatgacaaactgggtggcttaacagcagaaatgtattgtctcatggttctgccagtttcaaatacaaaattaaggtgttgttagggttggcttcttctgagggttgtggaggaagaatatgttccagtcctctctccttggcttgtagatgggcatcttctccctgtgcctcttctgactattttctctccatgcatatctgtctctgtgtccaaacatcctctttttataaggatatcagttatattagattggggcccgccataaatgaccccatttcaacttcactatctctataaagattctatctccatacaaggttacattctgaagtactgaaagttaggactccaatacaatttttatgaggggaaggggcactattcaacctataacaggcctcatcaccaaacagatcgtgtgtgtgtgtgtgtgtgtgcgtgcacatgtgtgtatctgtgtgcatattccatgaaagaaagaaagaaagaagaaagaaagaaagaaagaaagaaagaaagaaagaaagaaagaaagaaagaaaaagaaggaaggcagacactattctacaggcatagtttgttagaattgaagtccacccagtaaggaaaacaccaggtcctctgtggaagaagatttctttgataaacaggtattgatatgatactatggcttagaaaaagcaagatttgtgagttattaataagaaaattttagcaatatagagagtgataagacaggtagtaaaatgtgaattcaccaaataaacgtctatctgttatgacacattaaataggttaacaaagtagagaaccaaaaggtctttggaaggtcattgatgtctagaaaataaatgcaaaagatgtaatatatacatttattttttaaattactgacaattttacagtaaatgtgtaaagacaatgtgtacccagcatgtgagttactaacacacacaaaaatgtataaggctttaatgtgaagaaaattattttaattttgtacaattatcaatcactgaggtatttccaaaaataataatgataataaatttcaattgccagaaaaattacaaagaaaaagtatattcaccttctaacagtcattcttccattgtctagatggtatcatatattgcttaatgtaaattcagtaggtaaaagggggaatgtggtttgctttagaataaattaacaactgtaatagcaacagaagcatttataataataggtatttactgagatcctactatgttaaaaatgcttcacataaattacccccttttaatttaaatagagagaatgttcacattaaattgcaagactgtaaaaagataactcatacagatgataggaatcagtaatgaaaacctttagtctcataatattagttgcattataagacaactacagagaaaacaaaaagaaaggaaaagataatgcaaagtactcatggggaggaaa

SEQ ID NO: 916347 - DNA, 4001 bp, Homo sapiens
gcaggctggccaggtggcccctcaccgctcttccggtacaggatcagctcagccttgaactccttgtgctcgtccagggccttgcggatctgttggcggacgagctcactggtgtctggcccataaaggaaggagcaggcacagccccgctgcatgacctcagcccgggagaagcccgtgaggtcacagaagccatcagagcagtagaccacggggaagagccccgccacctgggcgttgcccagcacgaagttactgtctgcaagagagcacttctcagaggaggcgtggggtgaaggggcaggaggcctaccacccctcctttctcaaatgcctgcaaccaaagagtgggttttccaaaccccaggaatcctgcgtgtgttaaggcagggctgtttatgaatagcaatcagtgtgtgtcacctgtttgtcagtgccctgcagcaggtgtgagtacattcaaggatcagcacatgtgaactgaggtcggtgaatgaagcgctgtgcgggcactgtgccttctggagggtgtcctgagcaatgtggggtaagggctgggattggggaatccctaatgaggactgccctgccagctctgggccagcctcagccccacctctacttctgccaggctcacccactagccaggtacccaggttggctgtctggcttctcccactgagacacacctagactggaggcaaccccagaccaccatacatcctgctgtctgtgttttagccctagctgcctgacctggctcaggaattagtgaatgtgatcaagaatgggggtgtaagaatggtgactgagcacgggagccaggagccaggaatgtattggggagtggggggcactgaatcagcaggctgcaggagccaagcacactggcaaagcagatggaggagcccggagtggggagagcgcagggctgggctcccaccccctatcaggaaccggagaccaaggaggacctaggcagagagctgggaagccccacgggggatgtgagggagaggaggagggaggggctttcatcacttcccctgtgctcagagcccccagaaccggggatccagagctcggggcgccttctccaaacttccccagtcctgatgggagtccccaaaccatcttcttggggctagatggcctccccaagtctagggggttcaggctatgagacacggggcttggacacacggtgctctcccgagtgccgcctactcttatctccgtttgcaaatctcttttctaaatctgtgttttgagccctctcagctgtccctgagcactgttcacccgcctcgccttaccccaccagtccgagggtagttgctgcgacagcgccagacgcaggggtgggatgggtcagactgactaggttcgggttcgagacccggctaacagagagcatcccaggacccacacccagggacttctggccctgttgcctcgcctgaagcagtgttgaccccgaaccttcgaaccttcggggaaacagcgcctagcaggagacgatggccccagcctcaagaggggcgggtagggaggagagggtgagaataggctggcgccaagctgggctgctgggggttcggggaaggcgggagccctggcgagggtccggcggcccgggtgcaagtgggcgagggtcggactcacgcgtgccgtcgaagcgcgtagcgatggtgtccaggaaggtgttctgcggcgccaggaggccccgcatggccggcatcttaggcgcccgcggctgcccgccccatccctccggggtgcggggactccgcgccgggggagggcgcccagctcggccgccccccgccgggccccgcgctccctagcgcagccgtcggggggcaatgcgcagaccgggatccggggtcgcgccggacgctggcgcgcgagggggcgtccgcgccgtcggggcccggagcatggcgcgcggcccctcgcgccctcgccgcccacaaatcccgggctccaggccccgcggccgccgcgctctcagcacctcccgccgcggcagcggctcgcgtgtcggctgcgggtgggcttccgctcggcttcgctcggcgccggctctcggcagctccctccgtctgtcggggagaagctgcagcctccctccctccctcccgcgcccgccgcctgcaccggggtaaccatggagacggggcacacccagccagggccgcctccttaaagggacaggcctcccgcggagggctcccctcccttcgggacctcggcgggggcggggaggtggcggccgccctgatcccaccccgcgggcctccccgcccgtacctcggagaaccactggcgagcggccggccccctttggctcactcggcctcagccgcagaggggaggcgtctttctctgcagcccgggggctctccgagagcctcctagcagcctctcctcccccggcggaatgggaggggggctcggggcgtggggggcaggggacgcatgctgtggaagatgctctccccgaggaaaatgcagtgggcaaggggacagggcgacaggcgcaggtgaaggccctgcggccagcggaggccggcgctctagaggggctccagccgcacccgggaaatctaaaagcagatggggcgggggttctgcgcgcacagctgcccggccctcgagactttctcatcctcaacttgacgctctggaaaatggatccagctgctcctatgaggtgtctccgcaagcaggagctgcctggaaaccagagggtgggtagccctaggagtaagggtcagacgtcctccgtgtgaccccgtgggcggaaagggtgtgtggtggggaggggagcgccagaccccttgtcctgcccctccatttccctctggcatttgtcacctcttgcctctcctaagcgcgctagagggtcaggtggtaaatacaggggaccggcaggggtcagacactgcgaaaaaacttccgaaccttgtgcgtgcgggtcctggcaccaggagagcgaggaaggccgagccccgcgcctcacgcagctcgtcctggagagctccgcgcggcgccgcgcggggtgctgccctggggcggctgcagggagccccttcccggcggggcggagccgggcccggggcggccgtcttttcttggcctcccgcgctgcgacggtcccccggacttgcctgccagcgccgctcctcctccctcccacgatttgccagcgagcgcggctgccgcccgcgcccagaggagccgccggggccaaaacagcaatttgttccctaacgagcgaagcggtaggctcagcacccccatccctcgagacgcactcacagtcaccagcatcagaaagatgctacccctcatcagcgacgagagccaaagccccaggcacctgtatctaaatgagctggcgctttgggaagggaggacgcgctcctccttctccggtcctgtgaagcctggaatctggtccccaggacgaggagtgaccctgaggagtgaccctaaggagtcgggagatcctactcccatctcatccccagccttggctggatcctggctgtaaagtaatcccctcccccagccgttcaaggcttcctctccaggcggcggtccagctgtctactaaaaagaaggacattttaggagtcagttcactttgagacaggataaggccacaattgaaatcacccacccacttgggaaccaggtctgccacttgctgtccctgtgattaaattttttttttaattttggtctgtgtgaatttttttttttttttttttttttttgtgacggagtctccctctgtcgcccaggctggagtgcattggagctatctctgctcactgcaacctatgccgaccaagttcaagcaattatcctgcctcagcctcccaagtagttgggaccacaggcatgcgccaccacgccccgctaatgtttgtatttttagtagagattgggtttcaccatgttggccaggctcatctcgaactcttgacttc

SEQ ID NO: 916348 - DNA, 4001 bp, Homo sapiens
aagagtcaagaaaaatgtccactagcacaatattttttgttgatcagagatatttacctgtgggcactgaaactatggacaacagctttttcatactgaactcaatgtgtgcgcttttggagtaaagcactctgtgtaatcctttgaattacaatttttttttgataactggtataacattttcaaggctagtccaaaggactgaagctcaggttttcagagactcttctccataaagctgcatttaaaaaatacttactgtgttaggtgttgttctttattgtgcttttttgtttctgaagattctaaaacaaaccctttatttcactttcaattaaataacagaatgataagagaaagggcattttgacattttttctctactgttttcaacccctgcctcatcccactacattcttacctgacattagtcacacacacagtggactccaaaccacttttctccattccacttttctccatgtaagcatagatgtccccatgggcaaaggccaccagccaccacatgatagcgaagagcagccagctgcagaggaaggacatggtaaagatgaccagcgtgtggcgccatttcaggtccaccaaggtggtgaagatgtcctgtagaaagcgtccttgctcacggatgttcttatgcgccaggttgcaggccccgctcttggcgatgaagcgggctttggggaggcggtctcggatgcgcggcttgcgcaggttctctgcggcgatgcgcgccagcacatactcctccgggatgatactctttctggccaacatcgtcctgtcaccatagccagcttagccacctccctctcacctgcctctccgtccctggacacccgtcctcctgcacgagggaaacatttattaaaaacttaaaaacccaccctatcctcacctcttgggtccttgtattcaaggatatgtctgtacatgtgcgaggtgacatgcaaaaccaaaaatgtgatttttactaacccaaacatgaatctagcttgtgcttgagttctgggatctcagaaaaattacttggttttaataaaaagaactgtttcaatttttcttattctgagtacatatggacatagccttagttaaacaaaaccaggagccttccggtaaacagcaggctcaaagataattctctgcgattaaccgcgtctgtaaattagtgcaaggctacagcacgtggcgtcagtcatgaagattaagaccagttgggtgcacgatctacttattaaagtacttagatgatgtagcaatattaaaagtaaagagagaaaattcttcctccgttatttttagaagtaagcaaaggccatgactccttgcgcagtctaaataacgtgtaatctgacaaaattataataagtggtgtgctatagaatttataagttataagaattattttaaatgcgaaagaagtatgagttgcatctaaaaagagttaaaaaggttcctgtggaaatcataatattataaattgaaaacttttttttttttttttttttacaacgaaggaatcaaatatacaaggtgcgggggggaaaaaacccaagacaacagcctgcgggttgcagtagggagtgtgccccgaaaagtccatccatcactgcaagcctctgcggtgttttgcattttaaatcatttacgggaacacggacagcctcccccctccgctcccccggagcagctttgaaacttacagactccgggtagcgggcgcggcggctggacctccttgcacacgccggcgggccgcgggcaggtccctcgctctcccatgctggcgcgcgggaccaggggccgcccaggccggagggacaaattgggggctgcgtgtcctaaggagaagagttaaaataataaaaggtgcaactgaatctaaacgcagggagggctagaggaagggggatgggtgtagatcttcccctccccctgctcagctcaactcccttggccacttcagtggaaggaggagggactgggggggcgggggcgggggggcgatgctccacaaatcagcctcccagttagggctttgacgcacgccagacctcggaagccgacgttgtcgcggagtagggggcgggcggggagggggcgagcgcaagtccccgggaggtagggagcaggccagagggagggacgacccgggggagggcgggacctgcagagccagctcctttccagtagccgcgaccccctgccgccagcgtgacacacaagtctttaaaaggctctctgctcaggggagagaactttctgactccaagttcactgacgtaaggagatttaattttaattttattttgtaatctaggtagataactgggctacttcatgataactgggctacttcggactgaataaaagcagagaggtcagaaaatattcttccaaagcgttcaagctgtgggcacacacaattatttacattaaatttccacctgctaggagagatacaggtggaagatgttctgaaacccactatagtaaagtatttcttcaccagccaaagccagttctcagggaattaaacacacacacacctcaaaacagcgactgccccccaccacccccggccccttaaggaaaagaaagaaaaaaagaaaccactgactggctcccaatgaagaaattttaccccaaacagggacggccgttaacacttcagcgctgataaggccaggtcattcggtcctcagtaattggttgctttctgaaatgttgcagcttcttcctctgtctagatgggtctgaatgataaaacagcatttgcgcacaaaaaaggttatacaataaacatctatagctttttgaaaaggagccagcgaagacaaatgtgctttttcccacaggtcaagcctcctgattttggcacttgcgttaatggaaactttaattcttggaagttccacgtattttccaagactcgagccgaaagtgtatggagcataaacaatgtattcatttaattagccaaagacctaaaattagtctttaatgaaggcaaattaagaactttttttttctccttgtggttagatctccttaacccctgtaagcccaggatcctagtttgttagtggtagtcctcctttctactgtcattaatttttgcagtaatttatgtagtataatagttttacaagtctatgaagaatcagtttgtatagtcaattcccgccattgttctattttacctttgactttgtacacattattattcattattttagcctggggaacatttactgaacacctttgtaagctttttttaggtttatgtgtctagagatatataaatatatgtcatagttgttgcttttaagaggcagacagttgtagtaagagagatattctctaatacaagcagggatgtgattagaataggaaaggaaattttaaaatgtcatgggaattcaaatgagagatatttaagagtaggagactaaggaaaaatccatggattatttggcatctgatctaggctttgtaagcctagatatatttagggtatacagaaaagcagagaaaagacagcccacgtcagcattgatgaagccaagttggctacacagcaggattggacacttgagttcagtgctccctgggcaggcgctgttaccacctactctcaatacttaatgagattttcatgtactcgtcacacccattcccaccactcctgtaccccctcccttaaactggggactgctagagggcaaggctgtgacttgttcatctttgtagcaaggccctagcaccatttaaattataaatgggctcaaaaaatatttttgaatcaatgaatgaaaaatacaaagttgaaaaagcatattggggccttaaaaaatgcatagacagccttaaatgctcaacaaaagaagctgaggagtcctcagtatgtagtggtaagccatggaaagattttgatcagaaaactacacaataagagcctgttttaagaggattgatcc

SEQ ID NO: 916349 - DNA, 4001 bp, Homo sapiens
agagtgacggtaagctgttttaaatactattataatattaatgtagaatttttttcttttggattaatataaatatatcttgttagagttaacagaaagttttcctgtgaacacaagatgcattcccttttggactgtttttctgcttgatccctcaaaaaaaggaaaaatgtcagtaacttttaaaaagatacatacctttgatagttaagcaacaaggagagcagaaaagatcaagggaagtagaaacggaaccagaaccaggtgcactacaaagctcaattagttcacaggctaaggacactgctttttataagttatttttctccattgggaacagttttctgagacttcctctctctgctctccatcccgggagtcctaaccaggttttatcttttttttttttctttttctttttcttcttgcttgctttcgagaccaatagaagttgtcagagaagtcatattaggtacatttcactgaaggttttctattttcagcaagttttactgttctccagacgactcctgactgtccctaaacacaaagggtaactaggctccctgtagactcttttgagaatctatttcatgaaaactaggagccctctgtacttcccaaaatggacccgcaatattccacatttgattccgggtcgtttgtcaagccacaaaagcttatctttgaaccccaagttgaaaatgcctatgtagagcgaaaaggtgaggaactctctcacaactttcgagagtcccctcgacctttcaaggaaggtcattccatctgagttctagatgagaccagctgaagctcggaccttgaccgtgagctggagtaggtggatccccgctaaccactggctttaaatggaggaaaagttaactttcttggctccttgcacttctccaaacccagtccggtaggcgcaggacccggactgggtcgaggcctcaaaatctgagaccaggcaagacaggttttaaagtaagcctctgggcaccactggtcgccgcgcgtaaacccacctgaaaagaccggagccctggggctccctgatgtagtcattcctggtttgagcacagcctgcgccacctggtctcctcctagcaatgcgagcacacgccgaaccctccccgcgcggagtctaacaccgacgctgcctccaaacctccctcgcggggagcccctgggtgcgcggggcgttcttaccttggggttggtcaggagctggtgctcgtcgctgtgcagcagcgccctagagttggactcagagttgttcacgtagacctggacgcaggggtactgcgaggtgcccctgcagtcggcgccacaggtgaaggtgcactcgaacacctcgccgatctgctgcaccgacagcaccgtgcaattggcctccgtggcttgcagatcctgcagcgcgggactcagccagcagaagccgaagatgaagagcgacacgacgccggagatgatgagaaacaagccgagccggatgctcttgtcctcggcttccgtgtactcgtaagccacccggagcttcgccatcgccccccactctcggcggctggcgtgctccccccgccccctcccgcccccggcgccgagcccgactgcctcgggcgggaggagccgccgccgccaccgccgccgccgcgcgacagcaggggagtgggcggcgagggggagcgcgcgagaacaaaggggccgaggccagcgacgcccccggcggcggcggcggcagcgccccccagccccccagccgccgcctgggccccgcggtgcagcagccgcttcagagcctcctgcaccctcgggcgcggggagcgcacggaccgctccagcttccagcgccccctgccagcctccgcccccgcactctccccgcctcccccaccccgcctcctctcgtcgggtgtctctctgtctccatcgcccgctggccgctactccgctgactcgcccggcagctgccccaaggctaggagtgtctgagctggggcgagcccgggggctcccccgtgcaggaggaggctccgccccgccccgtccgcagcagacccgggcccttccgccccgccccgctccgccccgccccgcccgggggcgtctcctttgggcgaggggctgacgggcacaagcgacagcggcgacttgcaatcggaatcttcgctcactccccttagagggacgtccgagatgaaagattaagatcaatttagcttaaccggagggaagttaaaataataataataataagaggggagggtggagttcaagtggagcggcgggaatcttgaactccaaacgagtactggtcacctgcagggagagcggccaggctccgggcgcaccccgggaagcgggcacgggtggcggtgtgggaggacacgagccgcccaggccgggcggatcgaggtgaaagccccaggctagcggtgtgcgctgggaggtccccggggacgactgaatcgcaggttcccatgccacgggcgggctggcgcgcggtggtgccggaggcgtgacccagccgcgcccacgccgccagcggctgcgcccaagggagcgcagtaaccgtccagtcccaggacttgggcctcctaaccgtcttggcgcagacccgcgccccctgaccctgctgaggccgggagggctgcaggattggagttaaacaagctgagtcaggtggagtttgctgtggaggcaatgtgcgtgggggcaggaggctggacgaaggaaacttgctgcttaggtcgtcggtgacccttgtggcaacttaggtctctggcagccgagttgaccccaacttgatttgcccccatggctggggctgactgagaccaaaggaaaaaggtggagagctttgcagcctggaaagaaataccactttacccatcagaaaagtactcttgctttggggctcgcaagaacagaatcatttctgtcgtttccctccttaggagtcttgccacccctgacccgccccaggatttgtagatgaggtttccaggagcgctgcttaaagcgacagcgccgggcagacccactttgggacaggtactgtttctagacctgtgttctgctcttaattcttgccgttgctccctcctcccccaattacgctaacaatgcttcagcctctattgttttcgcgacctttttaaagttagaatgaccttttcccaaactacacttttatcataaaatcaaacttgagaactatttatatgtacatttcgaagaataaaatcagaatattaacttccttgcaaactacataaactttttttgtttgcttgtaagtctcaaatgaataaactcttaattatgttcctgatgaatacggaaacatggaatcatggaattcttgacttctctttcctggacttcaaatgttacttaactggtattgagtacctttcgactgcagttctgataacgttattttgaagcactacattatgacaggtaacaagtatttcccagcaatgggcaaattaattacaggaagatcctaagtgtctttttctcaataaattaagaagatgtagagtttgaaaaacgtccaaattaggaagatgctttgttctctaatacctttcaggttttgagattttctttttttaatttaaatgtaagaattgtattcttttcctgttagcataaagacaattgtgattacattgcttaaaagtgagtttaataattgaaatagcataaccgaaaatcacaaatcttcaatctgaatctttttcctattgcaggaaaaataaaaaacataggaaataatcttttttttctattgttataatcttcttttccaagaaaggaaaagctatgtctaagatctgaagcaatgatgaacaaataacaagatacaattattctagctcagtatgttgaggaactgaaatgaggcagaattaattcctattaatgcacagcagttgggggactaccaataatttaatgaatatggttcgtttttcaatgattccaga

SEQ ID NO: 916350 - DNA, 4001 bp, Homo sapiens
cctgtagtcccagctactcgggagactgcggtgggaggactgcttgaggcagggaaggtgaggctttagtgagccaagataataccagtgcactctccagcctgggcgacagagcaagaccctgtctccaaaaaacaaaaacaaactcacacacacctgtgcttgcctgggctacaccccagatcaattaatcagtatctcagagatgcggaggggtggctgatcagtcactagtgtttaaaaagctctttgggggattcggatgtgggaccagggcttactgccacctagctaaggtatttaaccagctttatctaagagttgccagggatgtgaggcaaagcatcacctcaggggattcctacagcaaagaagtttaagaaacactgtattgaggcttgtataaaaccttcccaaactgagggcatttctacaactcagaaaagtctgctgttacatttcaactaaactaagtcacataattgcagcattttacatccaaaatttgcttataagacagctaccgccaattgcaacttccatcaaatgacattctctccctgtgtttaatacacaaactcttggtctatttctctcaatgttctagtgagaaagatgtttatcatcaaccccacttttttggggagaaaactaggaatcacacctataagagccctctgactcccaactcctttgcccctttcattacacagtccaaatcaagaaatcattagtctaatcccttgcagggcttgttaaaaccgatagatgggctccaccccaagaatgtctgattcagtagtctctgacagggcttgaaatttcagccattttgaataagttaccaggtgttgctgctggtgggaccagagtttgagaaccactggtttatgctgccttcttcccatccgctggtccttattttgcacaaaatggagcggactagtcaacgtcagctacaggataactgacttttcttcagcagcgtcactgggactgattttcccttaagactgcactttccagggacgtgacaaacaagcaagcaagtagaaagaagatctgggccaatctttggtcatctctacccagggacaatgagctactcagggaacagacccttgaggatcccaagcagacaaaccccacagctgagagacagatcttgaaacatcctccgctccttaggcgtggtcacctctggcctcaatggaagttacagataggtacccaggcgccagctgaggcactgaactccgtggcgcaggtatcctaacctcaggcccctggcatctctccccaggattccaagcactgaacgcacatcagcctgctgggctctctcgatttctttccctcactgggccgtgtgttcagacgcacctgggagccccttccccacttcctggaaactcagcgactccagccacaacctccaaaacgccaaacgctccgccccaaggaatcctacctcaccttctcataacctgcccattcattctccttcataatcctccaaatcctcattttccacccccaaatgtccgttttcaattgatatctctttgttctcctcgcaatcaccaactcccatctccaaccagcactcaggactcacttggagacaccccttcctcacgcacacacgtatctactccgcaagcccaaatgtgcttcccggattcctaaccgccagggagcctccctaccaccacccccgcccctaattctccacccaaagcccttcccccaccccgggcctttcccctaaccaatcccccaaatgcctctccactatcgtgactgcccctcatcacaccccctcctctcggtcccttcttatactctgctgctgcccagctccctcggccgccctcaacccctagtccatgggcaccgccctccctaccatgaaaagtcggaggacgcaggagtctccaaacccggactgagagaggcaggaaacacccagctcacgccagccgggggcggaggcggggccggagcgataacttccgctgtccgcaccccacttccgccccgcagagggcaacgtcttaagccgtccgttgtgcgcctaggggccagttttctttccagcctccccggccggagtgggttccagcttttctcggctggggagggcatttatcccacctccgctatttcagctgccagaggggaggcaaggtgtggggaagttttccttcccgggcgaagaagctctgcggaactgtcattttccggaactggatgcttgcttcctggcggggttctgaaagcgaacaccgcggggcaagatggcggtagtgcgtcggctgctgccccgggtctggcagaactcgggtgttttgggctgagacagtggcagctgcggccccgaccccaagtgcggggacctccggcgaataaaggtcggcctgcgggtaggccggtagggcctgcggtccggcctgcgggagaactgggtcgtcagtcctccgagtggtggggctggggactttgagggagttggctctagggcacagtccctgcctggccaggtcggaggaacaagtgctgggatctggcgtgtgtgctccaggggctctttccgcggccctttccacctcttttcactttggggacggtaggcctttataaacggactaatgctgggtgatttgttcctgtggttgttgatgccgaggaaagactctgggccccaggactcacctaaactggagttcgaatactgttcgctcgctgtgtgaccttgggtgagttccctcacctctctgagcctcagtttccttctgtgtaaatggagtaattagcaggtttcacagagggtgtgaatacgttttagtaccgtgcctgacacctagttctgaataaagaaaaacttgatcgtaatttaactccagcttagcccccacaggcaatcttgcactctcaacttctctttgcttggccattctgtgaacgggggagccctggatcttgtttgttttacttagtgataaataactgttttggatatacatggattcagattcaaaagcatccaccttagataggctgtagctttcaataaatagtagctgttaatatgaatagtctctttaagtcgtgtttcctattctttaaataaaaattagattattgaggctggccacggtggctcacgcctgtaatcctagcactttgggaggccgaggcgggcggatcacctgaggtcagaagttcaagaccagcgtggccaacatggtgaaaccgcatctctactaaaaatacaaaaattagccgggcgtggtggcgggcgcctttaatcccagcgacttgggaggctgaagcaggagaatcacttgaacctgggaggcggaggttgcagtgagcagagttcgcgccgctgcactccagcctgggcaacaaagtgagactccgtctcaaaaaaacaaagattatcgagaactgatagagctgttgaaaagacaagttggttaaataatctgtgcagtgtctgatacaccgtctgcccagaacaagtggtggtggtcattaaacctggtggcccagcttttcctactgcacagggacaatcctcttggcttagtcagcagttggtatttatgatgcttcagctttggaaatatagaggtaagacaagagtctgaatcctgcctcttagttattacagccttgactctgccacatactaatggtctagactggagtagatgagatcatgaatgatcttctcataggactcctctccttattagatgagatcacttataaaggacttgacacataatgggcactcatttacttttttaaatgatcttggttatcaccaacctcttattttctaatctttctacctatatgattcttgtttccctaactagattgcaagcttcttaaggacaatacaataaagctcacttacatgctacatgcttttagatatcctatattaatattttcccatttaatcctaatcacaatgttgtgatgac

SEQ ID NO: 916351 - DNA, 4001 bp, Homo sapiens
gagcgcgaccggctcggggagggggaggacgcggcgctcccgccctccctcggtccgcctgtccatctccaggtccctctgtccgccggccccctggctctgcccaccctggggctggtggtgggcgcgggccgggcctaggcccatgcccggccccccttactgcctgccctcctccctcaccaccccaccccacccccccagtgctcggcctcgtttcgtcaccggatcccctggaatgggggacgcgggcgcgaaatacgaacccagccaccggcagctccctccccacgtgcgctcggcccgcagcgcagagggcggcccggggtgggggcgcctcacctttgccctccatggcgtgcacgaagtccccctggtacagctggctgcgaagcttctcctccaggctgaagccgcggacgctgacgatctcctccacgtccgacaagtcctcgttctcgtcgtatcgctggcggtcaatcgggcgctgcgaggacccaaaccagagagcccgggacattattgtgggggctggaggtcgcctctcaacctgggcccagcactaacaggtgcagcagccgagcgccccctgcaccccaccattgcaacccaagcaactttgcgcaattgccaaagatgctgaaaagcaggacaaggagaggggcccgcaccccgagggtccagctgcgctctacgcggggtactcccctccggtgtcttcggaagcactgaagggacatctggggaccctcccctgccccccgcccccgaaatgtgctgggcttcgcccactcggccgggagcctggttatgtaacccgcgaagggggctccggacacgggctggcggggcaaatgtaggccccaggaggagccgctgcggcgcccggctcggcggtaacagcagccccagcggccgcggcggcagagccgggaagccggaaccgggggccggcggcatttctaaagctggagccgcccccgagctaccggggaagctggaaagctgaaatggaagggctgagaccccagccgcccccgccgcccgcccgccagtgcaagaagaggaggtggggggaggagaatcggggcttggaagggggagaggcagacggcccgccacaaagctcggatcggagaccccaaaacgcaccagcagctgcctcatctccccacaagcgcgcgcgcacactcacttcctaaggagactcccccaccactccccgcatccccctgcctcctccctccaccgcccagcgcccggcccctcagccccccagattccgggcgaaccccgagcccgctcagcccccctccacgcctttccccgataccacctccccacttaagtgtctgagactctaagcctcacaaggggctggaggagtaagcagcttgcttccttttgcatgcaatttattatatttttttcccggtcctcttgcaaaatacagaaaaggaaagaaaaggcagcgagaaacaaccaaaaaaaaaaaaaaaaagatctatcatatgccagatacagatttggaaaaaaaaaaaaaaaaaaaaagctacacaccaatcttcttccagagtctttctctgcctccatttttttaggagagttcaccaattaattgtcaacactcctgccccctgcattttggccgaggggggaaggagggaagaccaaagaaaacaaaccaaaaaataaataaataaagcaagccagagccgagatctacaaagttttgcaccaacacttaggcagatccgtttgcaaagtcctaggaaaccattttcagcagttgtggggggggggaggcgtcgacgtcataatccccggaacgtaaacattgttgccgatcgcgctcggagcccgcggccgggctatttgggggggctctcggcccgggcttgggggggtgggggcggcggcccgaggaggtatggggcggggagggagcccgggaggcaccgggcgccgttagcgccgtggcatcgctgttttgttgttgggtcacgagtgcgcctctgcacgcaggcgccgccgccgcccgggagttgtgtgcagagctgacttttggagggccgagttgcaggcggcgggcgcatcccggagatggcggggcagggagggagggaaggaggagggggcggggagggaggtgcagatttgcacggctggcctcagcgggaggcgcggaaatgcaagccgagcatgctggcgtgaaagcccccggggcctggcacccccaaaaacgaccccccacctccgttcctgccctcattgcccagggctacccctcttcctcttctttcatccacccctcccccaacattacctgtgtggccgactcaaattcaaagcattttgtatatataactgttttctttttttgcttttctgctgcatgtctttttcgtggggggtgatcctctgcagatccccccatttgcggacccgccatgtggaggaggcatttggggggctcagaaggaaattagctcggcttccatacctataaggactgcctaacttttaaactcccggcactcaaagatgtggacacacacacgtacaggaaatacagccagaccagagcctttgcagtccgcagctgaccggaagacgttgcctttcattcattcattctgcccgcctctgtggactcctttactaggcgaccagccctgaaacagaagttggacattttttaaaggttcttgcgctcggcaaggggagcagatagatgctcaggagcgaaagacgcagagaattggatctggcgcctcctaacgcagcccgcacaggagcgaagggtaagcccttgttggtagtttatagaagacaagtcggtggaaaggtgcatggtgctctgggataggtggggggaactctagtgcccttgatgaagcccctacagggcttcttagcggaggtatcggcaccctccgtacatacatgggtgtcattaggtccctgtccacttactagtgtttttgactaccccagcactggtcctgggttgtcttgtcctcccatcatgagcaacagtcaggtcgacttggcttgagaaaagctagccctaaacattcctccagccccagctgtggcgccctgctaggcctgatcttgcgggtaaagatgctgataaaatgacatggcaagagggagacgataaagggacattgtagatagcaggctttgagcctgacattttatttctgccataaccctgtgggatacttggagcaggtcattttgcagatagggaaactgaagctcagagaaattatgaatctgaatgattgctgtgctcccatatggtccccaggctatcagacagacctgtggggaggacgtggcttccccaccaggagatacgatgtcactatcagcatcgtattggccgtcctaagagacagcttccccctcactcaccttagaagtttcctgtcctatctgactgtagtctttcccacccatcctcaaaggctactctttgaagtttgttttcattcatgttcactagctgtaaaaatcttttaagcagggatgaggctgggaaacatcaaaatttgtttccaaactgaaatcgcccacgttggctgctgcgtgcaatcagtagcccttcgtgtgagtgctgccggttctgccttcagtccgtccagaaccatggaccattttatttgttcctgtctttctcacaagaaccctttaagggaaatcgtcttgttcgttcccattttgcaaaggaggaaattaggactaagaaaagcaaagccactcacccaggatcacatagcgcgtatgtgccgctgccagggctcacactggagcctggcttggccatcacgtgctttttttttttttttttttttttttagtaacttaccagcctcactactgccccataatgaaataaacatgttcaaaggaggctgcatgggctggagagtgacgcaaagtgaattaagtgaaataaagcaaaaaatatataatagaatgcttcatct

SEQ ID NO: 916352 - DNA, 4001 bp, Homo sapiens
ccagcactaacaggtgcagcagccgagcgccccctgcaccccaccattgcaacccaagcaactttgcgcaattgccaaagatgctgaaaagcaggacaaggagaggggcccgcaccccgagggtccagctgcgctctacgcggggtactcccctccggtgtcttcggaagcactgaagggacatctggggaccctcccctgccccccgcccccgaaatgtgctgggcttcgcccactcggccgggagcctggttatgtaacccgcgaagggggctccggacacgggctggcggggcaaatgtaggccccaggaggagccgctgcggcgcccggctcggcggtaacagcagccccagcggccgcggcggcagagccgggaagccggaaccgggggccggcggcatttctaaagctggagccgcccccgagctaccggggaagctggaaagctgaaatggaagggctgagaccccagccgcccccgccgcccgcccgccagtgcaagaagaggaggtggggggaggagaatcggggcttggaagggggagaggcagacggcccgccacaaagctcggatcggagaccccaaaacgcaccagcagctgcctcatctccccacaagcgcgcgcgcacactcacttcctaaggagactcccccaccactccccgcatccccctgcctcctccctccaccgcccagcgcccggcccctcagccccccagattccgggcgaaccccgagcccgctcagcccccctccacgcctttccccgataccacctccccacttaagtgtctgagactctaagcctcacaaggggctggaggagtaagcagcttgcttccttttgcatgcaatttattatatttttttcccggtcctcttgcaaaatacagaaaaggaaagaaaaggcagcgagaaacaaccaaaaaaaaaaaaaaaaagatctatcatatgccagatacagatttggaaaaaaaaaaaaaaaaaaaaagctacacaccaatcttcttccagagtctttctctgcctccatttttttaggagagttcaccaattaattgtcaacactcctgccccctgcattttggccgaggggggaaggagggaagaccaaagaaaacaaaccaaaaaataaataaataaagcaagccagagccgagatctacaaagttttgcaccaacacttaggcagatccgtttgcaaagtcctaggaaaccattttcagcagttgtggggggggggaggcgtcgacgtcataatccccggaacgtaaacattgttgccgatcgcgctcggagcccgcggccgggctatttgggggggctctcggcccgggcttgggggggtgggggcggcggcccgaggaggtatggggcggggagggagcccgggaggcaccgggcgccgttagcgccgtggcatcgctgttttgttgttgggtcacgagtgcgcctctgcacgcaggcgccgccgccgcccgggagttgtgtgcagagctgacttttggagggccgagttgcaggcggcgggcgcatcccggagatggcggggcagggagggagggaaggaggagggggcggggagggaggtgcagatttgcacggctggcctcagcgggaggcgcggaaatgcaagccgagcatgctggcgtgaaagcccccggggcctggcacccccaaaaacgaccccccacctccgttcctgccctcattgcccagggctacccctcttcctcttctttcatccacccctcccccaacattacctgtgtggccgactcaaattcaaagcattttgtatatataactgttttctttttttgcttttctgctgcatgtctttttcgtggggggtgatcctctgcagatccccccatttgcggacccgccatgtggaggaggcatttggggggctcagaaggaaattagctcggcttccatacctataaggactgcctaacttttaaactcccggcactcaaagatgtggacacacacacgtacaggaaatacagccagaccagagcctttgcagtccgcagctgaccggaagacgttgcctttcattcattcattctgcccgcctctgtggactcctttactaggcgaccagccctgaaacagaagttggacattttttaaaggttcttgcgctcggcaaggggagcagatagatgctcaggagcgaaagacgcagagaattggatctggcgcctcctaacgcagcccgcacaggagcgaagggtaagcccttgttggtagtttatagaagacaagtcggtggaaaggtgcatggtgctctgggataggtggggggaactctagtgcccttgatgaagcccctacagggcttcttagcggaggtatcggcaccctccgtacatacatgggtgtcattaggtccctgtccacttactagtgtttttgactaccccagcactggtcctgggttgtcttgtcctcccatcatgagcaacagtcaggtcgacttggcttgagaaaagctagccctaaacattcctccagccccagctgtggcgccctgctaggcctgatcttgcgggtaaagatgctgataaaatgacatggcaagagggagacgataaagggacattgtagatagcaggctttgagcctgacattttatttctgccataaccctgtgggatacttggagcaggtcattttgcagatagggaaactgaagctcagagaaattatgaatctgaatgattgctgtgctcccatatggtccccaggctatcagacagacctgtggggaggacgtggcttccccaccaggagatacgatgtcactatcagcatcgtattggccgtcctaagagacagcttccccctcactcaccttagaagtttcctgtcctatctgactgtagtctttcccacccatcctcaaaggctactctttgaagtttgttttcattcatgttcactagctgtaaaaatcttttaagcagggatgaggctgggaaacatcaaaatttgtttccaaactgaaatcgcccacgttggctgctgcgtgcaatcagtagcccttcgtgtgagtgctgccggttctgccttcagtccgtccagaaccatggaccattttatttgttcctgtctttctcacaagaaccctttaagggaaatcgtcttgttcgttcccattttgcaaaggaggaaattaggactaagaaaagcaaagccactcacccaggatcacatagcgcgtatgtgccgctgccagggctcacactggagcctggcttggccatcacgtgctttttttttttttttttttttttttagtaacttaccagcctcactactgccccataatgaaataaacatgttcaaaggaggctgcatgggctggagagtgacgcaaagtgaattaagtgaaataaagcaaaaaatatataatagaatgcttcatctaattaattcttttttctccctgaggcccttctttctctccaagtggcctcatagtggccccaaaagctggcatcagaaaaaggtccaatggcagccaccttagtataaaaacagttaagtccatctatcacctccacgaggagttcctggcctgtcagagtgggaaggggctgggtagtcacctcatttaatcccccccctttacaaacctcgaggaaaccgcaaacacgagaaaagaatgggccagccgggggtttgttccccttggcctcccccagaatgcctgccctgctgccgggtcctaagtggccactcaataaatgttgggcccttgatgaatcaccttccccctcgatatttgcattttctctttatcagtaattggcagatgaaaggctttgtcctccagttgaaagaattccaagcatttgctcaaagtgggggaggaggttattttggaccaaagggggaagggccaagaccctggagctcccagtgttgactaattgtcccagagaagtggagagtaggtaagggaagagagaaggtgaaggtg

SEQ ID NO: 916353 - DNA, 4001 bp, Homo sapiens
ttaagatttgttaatattaggtaattatgatagaaaaaagggttaaatggaagtttttggaggatggcaatgcgtatcatcatagcaattatttgttaatcctctgcttgaaatgagtagtctataaccttaaacaaagtcattcaacatagtgagagcattacgtctgtttcagaatcagaaaaactgatctaggttcaaaatacactttgccacttgcccaagatcacacatttggtgttttaacttatccagattagcctcatctgtaaaaggcggactttatttacctgtcagggcttcaaagattaaagcaaacaatctataggtgttaaattagttcctcctcgctgtcatttaagtttttaatacgctgcggtgcctatctctgtggtagtcagtggtgacggcagatgctttttaaaaagcaacactggttaacagtgcttaatattttatcattactaatactagacaaaacataaagcaaaatgcctttaacaagcaacgactaaagcaatggttcgaaaacctcaacttacatgagaatcatctgagactagttgctagaaaagcagattccagaacttccacaacaagactagagatctgcatttaaacaagcatccagttgaccctggtgcaagtggtccagcaacatcatttaaaaagcactggtctaatgagtaaagaaaaacacctttgaccttgagtaatcactcaacctcttggggcattaatcccctccacacaagggatagtatctgttttccttacctcaaaggtgagattataattaaccttataggcaaacctagttatctgcaataactgtgattctaaaatcgttgatcttgagttccctacgtcaagagatttcaacatttccttccacctccactataaaccaatttttcctaaacctctaaattttagaattattgctgctccttctctttccccgctaagactttttcactgcggcaataattagtctggagttcttgtctagtaataccatccggtgagactagagctcagataaccttttcagaaaccctagccctgagatgaggcctgcaaatatttgatccaaccaggtcttgaataaagagatagccgactatcaaaccataatgaggatacgtgagggaagaatacgtcacgtcataatactgtactttaaacaccatatcggctaacgaaaggctttaggcccacggctgagagaaaagtatcagttcccaagttctaggcggaagaggcccaagagacaccactttctcgctttcagacgtgtctacataagaccacaaaagaaaccgaggcaaaaacatccagaaacaggctccagttgtctcaaaagagagtacatatgaaacgagacaaggatcagaaaagtaaagctaaacccagtgtacggactcccccattcttccttctccccctctctcttcacagactgaggtaccttgggcggccgaattttgcagatgccggttttctccgccaaaggccggatgcggccgataaagctgagcggatctgtgaactcctcccaactcggctcaaagacggggcactctggcggtggcacgaactccgccgcgtagccccccggccccacgcccgccattgcaacggccgggggggggggggggtccccgtggggaaccggtggagaaaagctggctgaagcccactaagcccgttcaagtcccctgacagaggccgaagcgcatcttcgcggacaagaaccgttcaacacagaaaccccagaatcgcttcctcctcccgtttgttattgtttcttgcaaggcttttccactgaggttcaggacttttccggaagttaccgtgctgtcaaatccctccgccccctgcaggaaacggaatccttccgcagctgcacgacgcctgtgtgtctggcctttccttcttcttctcttccccggcagcacagtgtggctgtttgtctccttgcccgccaaagttctgcccagtccaacgactccacgcagctcgcccttggtaaggggtcggggaggggcacaagctcttctttactagaggtacggattgagggaagccgacggggcgaggcggggcgaggcgcaacgaggcggggcgaggcgcgacgcgacgtgacgctttcttccggcgcggaggaatgtgtaatgccccagagggcagaggttgtgcttccggtgaggagggtccctttcccttttgtgtatcagtgcactcgaaaacacgccgggcttaatcttaagcaccgcgcctcaccgcccgtgcttcgtaatttgttttaacctaccctgctgcgtttatagcaagtagcctttccagcatttctctttttttagccctttgaatgcagatattttacagtaatctcactctgccactttatacccgcctcttctccatcaaaacaagtgcaggtctaacccatcccctaaatcctgccagctggctttagccaccatccatgaattgcttttccttttacacaggacgcagcagctctcctgaattaccagccagtatcgtctagctacctgcaggacatctcactttgataactcaaagtactttaattgttcactgtttcttcagtgttcctggtttccattaatgacttcatctattcagttgcctgagcaaaaaaaaaaaaaaaaaaaaaaaatcaagaaataatcctaattctttctgctctcacttcccatgtataatcgtgtgtctctccatccccgttaccagtatcctaatttaaatactcttactgacaacagctgatttctcctctcaaatccctctccatccacacgttggattgctttgtctaaaatccagaattcatcttgtcacttttcatctccaaactcaacaactccaaacatcttttttaattgctgatttgctgctttgctctccagcttcatctctcctgcttctccatatgatctacagaagtttttgtggtgactttagtacaccatgatttttctcacctctgagtaacaaatcaggggactttgaataacgcagattgccctccataatgtgagtaggccttatccaatcaactgaaggcctgaatagaacaaaagactgaccttccatgagcaagaaggaattttgccagtagatggctctcagacttgaactgtagcatcaccttttccctggcctccagcctgccaacccaccctgcagattttggacttggaagctctataatcaagtgagtcaagtccttaaaataaatatctttataaacacacacacacacacacacacacatcttattggttctgtttctctggagaaccgtgaatacatctagggttggagggttcaagatggcctcacttacgtgtctggcagttggtgctggctattggctgggaagtcttagttctccacatggcttctcatcttctggtagatggagcttttccactgcatggtggtcttagcattctaagaagatgagagtggaagcaaagacctaaagcctagactccaaaatgtacaagatcactccatcatattctgttggtcaaagcaagtcataagaccatcccagattcaagaagtgggaaaattccaattttttatgagaagagtgacaatgtcacattacaaaggggtgtagacacaggacgctgtgattcataataattccatacaattattataatgatttatgtccaggtgcagtggctcacgcctgtaatcccagcactttttgaggccaaggcgggcagatcacctgaggtcaggagtttgagaccagcctggccaacatggtgaaatcctgtctctattaaaaatgtacaacaattagcccaggcgtggtggcaggcgcctgtaatcccagctatccaggaggctgaggcaggagaattgcttgaacccaggaggtggaagttgtagtaagccgagatcgtgccactgtactccagcctaggcaagaagagtgagactctgtctcc

SEQ ID NO: 916354 - DNA, 4001 bp, Homo sapiens
caaaatgatcagtaaacattgcttcttcagggaagaggtgaaaatatgtcaacatttcatacacagatcttaattaatatacattagttagtaggcaccatatgcaaagcattttgcaaacattgagaataattcaccgacttgtagctttctggttgtaacccaaacacaataaaagccgagaaatggaaagaaaattttagcagctctaagtgtttttccatttcaagctatttaatttaaagaactgaactgaaaccagtagttgaatatgagagtacaaaaaagtgatcttttaaaaactcaaactgggaatctgtgttgttcctgagaggaaagcatatgcttttacttttactcttaaatgagcagaacatctggatgagatttcctaggccttttggcccttgaaccaaaggaatgaagggatcaaagaacattttagcactttatggtgaaggaaggttctaggatctgaataaaaatgtaattaatctgttattctctagctcaacctctcaagtaagttttttgagggtgggggaagatgtctataattttaagcacacaattaagttgttcagccaagctattgaattatcaattctctctctctctccctttctctctctctctctctctcagagaatatgtatattctgtctctatatatgtatatatatgtatatatagagatagagtttattatatagagttgaatacattgtgatgtatagcacaagtacatgagtattgtattcaactatgccattattatggttgataagaaacaaaaacaaccaaaaacatatttaggatacgggtggagaatttctttatattcatattatcagtgtggataatggaaagtaggttagcgtttactaatatttgatacatttaaaacacataaaccctccccactgatcatcaaagattattggtacaaataattattttaacaggaaatatacatatatattttaataatttatagcatacatatgttacatatatatttatatatatatatatatatcagtaacattctgaccaatgtacatttattgaactgattgataataggatgaaataaattttactgattccttaggaaaagataaagtcaacttcatttatgaaatgctgatcattcaattttgccattaaattgcagaaaacaagtgcagaactgcttctgcaagctgtcaaattttctaggattgcagaacgctgctctggccatgttccaacaaagaaacatcatttttttttttctttttcagaatagggttttggtttagttattgaagttgtaaccctgcgtctgttgaataagtactttgcatgcttaactttaagagtttttaaaagtgcaaaatagtttaccttgccttccaggaatacaccgttgagtcctgtgtctcagtctgaggtttgctaaaaatcagttaagagaaaaaaaaaaactttgacgaaaataatttgtttttactttaagctgtcaagtcgtctatgagaaacagtgaaacctactcgtcccagtcaccatgaacacctttgatctattgtttccactttgacagggcttcagaagactgcttacctcagccttcttggatcttcttcttccttttctattggtcactgcttgtacatggtaatggattgacccaggctccactgtcgtgtttttatgaatcctcggtaaaatatatgcactagtagatccaaatttaacccctccaacaaccacggaatcttagtgcctacacagcccagcaaaggaaattcttactttaatcctaataactcataaaaaaatttctaggcaattttcattcctaattcacagttcaattcattagtatatgttgtcatgtactgatatccagaccttatttaccaataggcagctgaaggcagttttaaagtataacaaaaagatattttaaaagattttaaaacattttccctagatgatcatttcttaaaaattgaatacaaataattaaaagccaatgtcttctgtttatatggacatattttatctgttcctgatataaaatagatgctgtaatgtgtttgactaagggaaaaataaataaatatatgtatttgaaaaaatgtaaatgtgatatctggaaagcactacctgattttggtgctaatcttggtattatgctttttttcagagaaataatttttgtatccctatttcctattatatttcttttaacaatttattccaagtacctgctaaggtgggataattttttattcattataatataacacatgttttgcatatagtcccttatgagacattctgttacactgctacttttttctttaacacatatctaaagtagtgtgtcctccacttctgatacttgatgaaaaaaaattatgcttcttgagaaaagatgcaaacaaaaaatatttcatttaggtgttattatgtggattgattgttgttttgtttttcaaaatctctcttattctagcttcagtgaatgttatatgactcatttaacagctcacatgagtattgtcaaagagcaccgtgaagaggattaagcattggattcagaggaccttttgtgaaccacctctttcctctctcctaaccataggagggtaaattaaagttcagttttgtcatctacaaaatagtaatggattgcttcacagagttaggtctagtttgttataaacaattacagaaataatagccttatttggaattagccctacactctcaactggaaaatgcatttatattaaagggtttttatagattgagatcctattttgacatgattttttactagtcctataggtatgtaggtgtactcacatcacattttaagaagacaaccaagtgttacttgctttctcacaacaattgtctcctctctctgttgcatttctccctctccttttcctaaaccctcaggatttaaacaacagatgatcttcaaatctgcatggccctcttccagctattgtcttactgttgatttttttagccaaactgattttagtctttttataattttcttatacaaatgttgctacatgttcattgtaggaaaattagagtagtatactggctgcctccaatctatttcctcttcaccattccactcatgatctgccaaccaaaatatgacttctaattctgcttccctaaaatggttctgacagaaaatcagcaatgatcctcacatttactaatctgttgaagtcttttagtgttaagcatacttggcctttgacaatactgacccacccccttttattaaatgttcgtcttagttgttctgacattactctttcctagtttttcctcccattttctggtgacttctctctgtctatatcccaaagctctatttcctctttataacattatttaagagcatttctagcatttggaaccctttgagattctgtcctctgctttgtgctcttcttgctctatacacatttcctgcatgattctatggttccaaccatctcctccatcatggtaactcctgagtctgtatctgcaacccagcttctagaagacctgctttccaatgtgtgtgtatatctgctttctagacatctcctgttgcatgtctcaagggcatatatgtaaaacgaaattctctgtctccttttacttctaactgctcctgtcattttatacttttgagacttttgtcacattcagtctcccaaaccacaaatctggaaatcattcttaactcttctctctcattctgtgcgcatatgataataatcacattttaaggactttgggagacatgacacaaataaaaatgatcatctacaatgcttgccgagttttaatatcattgtttccagactaaaaacatagaattgtttccactgtcagggtaatcactatctgtgtctcgatttttcctgtaacattctaatctacttttcttcgattattgattcttgaagagtgggtactttaactc

SEQ ID NO: 916355 - DNA, 4001 bp, Homo sapiens
tggcgatgccacggcactgggcgacagagtgagaccttgtctcgaaaaaaaaaaaaaaaaaaaaagacaatgctagagaaacaccacgccaataaatcactcctttagtatgttcagggattcacaaacaggaaacagaaaacctaaaataacattaaaagttccttgctgacaataaacggttgtaaaattggtgaaagttaaaataacaaaagttgagataagaactacatggtaattttttaagagtaaaaattccaaaaacctacttaacatgctcatctttgtcaacagactgcactccttgttttatctttttatccctaatatctagcacagccactggttgtagaaaatatctgttgagtgaatcagaccattctactccaggctgaaccattttcaaactcaattaacataactctattccaattttttttgaagataccagttcgtcatctttgtccataaaacatatatgacaaggtacagttcactttataacaatacagaatcccctccacaaaaaaaaattaaaagattttgtcattatctccaaggttaatttttatgctgcataagagctaataccttattatcacccaggctagagtgcaatggcgcgatctcggctcactgcaacctccgcctgccgggttcaagcgattctcctgcctcagcctcccaagtagctggaattacaggcgctcgccaccaagcccagctatttattttttagtagagacggggtttcaccatgttagccaggctggtcttgaactcctgacctcaggaatgttttgtgaaaaactgcaacccatcctggatgtagctcactcttctctgagagacttgtaaaacctaattcatctaacattgtaggcattagtctctcttcgtaaatcaagcaaaattcatccggaatttttaaaagcaacgttccaccttttgggaaaactatgagggaaaaaaaaaatcacaaacagcatgctccaatctctcttagatcacttacacagattactatgaccaaagataagaagcagattgccaacttgtatttatttcaagtagagtttcactacaattaatttggcctcaatattttactgaaagaaacacaatttgtttatttcgggatagacttctaagttaaaatcagacaattcgatcttgtgaagcaaaatttgaagatttgctgtaatttttgaagcctttataactgcgatggaaactgcagaacatcactgaaaaatatcacttagcataaataaaaggcctggaaaatgataaaatgacattcacgtgtttattttcgcagggtgaaaagttcttttttcgctcccttctacggttatagcaacgcgatgggaaagacacccaaacttgcaaaagttgatttgggaggaaaagaagaaaaacaggaaaccgaaacaggaacccagacatcagcgtcctccagagctgaacgctcagaatctggcgaaatccccaagaggccagagacagaagcagcctgggatcccggggccgctgggcctcccgggcgcgccccgcccaagccccggggcagctgaagggggacgccgctccccgcggggcaccgcaggctccccaggagagtctccgcctcacacgccgagccctgaacgggcagcctgacccgccgtggctgggaccccaaccccgaaagtaacgctggagagcgcgtccctcgcacaccccaagggctctgaagtgtcccgcaccagacggctgcgcagccgtccctctcgcaggagcgctgcccagcccagaacagcggcgggccgaaggagcgtccacccgcagccctcgccctgcagctcccttactctgcgagccgtcgtcaacgcggtcaaactcccagtccggggacagagtctccaccgccatcaccccggcgcctcccacagacacagccccaaccagcccgtgcggcgacgacggcctcaccccagctactgtcacagcacgtgacttccggccccggccccgcctccgctcgcgagggccggccgggctcgttgcccctgcgaccgcgggggcccctgggaaagcgagtcctccgccgtggccgaaggcggccgccatggcgccggcagtgccagcgggcgtcttgcgacccggctcgggcttcgccaccattcactgtgcttctcaagccacttcggcactctaatttcgccctgctctctctagacgatttttaatacctgggaaagttactccccagtctaacctaaaaaggtagaattgatggggtggggaattaacaggaaggcatgatcctcgaggataacgctgaccaggcgcttcttccaacaagcctgtttccctctctgtcgccaccgtaggagttcctacagctctcccgcacattctgtacggattgttttttagtcaagacgttctgtgcgagaggagaagttactttatgaacaccctaacaggggatcttacgacctcttccccgctctccactcagtccttttaaaaacgcgaggcaggatgaagaacgctattgaagtacattctaaaatgatcccacctgcaatttggatttttggagaatcgggatcggtgtaaaattctacatgcatacacgtatttgcacaagaatatttatagcaacgtggtttttaataggaaactatctaaatgttcattacaagtgaattacataaagctcaatacatccatactacgaatcactgaagagctgctaaaatagatgaaatatatttataatggcatgaacaaccgacacaagacagttgcagagtaatgtgtatttgtgattacatttatgtttttaagttatacaaacgcgtatgtgcctacgtgtatgtaaattcataggaagacaaatcagaggacggtggttacctggggaaaagcatgtgttggtgagtaacaggattttcaagttttgatgtgtctacttatgtgttttgaatccttaacaatgagaatttattagggttttactcttgtaatcttaaaaagtaccgaaaagaactaatcaatgtaggcaaaaggtctattgaagagcattcttctgaggtcattggatctgccctgagttaaatgtttattgagtgcccactgggtaccaggcaccaggctagatgcagaaactataaaacatgtaagaaaattgctttctgaccctatggcagacttagtgggcatttcagaaagaaaaaaaaaatcttgaaaagaacaggcatccttagggtctaatggctgacaaacttttttcctgtactttctgtgtgaccatgagtttgactttcctggattcttaacatttgcattaaatcactgtaattaatctcccagcagctcattgtgataaattgaacttacaagtcagaaaaatttgagtctataaatacactaatctattaaagttaatagattagtagcaagaggcagtgtcatgtaataattgaaagcacagttttgactgccaaattgcctaggtccaaatcctggctctgccacttactaaccatgtgatcttgggtcacgtaatttaacctctgcctcaatttcctcatctataaaatgaaaataaaataaaactagtaaacaccttgtgggattcttacgaggactaaattagttaatacatataaggtacatagaacaataccaaccacatactgtaccaggttgctattatgaatcaatatagatttatcttaaaaagatctcagaagtcccagatctcacaagtcccagtgtggtggctcatgcctgtaatcccagtactttgggaggccaaggtgggtggatcacttgaggtcaggagtttgagaccagcctgggcaacgtggtgaaaccctgtccctactaaaaatataaaaattagatgggcatggtggtgcctgcctatagtcccagctactctggaggctgaggcaggaaagtcgtctgagccactacactccagcctgggcaacagagcaagactc

SEQ ID NO: 916356 - DNA, 4001 bp, Homo sapiens
tcaggaccccaattacaggggagccaaaaagagctatataaaaacaacttgtacctaatgcaaaaactaaaaatagtattttgggtggagggaagaagaaagggcaagaaggagacaaggaaaaacgcaagtgaacattttctcccatccaagtactaaccaggcccgaccctgcttagcttccgagatcagacgagatcgggcgcgttcagggtggtatggccgtagacgcaagtgaacattttcttaaaacccacatcacatgaaagaacacatgcctactatatctgggcctaaaaaagcatcaagcatacctcagggctcagggccaagctgcctgccaaacaggcccatggactggactatgggaaccccaaccagttcctacaactaatactccagggagtaataacaccacagccttggggcataagaacacaaaagacctcaagagttgctaaagcaagattttcatgcattctcattcttagagaataacaatgacctacactgaaattttaaaaaaggactctaaaagaaaaaaaaaaaagaaataaagctaaatgtctgacatcttattacccctctgggaggacatcattctacactaaggatatacaaagtaaaaaagtaaaaaattaatcctgcaggtaaagggccacgtctctcctttaattccagtgttatgcacacattccaaggcagatgctatcagtgttccttccaatgttccaatgagcccatattaaaaaaaataataatctgtctgaggtcatgaagtctggggacagaaacgcaaattaatatccaacctagcgtcatccaaatggcaaggttcgcttcagggtagcatactggaagctccttgagaacaaggaccctgtaatccccctgcaagctcaaactagctatccaaccaaaacccaaatagccctctctagagatagctatgaaagcaactgcttttccctctaatacaaattatcagcaaataaatgtttatagcttaatgcttaaaacttacctaggtagagccatcaatttttctaaagcctaatgtttaaaatttacttgggtggaataaatatacttttatttaaatatcaactttctaacagtacaatcctactctggaggtttaggaggaaaaaaaaaaaaaaaggaaaaaaaacttggagctgctgcccgaagtactgaatcagctctggaagttgtcatcacccctaatgctgccttaaagaagattccatacattatcttcaacttataggtgccaaatcatttcccatgcttaatctcggcagctggagactgaccaagtggaatcaaaagctcaggatttagagtgaaaagacccctgacgttcaaggccgagctttcccaatacttgtgagaccttggacaattcacttagccaaataactctcattttctcttctgtaaactaggaagggacgtaaatacctgtcccacctgcctcatggatgcgtcgttgctgccgttaggtggaggggatgatccacagagggccactcgccgtcccgccgcccccgcccaggtccagccaagacagaaggcgccggagtccctgcggtgctgggtccgcggcgctcgggaaggatgctcctctcgccagcctcccctcgggacagcggcgaccggcgttctgacattccccgccgtaacacctgctcggcgccctctccccgcgcgtctccgggttcgccccgcgcccgagacccctgccccgctgggcgcccctctcgccctctggtggcacagagaccccagccccaagggactgcaccctcctcggcaccgggcgcctgcagctgagtctgggttgaggccagggcccgaccggcctcgcccccagagcctcgcctccccttattccaacaccggcggggactgggtggtcgcaagcatgcgactccttacccggcagcttgagcgccctggacagcacggtcgccatggctgaggccccggtgcgcgtgcgcgcgcccgcgttctgccgggaagtgtagttccgagcggcggtgcgtggggctgggaccgggaaaggtgggacccgcttgctggggacagagctgagggaggccaagccagagtacacgctccgcaggcttttctcccaccctacctatgcaggtcacctcaccactctgagtctcacttgcctcgtcagtgaaatggggagaaaataccccgtaagcttgcagtgaaaatgattcgaaggagatatttaaggaggtgtggattgtgcaatgtgcgtgggctttgaaatcaggcagactggatttgaatcctgcctgaatcacttactagctgggccatcttgggcaagtcccttggggcgactgagctgccgctgcttttttttaattaaagacatactacctacttcacaagcttgcaatgagaattaaatgatacgacctgtttaaaacacacagcacacagtaggcacctagtaagagtgtttctattacgcttcttaggtagaagttgaagtttcctggagctcgaaccctcatttattgctcccagttctttacaggtgtctactcagcaccctacgctgcagcttctagttgaagggtgtagaaggaggatccgactgtgtacatacatccaatagatgcagcatctccagctcctcagatttcaatgcttgacctttaaggcatctgcacgctccccgtaatcaccccagctttgcctgaatgatttttgcggagagcccgatgcccaggaattcctccttccttggctccctgagctttcccccactttgtcttccttgtccctctggaaatctccttcatccctccataacttttttccattttaacataggaactgcagcttagaatagtatttctcaaatttaatgtactttcttttcaattaaagaaaaaaattcaaagcagctgccaaatgaatcaggatccttaccttttacatagagaatacctgtgtgttcctctctagctactgagtggaatgtgaatacttttgctgcccaaacacccactgaggtcactgtggaaaatgcaaacacccaggccctctctgacttctgaacttggcttgcctcaggaccaggcacagtggtgtagaaggaagaactgacttgcttctttcccacacgcaagtgatcagcattttagtgcaggaatgctaatactgtgttatcttagaactggaacagatcctagaggctatctagtcccactctccttgttttgtttaagagaaagctgagaaatagaaaggtaatgtaacttctgagtgtcacaacaaaagctccaagatacatctcatttgcaggctgcctaattcccgtgagaaactgcagacaggactatcctgtgggagtaatctgagagtctccagcaatcagtctcacctcctttcttcccttggaaaaaaaaaatgtcattgtctctgatagagcacaggctctggagccaggagccaggcctcccgagatcaaatcctgactctatcatttcctagatgccaggcagagggttagttgcttaatttctccccacctcaattttctcatctgcaaaatggggacaaaacagttcctagtttatagagttctcctgagaattaaatatatatgtagaaagcacttacaacagtgcctggcacttagtgttttctaagtattcactcttcttttatcgataatttcttaatgttttaacaatttaaaatttgtaacttaataacaaataatacatttcatagtaatttaatggtttagtaatgtatttatttattaattctttcaacattctacaatacccaaaatttctactgcttgccacttctctggaggcatgattaaaaaacatattttacatctatgtaggtcatctaaaaggagcaacactacaagtcacaatgagccagtagtagcttgcctgatatcagtttaactaaatggaacgcattcctgaaatatgaagactgagaaaaat
